United States Patent Application Publication US 2018/0126003 A1 - sequence listing, part 34

SEQ ID NO: 56311 - DNA, 2496 bp, Artificial Sequence
  derived and/or modified sequence
atgcccctggagatggagcccaagatgagcaagctggccttcggctgccagagaagcagcaccagcgacgacgacagcggctgcgccctggaggagtacgcctgggtgccccccggcctgagacccgagcagatccagctgtacttcgcctgcctgcccgaggagaaggtgccctacgtgaacagccccggcgagaagcacagaatcaagcagctgctgtaccagctgcccccccacgacaacgaggtgagatactgccagagcctgagcgaggaggagaagaaggagctgcaggtgttcagcgcccagagaaagaaggaggccctgggcagaggcaccatcaagctgctgagcagagccgtgatgcacgccgtgtgcgagcagtgcggcctgaagatcaacggcggcgaggtggccgtgttcgccagcagagccggccccggcgtgtgctggcaccccagctgcttcgtgtgcttcacctgcaacgagctgctggtggacctgatctacttctaccaggacggcaagatccactgcggcagacaccacgccgagctgctgaagcccagatgcagcgcctgcgacgagatcatcttcgccgacgagtgcaccgaggccgagggcagacactggcacatgaagcacttctgctgcctggagtgcgagaccgtgctgggcggccagagatacatcatgaaggacggcagacccttctgctgcggctgcttcgagagcctgtacgccgagtactgcgagacctgcggcgagcacatcggcgtggaccacgcccagatgacctacgacggccagcactggcacgccaccgaggcctgcttcagctgcgcccagtgcaaggccagcctgctgggctgccccttcctgcccaagcagggccagatctactgcagcaagacctgcagcctgggcgaggacgtgcacgccagcgacagcagcgacagcgccttccagagcgccagaagcagagacagcagaagaagcgtgagaatgggcaagagcagcagaagcgccgaccagtgcagacagagcctgctgctgagccccgccctgaactacaagttccccggcctgagcggcaacgccgacgacaccctgagcagaaagctggacgacctgagcctgagcagacagggcaccagcttcgccagcgaggagttctggaagggcagagtggagcaggagacccccgaggaccccgaggagtgggccgaccacgaggactacatgacccagctgctgctgaagttcggcgacaagagcctgttccagccccagcccaacgagatggacatcagagccagcgagcactggatcagcgacaacatggtgaagagcaagaccgagctgaagcagaacaaccagagcctggccagcaagaagtaccagagcgacatgtactgggcccagagccaggacggcctgggcgacagcgcctacggcagccaccccggccccgccagcagcagaagactgcaggagctggagctggaccacggcgccagcggctacaaccacgacgagacccagtggtacgaggacagcctggagtgcctgagcgacctgaagcccgagcagagcgtgagagacagcatggacagcctggccctgagcaacatcaccggcgccagcgtggacggcgagaacaagcccagacccagcctgtacagcctgcagaacttcgaggagatggagaccgaggactgcgagaagatgagcaacatgggcaccctgaacagcagcatgctgcacagaagcgccgagagcctgaagagcctgagcagcgagctgtgccccgagaagatcctgcccgaggagaagcccgtgcacctgcccgtgctgagaagaagcaagagccagagcagaccccagcaggtgaagttcagcgacgacgtgatcgacaacggcaactacgacatcgagatcagacagccccccatgagcgagagaaccagaagaagagtgtacaacttcgaggagagaggcagcagaagccaccaccacagaagaagaagaagcagaaagagcagaagcgacaacgccctgaacctggtgaccgagagaaagtacagccccaaggacagactgagactgtacacccccgacaactacgagaagttcatccagaacaagagcgccagagagatccaggcctacatccagaacgccgacctgtacggccagtacgcccacgccaccagcgactacggcctgcagaaccccggcatgaacagattcctgggcctgtacggcgaggacgacgacagctggtgcagcagcagcagcagcagcagcgacagcgaggaggagggctacttcctgggccagcccatcccccagcccagaccccagagattcgcctactacaccgacgacctgagcagcccccccagcgccctgcccaccccccagttcggccagagaaccaccaagagcaagaagaagaagggccacaagggcaagaactgcatcatcagctag

SEQ ID NO: 56312 - DNA, 333 bp, Artificial Sequence
  derived and/or modified sequence
atgcccctggagatggagcccaagatgagcaagctggccttcggctgccagagaagcagcaccagcgacgacgacagcggctgcgccctggaggagtacgcctgggtgccccccggcctgagacccgagcagatccagctgtacttcgcctgcctgcccgaggagaaggtgccctacgtgaacagccccggcgagaagcacagaatcaagcagctgctgtaccagctgcccccccacgacaacgaggtgagatactgccagagcctgagcgaggaggagaagaaggagctgcaggtgttcagcgcccagagaaagaaggaggccctgggctag

SEQ ID NO: 56313 - DNA, 360 bp, Artificial Sequence
  derived and/or modified sequence
atgcccctggagatggagcccaagatgagcaagctggccttcggctgccagagaagcagcaccagcgacgacgacagcggctgcgccctggaggagtacgcctgggtgccccccggcctgagacccgagcagatccagctgtacttcgcctgcctgcccgaggagaaggtgccctacgtgaacagccccggcgagaagcacagaatcaagcagctgctgtaccagctgcccccccacgacaacgaggtgagatactgccagagcctgagcgaggaggagaagaaggagctgcaggtgttcagcgcccagagaaagaaggaggccctgggcagaggcaccatcaagctgctgagcagatag

SEQ ID NO: 56314 - DNA, 480 bp, Artificial Sequence
  derived and/or modified sequence
atgcccctggagatggagcccaagatgagcaagctggccttcggctgccagagaagcagcaccagcgacgacgacagcggctgcgccctggaggagtacgcctgggtgccccccggcctgagacccgagcagatccagctgtacttcgcctgcctgcccgaggagaaggtgccctacgtgaacagccccggcgagaagcacagaatcaagcagctgctgtaccagctgcccccccacgacaacgaggtgagatactgccagagcctgagcgaggaggagaagaaggagctgcaggtgttcagcgcccagagaaagaaggaggccctgggcagaggcaccatcaagctgctgagcagagccgtgatgcacgccgtgtgcgagcagtgcggcctgaagatcaacggcggcgaggtggccgtgttcgccagcagagccggccccggcgtgtgctggcaccccagctgcttcgtgtgcttctag

SEQ ID NO: 56315 - protein, 193 aa, Artificial Sequence
  derived and/or modified sequence
MPTTSRPALDVKGGTSPAKEDANQEMSSVAYSNLAVKDRKAVAILHYPGVASNGTKASGAPTSSSGSPIGSPTTTPPTKPPSFNLHPAPHLLASMHLQKLNSQYQGMAAATPGQPGEAGPLQNWDFGAQAGGAESLSPSAGAQSPAIIDSDPVDEEVLMSLVVELGLDRANELPELWLGQNEFDFTADFPSSC

SEQ ID NO: 56316 - protein, 141 aa, Artificial Sequence
  derived and/or modified sequence
MPTTSRPALDVKGGTSPAKEDANQEMSSVAYSNLAVKDRKAVAILHYPGVASNGTKASGAPTSSSGSPIGSPTTTPPTKPPSFNLHPAPHLLASMHLQKLNSQYQGMAAATPGQPGEAGPLQNWDFGAQAGGAESLSPSAG

SEQ ID NO: 56317 - protein, 138 aa, Artificial Sequence
  derived and/or modified sequence
MEPSAQQLQLAASLPANLSNFCQGSEMPTTSRPALDVKGGTSPAKEDANQEMSSVAYSNLAVKDRKAVAILHYPGVASNGTKASGAPTSSSGSPIGSPTTTPPTKPPSFNLHPAPHLLASMHLQKLNSQYQGMAAATP

SEQ ID NO: 56318 - protein, 106 aa, Artificial Sequence
  derived and/or modified sequence
  misc_feature (1)..(1): Xaa can be any naturally occurring amino acid
XPTTSRPALDVKGGTSPAKEDANQEMSSVAYSNLAVKDRKAVAILHYPGVASNGTKSPAIIDSDPVDEEVLMSLVVELGLDRANELPELWLGQNEFDFTADFPSSC

SEQ ID NO: 56319 - protein, 219 aa, Artificial Sequence
  derived and/or modified sequence
MEPSAQQLQLAASLPANLSNFCQGSEMPTTSRPALDVKGGTSPAKEDANQEMSSVAYSNLAVKDRKAVAILHYPGVASNGTKASGAPTSSSGSPIGSPTTTPPTKPPSFNLHPAPHLLASMHLQKLNSQYQGMAAATPGQPGEAGPLQNWDFGAQAGGAESLSPSAGAQSPAIIDSDPVDEEVLMSLVVELGLDRANELPELWLGQNEFDFTADFPSSC

SEQ ID NO: 56320 - protein, 109 aa, Artificial Sequence
  derived and/or modified sequence
MEPSAQQLQLAASLPANLSNFCQGSEMPTTSRPALDVKGGTSPAKEDANQEMSSVAYSNLAVKDRKAVAILHYPGVASNGTKASGAPTSSSGSPIGSPTTTPPTKPPSF

SEQ ID NO: 56321 - protein, 59 aa, Artificial Sequence
  derived and/or modified sequence
MEPSAQQLQLAASLPANLSNFCQGSEMPTTSRPALDVKGGTSPAKEDANQEMSSVAYSN

SEQ ID NO: 56322 - DNA, 417 bp, Artificial Sequence
  derived and/or modified sequence
atggagcccagcgcccagcagctgcagctggccgccagcctgcccgccaacctgagcaacttctgccagggcagcgagatgcccaccaccagcagacccgccctggacgtgaagggcggcaccagccccgccaaggaggacgccaaccaggagatgagcagcgtggcctacagcaacctggccgtgaaggacagaaaggccgtggccatcctgcactaccccggcgtggccagcaacggcaccaaggccagcggcgcccccaccagcagcagcggcagccccatcggcagccccaccaccaccccccccaccaagccccccagcttcaacctgcaccccgccccccacctgctggccagcatgcacctgcagaagctgaacagccagtaccagggcatggccgccgccaccccctag

SEQ ID NO: 56323 - DNA, 660 bp, Artificial Sequence
  derived and/or modified sequence
atggagcccagcgcccagcagctgcagctggccgccagcctgcccgccaacctgagcaacttctgccagggcagcgagatgcccaccaccagcagacccgccctggacgtgaagggcggcaccagccccgccaaggaggacgccaaccaggagatgagcagcgtggcctacagcaacctggccgtgaaggacagaaaggccgtggccatcctgcactaccccggcgtggccagcaacggcaccaaggccagcggcgcccccaccagcagcagcggcagccccatcggcagccccaccaccaccccccccaccaagccccccagcttcaacctgcaccccgccccccacctgctggccagcatgcacctgcagaagctgaacagccagtaccagggcatggccgccgccacccccggccagcccggcgaggccggccccctgcagaactgggacttcggcgcccaggccggcggcgccgagagcctgagccccagcgccggcgcccagagccccgccatcatcgacagcgaccccgtggacgaggaggtgctgatgagcctggtggtggagctgggcctggacagagccaacgagctgcccgagctgtggctgggccagaacgagttcgacttcaccgccgacttccccagcagctgctag

SEQ ID NO: 56324 - DNA, 330 bp, Artificial Sequence
  derived and/or modified sequence
atggagcccagcgcccagcagctgcagctggccgccagcctgcccgccaacctgagcaacttctgccagggcagcgagatgcccaccaccagcagacccgccctggacgtgaagggcggcaccagccccgccaaggaggacgccaaccaggagatgagcagcgtggcctacagcaacctggccgtgaaggacagaaaggccgtggccatcctgcactaccccggcgtggccagcaacggcaccaaggccagcggcgcccccaccagcagcagcggcagccccatcggcagccccaccaccaccccccccaccaagccccccagcttctag

SEQ ID NO: 56325 - DNA, 180 bp, Artificial Sequence
  derived and/or modified sequence
atggagcccagcgcccagcagctgcagctggccgccagcctgcccgccaacctgagcaacttctgccagggcagcgagatgcccaccaccagcagacccgccctggacgtgaagggcggcaccagccccgccaaggaggacgccaaccaggagatgagcagcgtggcctacagcaactag

SEQ ID NO: 56326 - DNA, 417 bp, Artificial Sequence
  derived and/or modified sequence
atggagccctccgcacaacagctgcagctggcagcttctctgccagcaaacctttccaacttctgccagggaagtgaaatgccgaccacaagtcgaccagcgcttgatgtcaaaggtggcacaagcccggctaaggaagacgccaaccaggaaatgtcttctgtggcgtatagtaacctggctgtgaaggacaggaaagctgtggcgatcctgcactacccgggcgtagcgagtaatggtacaaaggcctctggagctccaacctcatccagcggaagcccaatcggtagccctaccaccactccaccgaccaagccaccctctttcaatttacaccctgctccgcatctcctggcaagtatgcatcttcagaaactgaatagtcagtaccagggaatggcggcagcaacgccctag

SEQ ID NO: 56327 - DNA, 660 bp, Artificial Sequence
  derived and/or modified sequence
atggaaccgagcgcacagcagctccagttagctgcatctctacctgccaatctctcaaatttttgtcagggttctgaaatgcccacaacaagccgaccggcattggatgtgaagggggggactagtcccgcgaaagaggacgctaaccaggagatgtcaagcgtagcttattcaaatctcgctgtaaaagacagaaaggctgtggcaatactgcattaccccggggtggcgtccaacgggaccaaggccagcggtgcacccacttctagcagcgggtcaccaattggctcaccaacaacaacaccgccaactaaaccaccttcatttaacctgcacccagcccctcaccttcttgctagcatgcacctgcagaagctgaatagtcaataccagggcatggctgccgccacacccggacagcctggtgaggcgggacccctccagaattgggattttggtgcacaggctggaggcgccgagtccttgtcaccttctgccggagcacagagccctgcaattattgacagcgaccctgtggatgaagaggttttaatgtccctggtggtggagctgggcctggaccgcgccaatgagctcccagagctgtggttaggccagaatgagtttgatttcaccgctgattttccctcctcttgctag

SEQ ID NO: 56328 - DNA, 330 bp, Artificial Sequence
  derived and/or modified sequence
atggagccaagtgctcagcaactgcagcttgcggcatctctgcccgctaacctgtctaacttttgccaaggcagcgagatgcctaccaccagtcggcccgctcttgacgtaaagggtggaacttcgcctgcaaaagaggacgctaaccaagagatgtcttccgtcgcatatagcaacctggccgtgaaggaccgcaaggcggtggcaatacttcactaccccggtgtagcctccaacggaacaaaggccagtggcgcccctacttcttcctccggctctccaatcggctcacctactactactccacccacgaaacccccaagcttctag

SEQ ID NO: 56329 - DNA, 660 bp, Artificial Sequence
  derived and/or modified sequence
atggaaccctcggcacagcagctccaactcgccgcatctctgccggcgaatctatctaatttctgccagggaagcgagatgcccactacaagccgcccagcactagacgtgaagggcggcacatccccagccaaagaggacgcaaatcaggaaatgtcgtcagtagcctactccaacctcgctgtgaaggatcgaaaggctgtggcaatactccactatccaggcgtcgcgtccaatggcacgaaagccagtggcgcccctactagcagctcaggcagcccaataggctcacctacgactacacccccaaccaagccccccagtttcaacctgcatccagccccacacctacttgcaagcatgcatttacagaagctgaacagtcagtatcagggaatggctgctgccaccccaggccagccgggggaagcggggcctttacaaaattgggactttggcgctcaggcaggtggtgctgagagcctctcccccagtgccggggcccagagccctgccatcatcgatagcgaccctgtggatgaggaagtgttaatgtctctcgttgttgagctgggattggatagggcaaacgaactccccgaactgtggcttgggcaaaatgaattcgactttactgcagactttcccagtagctgctag

SEQ ID NO: 56330 - DNA, 180 bp, Artificial Sequence
  derived and/or modified sequence
atggagccgagcgctcagcagctgcagttagctgcttccttgcccgctaacctaagcaacttctgccagggaagtgagatgcccacaaccagtcgaccagctcttgatgttaagggaggtacctccccagcaaaggaagatgctaatcaggagatgtcatccgtagcttacagcaactag

SEQ ID NO: 56331 - DNA, 886 bp, Artificial Sequence
  derived and/or modified sequence
ctataaaaatgtgcccggcggcaaagctgcagaaggggcaccgctgagctgccgagaggaagctcgctctgcccggctgccctcttgtagtccgccggcgaggggcagttctcggtgaggaggaagagagcagcggacggcacagcacccgcgcgggccctcccacaacagctccagctggcagcatcacttcccgccaatttatccaacttctgccaaggctctgaaatgccaacaacgtcgaggcctgcacttgatgtcaagggtggcacctcacctgcgaaggaggatgccaaccaagagatgagctccgtggcctactccaaccttgcggtgaaagatcgcaaagcagtggccattctgcactaccctggggtagcctcaaatggaaccaaggccagtggggctcccactagttcctcgggatctccaataggctctcctacaaccacccctcccactaaacccccatccttcaacctgcaccccgcccctcacttgctggctagtatgcacctgcagaaacttaatagccagtatcaggggatggctgctgccactccaggccaacccggggaggcaggacccctgcaaaactgggactttggggcccaggcgggaggggcagaatcactctctccttctgctggtgcccagagccctgctatcatcgattcggacccagtggatgaggaagtgctgatgtcgctggtggtggaactggggttggaccgagccaatgagcttccggagctgtggctggggcagaatgagtttgacttcactgcggactttccatctagctgctaatgccaagtgtccctaaagatggaggaataaagccaccaattctgttgtaaataaaaataaagttacttacaaagag

SEQ ID NO: 56332 - DNA, 417 bp, Artificial Sequence
  derived and/or modified sequence
atggagcccagcgcccagcagctgcagctggccgccagcctgcctgccaacctgagcaacttctgccagggcagcgagatgcccaccaccagcaggcctgccctggatgtgaagggcggcaccagccctgccaaggaggatgccaaccaggagatgagctctgtggcctacagcaacctggccgtgaaggacaggaaggctgtggccatcctgcactacccaggagtggccagcaatggcaccaaggccagcggggcccccaccagcagcagcggcagccccatcggcagccccaccaccaccccacccaccaagccacccagcttcaacctgcacccagccccccacctgctggcctccatgcacctgcagaagctgaacagccagtaccagggcatggctgctgccaccccctag

SEQ ID NO: 56333 - DNA, 660 bp, Artificial Sequence
  derived and/or modified sequence
atggagcccagcgcccagcagctgcagctggccgccagcctgcctgccaacctgagcaacttctgccagggcagcgagatgcccaccaccagcaggcctgccctggatgtgaagggcggcaccagccctgccaaggaggatgccaaccaggagatgagctctgtggcctacagcaacctggccgtgaaggacaggaaggctgtggccatcctgcactacccaggagtggccagcaatggcaccaaggccagcggggcccccaccagcagcagcggcagccccatcggcagccccaccaccaccccacccaccaagccacccagcttcaacctgcacccagccccccacctgctggcctccatgcacctgcagaagctgaacagccagtaccagggcatggctgctgccaccccaggccagcctggagaggccggccccctgcagaactgggactttggagcccaggccggcggcgctgagagcctgagccccagcgctggggcccagagccctgccatcatcgacagcgaccctgtggatgaggaggtgctgatgagcctggtggtggagctgggcctggaccgggccaatgagctgcctgagctgtggctgggccagaatgaatttgacttcaccgctgacttccccagcagctgctag

SEQ ID NO: 56334 - DNA, 330 bp, Artificial Sequence
  derived and/or modified sequence
atggagcccagcgcccagcagctgcagctggccgccagcctgcctgccaacctgagcaacttctgccagggcagcgagatgcccaccaccagcaggcctgccctggatgtgaagggcggcaccagccctgccaaggaggatgccaaccaggagatgagctctgtggcctacagcaacctggccgtgaaggacaggaaggctgtggccatcctgcactacccaggagtggccagcaatggcaccaaggccagcggggcccccaccagcagcagcggcagccccatcggcagccccaccaccaccccacccaccaagccacccagcttctag

SEQ ID NO: 56335 - DNA, 180 bp, Artificial Sequence
  derived and/or modified sequence
atggagcccagcgcccagcagctgcagctggccgccagcctgcctgccaacctgagcaacttctgccagggcagcgagatgcccaccaccagcaggcctgccctggatgtgaagggcggcaccagccctgccaaggaggatgccaaccaggagatgagctctgtggcctacagcaactag

SEQ ID NO: 56336 - DNA, 417 bp, Artificial Sequence
  derived and/or modified sequence
atggagcccagcgcccagcagctgcagctggccgccagcctgcccgcaaatctgtcaaatttctgtcagggctcagagatgcctaccacctctcgccctgcactggatgtaaagggcggcacatccccggctaaagaggatgctaaccaagagatgtcctccgtggcttatagcaacttggccgtaaaggacaggaaggccgtggctattctgcattaccccggagtggcctccaatggaactaaagcgtctggagcccccacttcaagtagcggctcgcctattgggagtccgacaacgaccccccctacaaaaccaccttcattcaatctgcacccagccccccatctcctagcgtcgatgcacctgcagaagctgaactctcagtatcaggggatggccgcagccacaccgtag

SEQ ID NO: 56337 - DNA, 660 bp, Artificial Sequence
  derived and/or modified sequence
atggagcccagcgcccagcagctgcagctggccgccagcctgcccgctaatctgagtaatttttgccaggggtctgagatgcctactaccagtagacccgctcttgacgtgaaaggagggacttctccagccaaggaggacgctaaccaggagatgtcttcagttgcatactctaatctggcagtaaaggaccggaaagctgtcgctatcttgcactacccaggagttgctagcaacggcacaaaggcttctggagccccgacatcctcttccggctcacccattggctcacccacaacaacacctcctaccaagccaccttcatttaacctgcaccctgccccccaccttctggctagtatgcacctacagaaactgaattcccagtaccaaggcatggccgctgctacacctggccagcccggagaggcaggccctttacagaactgggacttcggcgcacaggccggcggtgccgagtctttatctccttcagccggcgctcagagtccagctatcattgatagcgacccagtcgatgaggaggttctgatgtcattggtcgttgagctgggactggatcgtgccaatgaactgccagagctgtggctgggtcagaatgagtttgactttaccgccgacttcccctcctcgtgctag

SEQ ID NO: 56338 - DNA, 330 bp, Artificial Sequence
  derived and/or modified sequence
atggagcccagcgcccagcagctgcagctggccgccagcctgcccgcaaatttgtctaatttttgccagggaagcgaaatgcctactacatcaagacccgccttagacgtgaaagggggaacatcgcctgctaaagaggatgcaaaccaggagatgtcatctgtggcttattcaaatctcgctgttaaggacaggaaagccgtggcaatcttgcattatcccggggttgccagcaacggcacaaaggctagcggggcacctacaagtagttccggatcacccatcggcagccccactacaacccccccgacaaagccgccaagtttctag

SEQ ID NO: 56339 - DNA, 660 bp, Artificial Sequence
  derived and/or modified sequence
atggagcccagcgcccagcagctgcagctggccgccagcctgcccgctaacctgtctaacttctgtcagggatccgaaatgcccacgacgtctaggccagccctggatgttaaagggggaaccagtccagctaaagaggatgcgaatcaggaaatgagtagtgtagcctattccaatttagcagtgaaagatagaaaggctgtcgcaatcctacattatcccggcgtggcaagcaacggaacgaaggcaagcggcgcacctactagctcctctggctccccgattggctcacctacaactacaccacctactaagccccccagctttaatctacaccccgctccacatctactcgcaagtatgcacctgcagaaattgaactcccagtaccaggggatggcagcggcgaccccaggtcaaccaggcgaggcagggccactgcagaactgggacttcggcgcgcaggcagggggtgccgagagtctatcgcccagtgcaggtgcgcagtccccggctatcatagactctgatccagtcgacgaagaagttctgatgtcccttgtcgtggagctgggtcttgatcgcgctaacgagctccctgagctctggctcgggcagaacgaattcgactttactgctgattttccctctagctgctag

SEQ ID NO: 56340 - DNA, 180 bp, Artificial Sequence
  derived and/or modified sequence
atggagcccagcgcccagcagctgcagctggccgccagcctgcccgcaaacctgagtaatttttgccagggaagcgagatgcccactacttccagacccgctctcgatgtgaaaggcggcactagcccagctaaggaagacgccaaccaggagatgtcctcagttgcctacagtaattag

SEQ ID NO: 56341 - DNA, 1231 bp, Artificial Sequence
  derived and/or modified sequence
acgagccaggacatgtgctaataatgccctaagccggttataaagacgtggaaattgaggggagaaaaaaaaagggaaaaaaagggtctgtccttcctgggattcctagccgaggccagtctgctgccgtgtgcgtgtgcgtcagggctctccgggcggcaatgggggcttgagagccgggtccccagcgccgggaagggagcgcggtggccgccaccgccaccgccccggagtccggcgccgaagctgcgggcgggcgggcgggcaccagctcggtcaggggctgcttggcgcggcactgtgcggtgcagcggcggcgcggcgcggtgcgggcttttcccaggcgccccggggtcgggtggccaacggcgcggccgcgggcgctgagcgcgaccggttcgcggtagcggtggcggcggcgtgcgtgccaggggctgggggctccgccgcctctcttgcggctcaccgagctccgcgcttccctctctccagggcaggcggcttctcagagcacaacagctccagctggcagcatcacttcccgccaatttatccaacttctgccaaggctctgaaatgccaacaacgtcgaggcctgcacttgatgtcaagggtggcacctcacctgcgaaggaggatgccaaccaagagatgagctccgtggcctactccaaccttgcggtgaaagatcgcaaagcagtggccattctgcactaccctggggtagcctcaaatggaaccaaggccagtggggctcccactagttcctcgggatctccaataggctctcctacaaccacccctcccactaaacccccatccttcaacctgcaccccgcccctcacttgctggctagtatgcacctgcagaaacttaatagccagtatcaggggatggctgctgccactccaggccaacccggggaggcaggacccctgcaaaactgggactttggggcccaggcgggaggggcagaatcactctctccttctgctggtgcccagagccctgctatcatcgattcggacccagtggatgaggaagtgctgatgtcgctggtggtggaactggggttggaccgagccaatgagcttccggagctgtggctggggcagaatgagtttgacttcactgcggactttccatctagctgctaatgccaagtgtccctaaagatggaggaataaagccaccaattctgttgtaaataaaaataaagttacttacaaa

SEQ ID NO: 56342 - DNA, 560 bp, Artificial Sequence
  derived and/or modified sequence
agcaccggacttggagtcagagagacctggctgcgaatcccggctccgccactttctagcgctgtgaccttggcacaacagctccagctggcagcatcacttcccgccaatttatccaacttctgccaaggctctgaaatgccaacaacgtcgaggcctgcacttgatgtcaagggtggcacctcacctgcgaaggaggatgccaaccaagagatgagctccgtggcctactccaaccttgcggtgaaagatcgcaaagcagtggccattctgcactaccctggggtagcctcaaatggaaccaaggccagtggggctcccactagttcctcgggatctccaataggctctcctacaaccacccctcccactaaacccccatccttcaacctgcaccccgcccctcacttgctggctagtatgcacctgcagaaacttaatagccagtatcaggggatggctgctgccactccaggccaacccggggaggcaggacccctgcaaaactgggactttggggcccaggcgggaggggcagaatcactctctccttctgctgg

SEQ ID NO: 56343 - DNA, 417 bp, Artificial Sequence
  derived and/or modified sequence
atggagcccagcgcacagcagctacagctagccgcatctctgcctgccaatctatctaatttctgccaaggatctgagatgccgacaacgtcacgcccagcactcgacgtcaaagggggtacatcccctgcaaaggaggatgccaatcaggagatgagctccgtggcgtacagtaaccttgcggtaaaagacagaaaggctgtggccatcctgcattacccaggtgtcgcctcgaacggcactaaggcatccggagccccaactagcagttccggttcgccaatcggaagccccaccactactccccctacaaaaccaccttctttcaatctccatcctgccccacacctgctggcctcaatgcacctccagaagttgaattcccaataccaaggaatggccgcagccactccatag

SEQ ID NO: 56344 - DNA, 660 bp, Artificial Sequence
  derived and/or modified sequence
atggagccctcagcccaacagcttcagctggccgcttctcttcctgctaatctgagcaatttctgtcaggggtctgaaatgccaacaacttccaggcccgctctggacgtgaaggggggaacgagccctgccaaagaagatgctaaccaggagatgtcctctgtggcctactcaaatttagccgtgaaggatcggaaggccgtcgcaatcctccattatccaggtgtggcctctaatggaacgaaagcaagtggtgctccgacgtcatccagtgggtccccaatcggatcccccacaactacgcccccaactaagcctccaagtttcaatctgcacccggcaccccacctcctcgcatccatgcaccttcaaaaactcaatagccagtaccaaggtatggcagccgctacacctgggcaacctggagaggctgggcctcttcagaactgggactttggcgcacaggcgggaggtgccgagagcctttcacccagtgctggggcacagagtcccgcaatcattgatagtgatccagtagacgaggaggtgttgatgtcactcgtggtagaactgggattggatagggccaacgaactgccagaactgtggctcgggcagaatgaatttgattttacagccgattttccatcatcatgctag

SEQ ID NO: 56345 - DNA, 666 bp, Artificial Sequence
  derived and/or modified sequence
gggaacggacgctcagggccccggtggcctgggtgcacgcgcccgccgtgcaagggatgctcccggccgcccccggttccgcggctccatctgggatgcggcgaggagggcagccgagctgtccgcaaacaacgggcctttagttttcaggtggcgaaactgactggtctggttagagcgcgtccaagccaagccgcagtgctgtttggatttttaaatttctccttctgagtgagaaaatagcaatcgagatggaaccatccgcacaacagctccagctggcagcatcacttcccgccaatttatccaacttctgccaaggctctgaaatgccaacaacgtcgaggcctgcacttgatgtcaagggtggcacctcacctgcgaaggaggatgccaaccaagagatgagctccgtggcctactccaaccttgcggtgaaagatcgcaaagcagtggccattctgcactaccctggggtagcctcaaatggaaccaaggccagtggggctcccactagttcctcgggatctccaataggctctcctacaaccacccctcccactaaacccccatccttcaacctgcaccccgcccctcacttgctggctagtatgcacctgcagaaacttaatagccagtatcaggggatggctgctgccactccag

SEQ ID NO: 56346 - DNA, 330 bp, Artificial Sequence
  derived and/or modified sequence
atggaaccaagtgcacagcaactgcagctggctgcctcactacctgctaacctcagcaacttttgccaaggcagcgaaatgccgacaacctctcggccagccctggacgttaagggaggaacatctccagctaaagaggacgccaaccaggagatgtccagtgtagcttactctaacctcgccgtgaaggatcgcaaggccgtggcaatactccactaccctggcgttgcttctaatggaactaaagccagcggcgcaccaacgagcagttccggtagcccaattggtagtcccacaaccactcctcccacgaagccgccatccttttag

SEQ ID NO: 56347 - DNA, 660 bp, Artificial Sequence
  derived and/or modified sequence
atggaaccttcagctcagcagctgcagctcgcggcttctctgcccgctaatctgagcaatttttgccaaggctctgaaatgccaacaacctcccgccctgctctggacgtcaagggcggaacttcaccagctaaagaggacgccaatcaggagatgagtagcgtggcctatagcaacctggccgtgaaggataggaaggcagttgcgatcttgcactaccccggagtggccagcaacgggaccaaggcgtcaggcgcacccacgtctagctccgggtctcccattggaagccccactactactccccctactaaaccgccttccttcaacttacacccagcccctcacttactcgccagcatgcaccttcagaagcttaatagccaatatcaaggcatggctgcggcaacccctgggcagcccggagaagctgggcctctgcagaactgggactttggtgctcaggccggaggtgcagaatccctctccccttctgcaggagcccaatcccctgccatcatcgactccgaccctgtggacgaagaagtgctgatgagcttagtggttgaattgggactcgacagagcaaacgagctcccagagctctggttaggtcagaacgaattcgacttcactgccgatttcccttcatcttgctag

SEQ ID NO: 56348 - DNA, 180 bp, Artificial Sequence
  derived and/or modified sequence
atggagccttcagcccagcaactacagctcgctgcgagtctgccggctaacttatccaacttttgtcagggaagcgagatgcctactacgtcgaggccagcattggacgtgaaaggagggacttctcctgcaaaggaggacgctaatcaggagatgagctcggttgcatattcgaactag

SEQ ID NO: 56349 - DNA, 941 bp, Artificial Sequence
  derived and/or modified sequence
gagtccctgcttcgcagagcaccggacttggagtcagagagacctggctgcgaatcccggctccgccactttctagcgctgtgaccttggttttcaggtggcgaaactgactggtctggttagagcgcgtccaagccaagccgcagtgctgtttggatttttaaatttctccttctgagtgagaaaatagcaatcgagatggaaccatccgcacaacagctccagctggcagcatcacttcccgccaatttatccaacttctgccaaggctctgaaatgccaacaacgtcgaggcctgcacttgatgtcaagggtggcacctcacctgcgaaggaggatgccaaccaagagatgagctccgtggcctactccaaccttgcggtgaaagatcgcaaagcagtggccattctgcactaccctggggtagcctcaaatggaaccaaggccagtggggctcccactagttcctcgggatctccaataggctctcctacaaccacccctcccactaaacccccatccttcaacctgcaccccgcccctcacttgctggctagtatgcacctgcagaaacttaatagccagtatcaggggatggctgctgccactccaggccaacccggggaggcaggacccctgcaaaactgggactttggggcccaggcgggaggggcagaatcactctctccttctgctggtgcccagagccctgctatcatcgattcggacccagtggatgaggaagtgctgatgtcgctggtggtggaactggggttggaccgagccaatgagcttccggagctgtggctggggcagaatgagtttgacttcactgcggactttccatctagctgctaatgccaagtgtccctaaagatggaggaataaagccaccaattctgttgtaaataaaaataaagttacttacaaagagacgggcc

SEQ ID NO: 56350 - DNA, 820 bp, Artificial Sequence
  derived and/or modified sequence
gagtccctgcttcgcagagcaccggacttggagtcagagagacctggctgcgaatcccggctccgccactttctagcgctgtgaccttggcacaacagctccagctggcagcatcacttcccgccaatttatccaacttctgccaaggctctgaaatgccaacaacgtcgaggcctgcacttgatgtcaagggtggcacctcacctgcgaaggaggatgccaaccaagagatgagctccgtggcctactccaaccttgcggtgaaagatcgcaaagcagtggccattctgcactaccctggggtagcctcaaatggaaccaaggccagtggggctcccactagttcctcgggatctccaataggctctcctacaaccacccctcccactaaacccccatccttcaacctgcaccccgcccctcacttgctggctagtatgcacctgcagaaacttaatagccagtatcaggggatggctgctgccactccaggccaacccggggaggcaggacccctgcaaaactgggactttggggcccaggcgggaggggcagaatcactctctccttctgctggtgcccagagccctgctatcatcgattcggacccagtggatgaggaagtgctgatgtcgctggtggtggaactggggttggaccgagccaatgagcttccggagctgtggctggggcagaatgagtttgacttcactgcggactttccatctagctgctaatgccaagtgtccctaaagatggaggaataaagccaccaattctgttgtaaataaaaataaagttacttacaaagagacgggcc

SEQ ID NO: 56351 - DNA, 505 bp, Artificial Sequence
  derived and/or modified sequence
cggacttggagtcagagagacctggctgcgaatcccggctccgccactttctagcgctgtgaccttggttttcaggtggcgaaactgactggtctggttagagcgcgtccaagccaagccgcagtgctgtttggatttttaaatttctccttctgagtgagaaaatagcaatcgagatggaaccatccgcacaacagctccagctggcagcatcacttcccgccaatttatccaacttctgccaaggctctgaaatgccaacaacgtcgaggcctgcacttgatgtcaagggtggcacctcacctgcgaaggaggatgccaaccaagagatgagctccgtggcctactccaaccttgcggtgaaagatcgcaaagcagtggccattctgcactaccctggggtagcctcaaatggaaccaaggccagtggggctcccactagttcctcgggatctccaataggctctcctacaaccacccctcccactaaacccccatccttcaa

SEQ ID NO: 56352 - DNA, 998 bp, Artificial Sequence
  derived and/or modified sequence
gcaccgctgagctgccgagaggaagctcgctctgcccggctgccctcttgtagtccgccggcgaggggcagttctcggtgaggaggaagagagcagcggacggcacagcacccgcgcgggccctccggcaggcggcttctcagagttttcaggtggcgaaactgactggtctggttagagcgcgtccaagccaagccgcagtgctgtttggatttttaaatttctccttctgagtgagaaaatagcaatcgagatggaaccatccgcacaacagctccagctggcagcatcacttcccgccaatttatccaacttctgccaaggctctgaaatgccaacaacgtcgaggcctgcacttgatgtcaagggtggcacctcacctgcgaaggaggatgccaaccaagagatgagctccgtggcctactccaaccttgcggtgaaagatcgcaaagcagtggccattctgcactaccctggggtagcctcaaatggaaccaaggccagtggggctcccactagttcctcgggatctccaataggctctcctacaaccacccctcccactaaacccccatccttcaacctgcaccccgcccctcacttgctggctagtatgcacctgcagaaacttaatagccagtatcaggggatggctgctgccactccaggccaacccggggaggcaggacccctgcaaaactgggactttggggcccaggcgggaggggcagaatcactctctccttctgctggtgcccagagccctgctatcatcgattcggacccagtggatgaggaagtgctgatgtcgctggtggtggaactggggttggaccgagccaatgagcttccggagctgtggctggggcagaatgagtttgacttcactgcggactttccatctagctgctaatgccaagtgtccctaaagatggaggaataaagccaccaattctgttgtaaataaaaataaagttacttacaaagagacgggccaa

SEQ ID NO: 56353 - DNA, 716 bp, Artificial Sequence
  derived and/or modified sequence
aaagggtctgtccttcctgggattcctagccgaggccagtctgctgccgtgtgcgtgtgcgtcagggctctccgggcggcaatgggggcttgagagccgggtccccagcgccgggaagggagcgcggtggccgccaccgccaccgccccggagtccggcgccgaagctgcgggcgggcgggcgggcaccagctcggtcaggggctgcttggcgcggcactgtgcggtgcagcggcggcgcggcgcggtgcgggcttttcccaggcgccccggggtcgggtggccaacggcgcggccgcgggcgctgagcgcgaccggttcgcggtagcggtggcggcggcgtgcgtgccaggggctgggggctccgccgcctctcttgcggctcaccgagctccgcgcttccctctctccagggcaggcggcttctcagagttttcaggtggcgaaactgactggtctggttagagcgcgtccaagccaagccgcagtgctgtttggatttttaaatttctccttctgagtgagaaaatagcaatcgagatggaaccatccgcacaacagctccagctggcagcatcacttcccgccaatttatccaacttctgccaaggctctgaaatgccaacaacgtcgaggcctgcacttgatgtcaagggtggcacctcacctgcgaaggaggatgccaaccaagagatgagctccgtggcctactccaac

SEQ ID NO: 56354 - DNA, 426 bp, Artificial Sequence
  derived and/or modified sequence
atgcccaccaccagcagacccgccctggacgtgaagggcggcaccagccccgccaaggaggacgccaaccaggagatgagcagcgtggcctacagcaacctggccgtgaaggacagaaaggccgtggccatcctgcactaccccggcgtggccagcaacggcaccaaggccagcggcgcccccaccagcagcagcggcagccccatcggcagccccaccaccaccccccccaccaagccccccagcttcaacctgcaccccgccccccacctgctggccagcatgcacctgcagaagctgaacagccagtaccagggcatggccgccgccacccccggccagcccggcgaggccggccccctgcagaactgggacttcggcgcccaggccggcggcgccgagagcctgagccccagcgccggctag

SEQ ID NO: 56355 - DNA, 321 bp, Artificial Sequence
  derived and/or modified sequence
tgacccaccaccagcagacccgccctggacgtgaagggcggcaccagccccgccaaggaggacgccaaccaggagatgagcagcgtggcctacagcaacctggccgtgaaggacagaaaggccgtggccatcctgcactaccccggcgtggccagcaacggcaccaagagccccgccatcatcgacagcgaccccgtggacgaggaggtgctgatgagcctggtggtggagctgggcctggacagagccaacgagctgcccgagctgtggctgggccagaacgagttcgacttcaccgccgacttccccagcagctgctag

SEQ ID NO: 56356 - DNA, 582 bp, Artificial Sequence
  derived and/or modified sequence
atgccaactacaagcaggcctgccctcgacgttaaaggcgggacttctcctgcaaaggaagatgccaatcaagagatgtctagcgtggcctactccaacctggccgtcaaagaccgcaaggccgttgcgatcttacattaccccggagtggcctcaaacggcacaaaggcttctggtgcccctaccagttcctccggctcaccaatcgggtcccctacgaccactccacctacaaaaccacctagctttaacttacaccctgcaccgcacttattggctagtatgcaccttcagaagctaaatagtcagtaccaggggatggccgccgccacccccgggcagccaggggaagctggacctctgcagaactgggactttggggcacaagcgggaggagcagagtcattgtcccccagcgcaggagcccagtctccagcaattatcgactccgatccagtagatgaagaagtgctcatgtccctggtcgtggagcttgggctcgaccgcgccaatgaattgcccgaattgtggctcggacagaatgagttcgacttcactgccgattttccgtcctcttgttag

SEQ ID NO: 56357 - DNA, 582 bp, Artificial Sequence
  derived and/or modified sequence
atgcctacaacctctaggcccgctctggacgttaagggaggcacctcccccgcaaaggaagatgccaatcaggaaatgtcttccgtcgcatattctaatctggccgtgaaggatcgtaaggctgtggcgattctgcactacccaggtgtggctagtaatggcacaaaagcaagtggcgccccaactagtagctccggttctccaattggttctcccaccactacaccccccacaaagcctcccagtttcaatttacaccccgctcctcatcttcttgcatctatgcacttgcagaagctgaattcacagtaccaggggatggctgctgcaacacccggccagcctggggaagcaggaccgctccagaactgggatttcggcgcccaggcagggggggctgaaagcctgtctcccagtgccggcgctcagagccctgcaatcatcgattcagatcctgttgacgaggaggtgctgatgagcctggttgtcgagctgggcttggatagagcaaatgaattgcctgagctctggctgggacaaaacgaattcgatttcacagccgacttcccttctagttgttag

SEQ ID NO: 56358 - DNA, 426 bp, Artificial Sequence
  derived and/or modified sequence
atgcctaccacctccaggccggcgctggacgtgaaaggcggaacctctcctgccaaggaggatgcaaatcaggagatgagttctgtggcctacagtaatcttgctgttaaagaccgaaaggccgtcgcaatactccattaccccggcgtagccagtaacgggaccaaggcctcaggggcccccacgtccagctccggctcccctatcggttctcccactacaacacccccgacaaagccaccatcctttaaccttcaccccgccccccacctgctcgcatcaatgcacctccagaaactgaattcacaatatcagggcatggcagccgctacccccggccagcctggggaagccggtcccctgcaaaattgggactttggggcccaagcagggggggcagagtctttatcaccctccgcaggttag

SEQ ID NO: 56359 - DNA, 321 bp, Artificial Sequence
  derived and/or modified sequence
tgaccaaccacctcgagacccgctctggatgtaaagggcggcactagccccgccaaagaggatgcaaaccaagaaatgtcaagcgtggcttactctaacctcgccgtcaaagacagaaaggcagtcgccatcctgcattaccctggtgtggctagcaacggtaccaagagccctgccattattgatagtgacccagtggacgaagaggtgctcatgagtttggtggtggaactcggcttagatcgcgcaaatgaactgcctgaactgtggcttgggcagaatgagttcgatttcaccgctgactttccatcctcctgctag

SEQ ID NO: 56360 - DNA, 582 bp, Artificial Sequence
  derived and/or modified sequence
atgcctaccacttccaggcctgctttggacgtaaaaggcggcacatcccctgcaaaagaggatgccaatcaggagatgtctagtgtagcctatagcaatctggcagtgaaggacaggaaggccgtcgccattttgcattatcctggcgtggcctcaaacggcacgaaggcttctggagcgcccacctcctcatctgggtcacccataggcagtcctactaccacacctcccacaaaaccacctagttttaacctgcaccccgctccacacctgctcgcttctatgcacctccagaaacttaactcccagtaccaaggcatggctgctgcaaccccaggtcagccgggggaggcaggacctctgcagaattgggatttcggcgcccaagctgggggagccgaaagcctgtctccgagcgctggcgcccaatcaccagctatcatcgatagcgatccagtggacgaggaagtacttatgagtctggttgtggaactcggcctggacagggccaacgaattgcctgagctgtggctggggcagaacgaatttgactttactgcggacttcccaagtagttgttag

SEQ ID NO: 56361 - DNA, 582 bp, Artificial Sequence
  derived and/or modified sequence
atgcccaccaccagcaggcctgccctggatgtgaagggcggcaccagccctgccaaggaggatgccaaccaggagatgagctctgtggcctacagcaacctggccgtgaaggacaggaaggctgtggccatcctgcactacccaggagtggccagcaatggcaccaaggccagcggggcccccaccagcagcagcggcagccccatcggcagccccaccaccaccccacccaccaagccacccagcttcaacctgcacccagccccccacctgctggcctccatgcacctgcagaagctgaacagccagtaccagggcatggctgctgccaccccaggccagcctggagaggccggccccctgcagaactgggactttggagcccaggccggcggcgctgagagcctgagccccagcgctggggcccagagccctgccatcatcgacagcgaccctgtggatgaggaggtgctgatgagcctggtggtggagctgggcctggaccgggccaatgagctgcctgagctgtggctgggccagaatgaatttgacttcaccgctgacttccccagcagctgctag

SEQ ID NO: 56362 - DNA, 426 bp, Artificial Sequence
  derived and/or modified sequence
atgcccaccaccagcaggcctgccctggatgtgaagggcggcaccagccctgccaaggaggatgccaaccaggagatgagctctgtggcctacagcaacctggccgtgaaggacaggaaggctgtggccatcctgcactacccaggagtggccagcaatggcaccaaggccagcggggcccccaccagcagcagcggcagccccatcggcagccccaccaccaccccacccaccaagccacccagcttcaacctgcacccagccccccacctgctggcctccatgcacctgcagaagctgaacagccagtaccagggcatggctgctgccaccccaggccagcctggagaggccggccccctgcagaactgggactttggagcccaggccggcggcgctgagagcctgagccccagcgctggatag

SEQ ID NO: 56363 - DNA, 321 bp, Artificial Sequence
  derived and/or modified sequence
tgacccaccaccagcaggcctgccctggatgtgaagggcggcaccagccctgccaaggaggatgccaaccaggagatgagctctgtggcctacagcaacctggccgtgaaggacaggaaggctgtggccatcctgcactacccaggagtggccagcaatggcaccaagagccctgccatcatcgacagcgaccctgtggatgaggaggtgctgatgagcctggtggtggagctgggcctggaccgggccaatgagctgcctgagctgtggctgggccagaatgaatttgacttcaccgctgacttccccagcagctgctag

SEQ ID NO: 56364 - DNA, 582 bp, Artificial Sequence
  derived and/or modified sequence
atgcccaccaccagccggcccgccctggacgtgaagggcggcacctctcccgcaaaagaagatgccaaccaggagatgtcgtccgtggcatatagtaatctggccgtgaaagacagaaaagccgttgccattcttcactaccccggcgtagccagcaacggcaccaaagcgagcggtgcccctacgagcagctccggcagcccaatcggttcgcctaccaccacgcccccgacaaagcctccaagctttaacctgcacccggcgcctcaccttttggcatctatgcatttgcagaagctgaatagccaatatcaaggaatggcagccgccacccccggccagccaggcgaggctgggcctttacagaattgggacttcggagcacaagcgggcggggccgagtcactgtccccatctgctggtgcacagagtcctgccattattgattccgacccggtggatgaagaggtactgatgagtctggtagtagagctgggccttgatagagcaaatgaactccctgagctttggttgggacaaaatgaattcgacttcacagcggatttcccctcgtcctgctag

SEQ ID NO: 56365 - DNA, 582 bp, Artificial Sequence
  derived and/or modified sequence
atgcccaccaccagccggcccgccctggacgtgaagggcggcaccagccctgccaaggaggacgccaatcaggaaatgtcgtctgttgcttatagcaatctcgcagtgaaggataggaaagctgtggccatactgcattaccccggagtggcatctaacggcaccaaagccagcggtgccccaacctcaagcagcggtagccctatcggatcacccacaactactccacccactaagcctccatcttttaatctgcatccagccccgcacttactggcttccatgcacctccaaaagcttaactcacagtaccagggaatggccgcggccaccccaggccaacctggcgaggctgggcccctgcagaattgggatttcggagcccaggcagggggcgctgagagcctctcacctagtgctggggctcagtctccagccatcattgactccgaccctgtagatgaggaggtcctcatgagcttggtggtggagctgggcctggaccgggctaatgagttgcccgaactgtggctgggccagaacgaatttgacttcactgctgatttcccgtctagttgctag

SEQ ID NO: 56366 - DNA, 426 bp, Artificial Sequence
  derived and/or modified sequence
atgcccaccaccagccggcccgccctggacgtgaagggcggcaccagcccagccaaggaagatgccaaccaagagatgagctcggtcgcgtacagcaacctcgccgtgaaggataggaaggcagtggcaatcttacattaccccggggtggccagtaatggcacaaaggcttcaggcgcaccgacgtctagtagtggctctcctatcgggagtccaacaactactcccccgacgaaacctccttctttcaatctgcaccctgctccccacctgctcgccagcatgcatctgcagaagctcaacagtcaatatcagggaatggctgcagcaacccctggacagccaggcgaagctgggcctctgcaaaactgggacttcggcgctcaggccggcggcgccgaaagcctgtcacccagcgcgggctag

SEQ ID NO: 56367 - DNA, 321 bp, Artificial Sequence
  derived and/or modified sequence
tgacccaccaccagccggcccgccctggacgtgaagggcggcacctctccagctaaggaagacgcaaaccaggagatgtcttctgtcgcttattctaatctggcagttaaggatcggaaggccgtggcaatcttacattaccctggcgtggcctcaaatgggacaaagagccctgcaatcatagattccgatcctgtggacgaggaagtgctgatgtctttggttgtcgagcttggactggaccgagccaatgagcttcccgagctctggttaggacagaatgagtttgatttcacggcagattttccatcttcctgctag

SEQ ID NO: 56368 - DNA, 582 bp, Artificial Sequence
  derived and/or modified sequence
atgcccaccaccagccggcccgccctggacgtgaagggcggcaccagccctgccaaagaggacgcaaaccaggagatgagttcagttgcatactcaaacctcgccgtcaaagatagaaaagccgtggccatactccactaccccggcgttgcctcgaatggcaccaaggcatccggggcacctacatccagcagcggctcacctatcggatcccctaccaccacccctcctaccaagccacccagctttaacttgcaccctgcgccacacctgttggctagcatgcacttgcagaagctgaattcacaatatcaggggatggctgctgcaaccccagggcaaccaggggaggctggtcccctgcagaattgggatttcggtgctcaggcaggtggagcggaaagcctgagcccaagcgccggcgcccaaagtccagccatcatcgattccgaccccgtggatgaagaagtactgatgagcctcgttgtggagttgggtctagaccgagctaatgaactgcctgagctctggctgggacagaacgaatttgacttcaccgccgactttcctagttcatgctag

SEQ ID NO: 56369 - DNA, 582 bp, Artificial Sequence
  derived and/or modified sequence
atgcctactacatcccgtccagctctcgatgttaaaggcggaaccagccctgccaaggaagacgccaaccaggagatgtcatccgttgcttatagtaacctagctgtcaaggataggaaggccgtagccatattgcattaccctggtgttgcttctaatggcaccaaggctagcggcgctccaacttctagttctgggtcccccattgggagtccaacaacgactccgccaacgaagccccctagcttcaacctgcatcctgccccacatctcctggcgagtatgcatcttcagaaactgaattcccagtatcagggaatggccgctgcaactcctgggcagcccggagaagccggtcccctccagaactgggactttggagctcaggccggtggagcggagtctctcagtccgtccgcgggtgctcagtctcccgctataattgattccgaccctgtggatgaggaagttcttatgagcctcgtagttgaattaggcttagaccgcgcaaatgaattgcctgaactgtggttggggcagaatgaatttgactttaccgctgacttcccatcttcctgctag

SEQ ID NO: 56370 - DNA, 582 bp, Artificial Sequence
  derived and/or modified sequence
atgcctacgacatctagacccgctctggatgttaagggcggtacctctccagcaaaggaggacgctaaccaggaaatgtcttcagtggcgtactctaatcttgcggtgaaagaccggaaggctgtcgcaatcctgcattaccccggagttgccagcaatggcactaaggcctccggagccccaacttcttcgagcggctcccctataggaagccccaccactacacctcccaccaagccaccgagttttaacctccatcccgcaccccaccttcttgcatccatgcacctgcagaagcttaactctcagtatcaaggtatggctgccgctacaccaggccaacctggcgaagcgggacccctgcagaactgggattttggagcacaggcgggaggggctgagagcctgtccccgtcagccggagcccaaagccctgccatcatagatagcgatccagtggacgaggaggtgctgatgtctctggtcgtggagctgggtcttgacagggctaatgagctgcccgagctgtggctggggcagaacgaatttgacttcacagctgacttcccctccagctgttag

SEQ ID NO: 56371 - DNA, 426 bp, Artificial Sequence
  derived and/or modified sequence
atgcctaccacctccagacccgcattagacgtgaaaggcggtacctctcctgctaaagaagatgccaaccaggagatgagcagtgtggcatattctaacttggccgtaaaggatcgcaaggccgtcgccattctccactatccaggagtggcatctaatgggacaaaagcctccggcgctcccacatccagcagcggcagccccatcggctctccgactactactccacccacaaaacccccatcttttaatctgcacccggcacctcacctgctcgcctctatgcacctgcagaagctaaactcccagtaccagggtatggcagcggctacccccggtcagcccggtgaggcagggccactgcagaactgggactttggcgctcaggccggaggagcagagtctctgtctcctagcgcgggatag

SEQ ID NO: 56372 - DNA, 321 bp, Artificial Sequence
  derived and/or modified sequence
tagcccacaacaagccgcccagcactcgacgtcaagggcggaacctcaccggctaaggaggacgccaaccaggaaatgtcaagtgtggcgtatagcaatctggccgtaaaggaccggaaagccgtggccatcctccattacccgggtgtggcaagcaatgggacaaagagccctgcgattatagactccgatcctgtcgatgaagaggtcctcatgtctttggtcgtagaactgggactcgatagggcgaatgagctgcccgagctgtggctgggtcagaatgagttcgactttacggctgattttccctccagttgctag

SEQ ID NO: 56373 - DNA, 582 bp, Artificial Sequence
  derived and/or modified sequence
atgccaactacgtcccgccctgcactggatgtgaagggtggtacaagccccgctaaggaggacgcgaatcaagagatgtcttctgtggcatattccaatcttgccgtgaaagatcggaaagctgtggcaatcctccattaccccggtgttgcatctaatggcacaaaggcctctggtgcacctacaagttcaagtggaagccccatcggcagtccaacaacaactccacccacaaagcctccatctttcaatctgcaccctgctccacacctgctcgctagtatgcatctgcagaagctaaattcacagtaccagggcatggccgctgcgactcctggacaaccaggagaggctggcccattgcaaaattgggatttcggggctcaggcaggcggtgccgaatctctttccccctcagccggtgcgcagagcccagcgatcatagactcggatcccgttgatgaagaagtcctgatgagcctggtagtcgaattgggcctagaccgggcaaacgagctccccgagctttggctggggcagaatgaattcgatttcacggcggactttccttcttcttgttag

SEQ ID NO: 56374 - DNA, 395 bp, Artificial Sequence
  derived and/or modified sequence
tgccaacaacgtcgaggcctgcacttgatgtcaagggtggcacctcacctgcgaaggaggatgccaaccaagagatgagctccgtggcctactccaaccttgcggtgaaagatcgcaaagcagtggccattctgcactaccctggggtagcctcaaatggaaccaagagccctgctatcatcgattcggacccagtggatgaggaagtgctgatgtcgctggtggtggaactggggttggaccgagccaatgagcttccggagctgtggctggggcagaatgagtttgacttcactgcggactttccatctagctgctaatgccaagtgtccctaaagatggaggaataaagccaccaattctgttgtaaataaaaataaagttacttacaaaga

SEQ ID NO: 56375 - DNA, 582 bp, Artificial Sequence
  derived and/or modified sequence
atgcccaccaccagcagacccgccctggacgtgaagggcggcaccagccccgccaaggaggacgccaaccaggagatgagcagcgtggcctacagcaacctggccgtgaaggacagaaaggccgtggccatcctgcactaccccggcgtggccagcaacggcaccaaggccagcggcgcccccaccagcagcagcggcagccccatcggcagccccaccaccaccccccccaccaagccccccagcttcaacctgcaccccgccccccacctgctggccagcatgcacctgcagaagctgaacagccagtaccagggcatggccgccgccacccccggccagcccggcgaggccggccccctgcagaactgggacttcggcgcccaggccggcggcgccgagagcctgagccccagcgccggcgcccagagccccgccatcatcgacagcgaccccgtggacgaggaggtgctgatgagcctggtggtggagctgggcctggacagagccaacgagctgcccgagctgtggctgggccagaacgagttcgacttcaccgccgacttccccagcagctgctag

SEQ ID NO: 56376 - protein, 343 aa, Artificial Sequence
  derived and/or modified sequence
MAAATELNRPSSGDRNLERRCRPNLSREVLYEIFRSLHTLVGQLDLRDDVVKITIDWNKLQSLSAFQPALLFSALEQHILYLQPFLAKLQSPIKEENTTAVEEIGRTEMGNKNEVNDKFSIGDLQEEEKHKESDLRDVKKTQIHFDPEVVQIKAGKAEIDRRISAFIERKQAEINENNVREFCNVIDCNQENSCARTDAIFTPYPGFKSHVKVSRVVNTYGPQTRPEGIPGSGHKPNSMLRDCGNQAVEERLQNIEAHLRLQTGGPVPRDIYQRIKKLEDKILELEGISPEYFQSVSFSGKRRKVQPPQNYSLAELDEKISALKQALLRKSREAESMATHHLP

SEQ ID NO: 56377 - DNA, 1032 bp, Artificial Sequence
  derived and/or modified sequence
atggccgcggctacagagcttaatcgaccatcaagcggagacagaaaccttgagcgtaggtgtaggccaaacctgtctcgagaagtgctatatgagattttccggtcccttcacactctggttggacaacttgatttaagggacgacgtcgtgaaaataacaatcgattggaacaaactccagtctctcagtgcttttcagccggcgctgctattttcagccctggaacagcatatcctgtacctccagccttttctggccaaattgcagagccctatcaaagaggagaacacgacagctgtggaagaaataggaagaacggagatgggtaataaaaatgaggtaaacgacaaatttagcatcggagatctccaggaagaggagaaacacaaggagtccgatttacgggacgtaaaaaagacacagatccattttgaccccgaggtggtacagataaaggctggtaaagccgaaatcgatagacgaatctcggcattcattgagagaaagcaggcagagatcaacgagaacaacgtgcgcgagttctgcaatgtaatcgactgtaatcaagaaaactcttgtgcccggactgacgcaatattcaccccttatcctggtttcaagtcacacgtgaaagtgagcagagtggtaaacacctacgggccacaaactcgtcctgaggggatacccggttctggacacaaacctaactccatgttgcgagactgcgggaatcaggcagtggaagagagactgcaaaatatcgaagctcacttgcgtttacagacaggaggcccagtaccccgtgatatataccaaagaattaagaagctagaggacaaaatcctggagctcgaagggataagtcccgaatatttccagagcgtgtcgttcagtgggaagcggaggaaggtgcaacctccacagaattactccctggccgagctcgatgagaagatttctgctctgaagcaagccctcctaagaaaaagtcgtgaagctgagtccatggccacacatcatctcccctag

SEQ ID NO: 56378 - DNA, 1032 bp, Artificial Sequence
  derived and/or modified sequence
atggctgctgccacagagctgaaccggcccagcagcggggacaggaacctggagcggcgctgccggcccaacctgagccgggaggtgctgtatgagatcttccgcagcctgcacaccctggtgggccagctggacctgagagatgatgtggtgaagatcaccatcgactggaacaagctgcagagcctgagcgccttccagcctgccctgctcttcagcgccctggagcagcacatcctgtacctgcagcccttcctggccaagctgcagagccccatcaaggaggagaacaccacagctgtggaggagatcggccgcacagagatgggcaacaagaatgaggtgaatgacaagttcagcattggagacctgcaggaggaggagaagcacaaggagagtgacctgagagatgtgaagaagacccagatccactttgatcctgaggtggtgcagatcaaggccggcaaggccgagattgaccggcgcatcagcgccttcattgaaaggaagcaggccgagatcaatgaaaacaacgtgcgggagttctgcaacgtcatcgactgcaaccaggagaacagctgtgccaggacagatgccatcttcaccccctacccaggcttcaagagccacgtgaaggtgtcccgggtggtgaacacctacggcccccagaccaggcctgagggcatccctggcagcggccacaagcccaacagcatgctgcgggactgtggcaaccaggccgtggaggagcggctgcagaacatcgaggcccacctgcggctgcagacaggaggccctgtgccccgggacatctaccagaggatcaagaagctggaggacaagatcctggagctggagggcatcagccctgagtacttccagagcgtgtccttcagcggcaagaggaggaaggtgcagcccccccagaactacagcctggccgagctggatgagaagatcagcgccctgaagcaggccctgctgaggaagagccgggaggccgagagcatggccacccaccacctgccctag

SEQ ID NO: 56379 - DNA, 1586 bp, Artificial Sequence
  derived and/or modified sequence
cttggtggtggtggtggtggggcggcctgagaagatatcatggctgctgccacggagcttaatcgcccgagcagcggtgacaggaacctggagcgaagatgcagacccaacctctcccgagaggtgctctacgaaatctttcgctccctacacaccctggttggacagcttgacctcagagatgatgtggtgaaaattacaatcgattggaacaagctccagagcctctcggcattccagcctgcattgctctttagtgcacttgaacaacacattttatatttacagccttttttagcaaaacttcagtctccgattaaagaggagaatacaactgctgttgaagagataggaagaacagaaatggggaacaaaaatgaagtaaatgacaaattttccattggcgacctacaagaggaagaaaagcacaaagaaagtgatttaagagatgtgaaaaagacacagatccattttgatccagaagtagttcagataaaggctggaaaagcagaaattgacagacgaatatctgcatttattgaaagaaagcaagctgaaatcaatgaaaacaacgtcagggaattttgcaatgttattgattgtaatcaagaaaatagttgtgcaagaactgatgcgatttttaccccttaccccggatttaaaagtcacgtaaaagtttctagagttgtgaatacatacggaccacagactagacctgaaggaattccagggtcaggtcataaacctaacagcatgcttcgagactgtggtaatcaggctgtagaagaacgactacaaaatattgaggcccacttgcggttacagacaggtggtccagtgccaagagacatttatcagagaattaaaaaacttgaggataaaatccttgaattggaaggcatctctcctgaatattttcagtctgtaagcttttctggaaaaagaagaaaagttcaaccacctcaaaactattcactggctgaacttgatgagaaaattagtgccctcaaacaagccctcctcagaaaatcaagagaagcagaatccatggcaacccaccaccttccatgaaaaactcctctcatccttgtcattttacttttttgtatacatatgtgtaacttacactgttattaattcaacggatatatatttatcaatgtagacttctctgtgaagtcaaggtttattttcacatgagtccagcttgcagcaagtaatcttcaaatattccagtaagttttgaaataatgaatgcattgaaaatagcattgttggaatttattcccttctgttttaaaggaggtattttggaaattgaaaaacttaatttacaagtgctggtacatcttttttcttttgtggaccacaggaaggaagatttattttgatattgatactttaaaaggactttatatttgtaacattgatgttaaccagtttattagtttaaatcagtactttgcatataataagcattcaacaaaaatttattgactgaaatgaattttaaatgcatgtgtatgaacttgtttttcttaatctttaagatgtcagtattcatgtaaataaacaatagatccagc

SEQ ID NO: 56380 - DNA, 1032 bp, Artificial Sequence
  derived and/or modified sequence
atggccgccgccaccgagctgaaccggcccagcagcggcgaccggaatcttgagcgaagatgccgaccaaatctgtctagagaggtgctgtacgagatttttaggtcccttcacacattggttgggcagctcgacctacgggacgacgtggtgaagattactatcgactggaacaagctccagagtctgagcgcctttcagcctgccctgctgttcagtgccttggagcaacacatcctgtaccttcagccattcctggcaaaactgcagtctcctataaaagaggagaatacaaccgctgtagaagaaatcggaagaacggagatgggcaataagaacgaggtcaatgacaaattcagcatcggcgatctgcaggaggaggaaaagcacaaagaatctgatttaagagacgttaagaaaactcagatccacttcgatccagaagtcgtgcaaatcaaggctggcaaagcagagattgacaggcgaatctcagccttcattgaaaggaagcaagccgaaattaacgagaataacgtgagagaattttgcaatgtgattgattgtaatcaagagaatagctgcgccagaacggacgccattttcaccccttacccaggctttaaaagtcacgtgaaggtctctagggtcgttaatacttatgggccacaaaccagacccgaaggcataccggggtccggccataagccaaacagtatgctcagggattgtggtaaccaagcagtggaagagcggctgcaaaacattgaggcacatctacgcctgcagaccggagggcctgtgccaagggacatctaccaacgaatcaaaaagctggaggacaagatcttagagttggaagggatctcaccagagtattttcagagcgtcagtttctccggcaagcggcggaaggtgcagcccccacagaattactcgttggctgaactggatgaaaaaattagcgctttaaagcaagcattgctccgcaaatctagggaggcagagagcatggccactcaccaccttccatag

SEQ ID NO: 56381 - DNA, 1032 bp, Artificial Sequence
  derived and/or modified sequence
atggcagctgccacggagctgaacaggccctctagtggggaccgaaaccttgaacggagatgccggccaaacctgagcagagaagtcctttatgaaatcttccgctcactccacaccttggtcggccagttggacctaagggatgacgttgttaagatcaccatcgattggaataaactacagtctctatccgcgttccagccagccctgttgtttagtgcgctggaacagcacattctttatctgcagcctttcctggccaaactgcaatcccctatcaaagaggaaaatactaccgcggtcgaggagatcggaaggaccgagatgggcaacaaaaacgaggtaaacgataagttttctatcggtgacctgcaggaagaagaaaagcacaaggaaagcgatctgcgagacgtcaagaagactcaaatacactttgaccccgaggttgtccaaattaaagccggaaaagccgagattgacagacggatcagcgcctttatcgagcgaaagcaagcggagataaacgaaaataatgtgcgggagttttgtaatgtcattgattgtaaccaagagaacagttgcgcccgtaccgatgctattttcacaccttacccgggattcaaatcacacgtgaaggtttcccgcgtggttaatacctacggaccacagacccgtcccgagggcattcctgggtcaggtcacaaaccgaattccatgttacgcgactgtggcaaccaggcagtggaagaacgtctgcagaatatagaagctcacttgcggctgcagacaggcggacccgtgcctcgggatatctatcagcgaatcaagaaactagaggacaagatcttagagctggagggaatctctcctgagtactttcagtccgtctccttttctggcaaaaggcgcaaggtgcagcccccacaaaactactctcttgctgagttggatgagaagattagcgcgctcaagcaggctcttttgaggaagtctcgggaagcagaaagcatggctacccaccacttaccttag

SEQ ID NO: 56382 - DNA, 1032 bp, Artificial Sequence
  derived and/or modified sequence
atggccgccgccaccgagctgaacagacccagcagcggcgacagaaacctggagagaagatgcagacccaacctgagcagagaggtgctgtacgagatcttcagaagcctgcacaccctggtgggccagctggacctgagagacgacgtggtgaagatcaccatcgactggaacaagctgcagagcctgagcgccttccagcccgccctgctgttcagcgccctggagcagcacatcctgtacctgcagcccttcctggccaagctgcagagccccatcaaggaggagaacaccaccgccgtggaggagatcggcagaaccgagatgggcaacaagaacgaggtgaacgacaagttcagcatcggcgacctgcaggaggaggagaagcacaaggagagcgacctgagagacgtgaagaagacccagatccacttcgaccccgaggtggtgcagatcaaggccggcaaggccgagatcgacagaagaatcagcgccttcatcgagagaaagcaggccgagatcaacgagaacaacgtgagagagttctgcaacgtgatcgactgcaaccaggagaacagctgcgccagaaccgacgccatcttcaccccctaccccggcttcaagagccacgtgaaggtgagcagagtggtgaacacctacggcccccagaccagacccgagggcatccccggcagcggccacaagcccaacagcatgctgagagactgcggcaaccaggccgtggaggagagactgcagaacatcgaggcccacctgagactgcagaccggcggccccgtgcccagagacatctaccagagaatcaagaagctggaggacaagatcctggagctggagggcatcagccccgagtacttccagagcgtgagcttcagcggcaagagaagaaaggtgcagcccccccagaactacagcctggccgagctggacgagaagatcagcgccctgaagcaggccctgctgagaaagagcagagaggccgagagcatggccacccaccacctgccctag

SEQ ID NO: 56383 - protein, 268 aa, Artificial Sequence
  derived and/or modified sequence
MSDSKEPRLQQLGLLVSKVPSSISQEQSRQDAIYQNLTQLKAAVGELSEKSKLQEIYQELTQLKAAVGELPEKSKLQEIYQELTRLKAAVGELPEKSKQQEIYQELTQLKAAVERLCHPCPWEWTFFQGNCYFMSNSQRNWHDSITACKEVGAQLVVIKSAEEQNFLQLQSSRSNRFTWMGLSDLNQEGTWQWVDGSPLLPSFKQYWNRGEPNNVGEEDCAEFSGNGWNDDKCNLAKFWICKKSAASCSRDEEQFLSPAPATPNPPPA

SEQ ID NO: 56384 - DNA, 807 bp, Artificial Sequence
  derived and/or modified sequence
atgtccgatagcaaagagccgcggctacaacagttgggcctgcttgtctctaaagtgccctctagcattagtcaagaacaaagcaggcaggacgccatctaccaaaacttaacccagttgaaggccgccgtaggggaactgagtgagaagtcaaaactacaagagatctatcaagagctaactcaactgaaagccgccgttggcgagctgccagaaaagtcaaaactgcaggagatctaccaggagcttacaaggctgaaggccgccgtcggagaattgcccgaaaaatccaaacagcaggaaatctatcaggaacttacccagctgaaagccgccgtggaaagactctgccatccatgtccttgggagtggaccttttttcaaggcaactgttacttcatgtccaactcccagaggaactggcatgacagtataaccgcatgcaaagaagtgggagcccagctggtggttattaaatctgcggaggagcagaatttcctacagctccagagctcgagatctaaccggttcacctggatgggcttatctgacctgaatcaggaagggacctggcagtgggttgatggcagccctctgctcccatccttcaaacaatattggaacaggggcgaacccaataatgtaggtgaggaggattgtgcagagttttctggaaatggctggaatgacgataagtgcaacctcgccaagttctggatttgcaagaagtccgcggcttcatgcagcagggacgaggagcagtttctgtcccccgcacccgccactccaaaccccccaccggcctag

SEQ ID NO: 56385 - DNA, 807 bp, Artificial Sequence
  derived and/or modified sequence
atgtctgacagcaaggagccccggctgcagcagctgggcctgctggtgtccaaggtgcccagcagcatcagccaggagcagagccggcaggatgccatctaccagaacctgacccagctgaaggctgctgtgggggagctgtctgagaagagcaagctgcaggagatctaccaggagctgacccagctgaaggctgctgtgggggagctgcctgagaagagcaagctgcaggagatctaccaggagctgacccggctgaaggctgctgtgggggagctgcctgagaagagcaagcagcaggagatctaccaggagctgacccagctgaaggctgctgtggagcggctgtgccacccctgcccctgggagtggaccttcttccagggcaactgctacttcatgagcaacagccagaggaactggcatgacagcatcacagcctgcaaggaggtgggcgcccagctggtggtgatcaagtctgctgaggagcagaacttcctgcagctgcagagcagccgcagcaaccgcttcacctggatgggcctgagtgacctgaaccaggagggcacctggcagtgggtggatggcagccccctgctgcccagcttcaagcagtactggaacagaggagagcccaacaacgtgggggaggaggactgtgccgagttctctggaaatggctggaatgatgacaagtgcaacctggccaagttctggatctgcaagaagtctgctgccagctgcagcagagatgaggagcagttcctgagccctgccccagccacccccaaccccccaccagcctag

SEQ ID NO: 56386 - DNA, 807 bp, Artificial Sequence
  derived and/or modified sequence
atgagcgacagcaaggagccccggctgcagcagctgggcctgctggtgtcaaaggtgccctcatcaatttcacaggaacagtcacgccaagacgctatttatcagaacttgacacaattaaaagcggccgtcggggaactctccgagaaatccaagctgcaggaaatctatcaagagttgacccagctcaaggccgctgtgggcgaattgccagaaaagtcaaaacttcaggagatttaccaggaactgacacgtttgaaggccgcagtgggagagttaccagaaaagtctaaacaacaggaaatataccaagagttgactcagctgaaagctgccgtggaaagactttgtcatccgtgtccttgggagtggacttttttccagggcaactgctatttcatgagcaactcccagcggaactggcatgatagcatcactgcctgcaaggaggttggagcccagctagtggtgattaagtctgccgaggagcagaactttttacagcttcagtcctctcgttctaatcgctttacctggatgggactgtccgatttaaaccaggaagggacttggcaatgggtcgacgggagcccactgctcccaagtttcaaacagtactggaaccgaggcgagcctaataatgtcggtgaggaagactgtgccgagttttccggcaatggatggaatgatgacaaatgcaaccttgccaagttctggatatgcaagaagagcgcagcatcatgctcccgcgacgaggagcagtttctttcccctgcccccgctaccccgaacccaccgcctgcatag

SEQ ID NO: 56387 - DNA, 807 bp, Artificial Sequence
  derived and/or modified sequence
atgagcgatagcaaagagccccgactgcagcaattaggactgctggtgagtaaagtgcctagcagcatttctcaggagcaaagccggcaagacgcaatctaccaaaacctgactcagctgaaagctgctgtcggggaactgagcgagaagtccaagctgcaagaaatctatcaggagctgacacagctgaaggctgccgtgggggagctccctgagaagtccaaactgcaggaaatctatcaggaacttacacggctcaaggccgctgtgggagagttaccggaaaaatcgaaacagcaggagatctaccaggagctgactcagctcaaggcggcagtcgagaggttatgccacccttgtccatgggagtggaccttttttcagggcaattgctattttatgagcaactctcagagaaactggcatgactcaattacagcctgtaaggaagtgggcgctcagcttgtggttattaaatctgccgaggagcagaactttctgcagctgcagtccagtaggagcaaccggttcacatggatgggcctcagcgaccttaatcaagagggcacttggcaatgggtcgatggcagtcctctgctcccctcattcaagcagtactggaaccggggtgagccaaacaacgttggagaagaggactgtgctgagttttctggcaatggatggaacgatgataagtgcaacctcgccaagttctggatctgtaagaaatccgcagcctcctgtagtagagatgaagaacagtttctgtcacctgctcctgccactcctaatccacctccagcgtag

SEQ ID NO: 56388 - DNA, 3920 bp, Artificial Sequence
  derived and/or modified sequence
atcacagggtgggaaataaaagctgtggcccccaggagttctggacactgggggagagtggggtgacatgagtgactccaaggaaccaagactgcagcagctgggcctcctggtgtccaaggtccccagctccataagtcaggaacaatccaggcaagacgcgatctaccagaacctgacccagcttaaagctgcagtgggtgagctctcagagaaatccaagctgcaggagatctaccaggagctgacccagctgaaggctgcagtgggtgagcttccagagaaatctaagctgcaggagatctaccaggagctgacccggctgaaggctgcagtgggtgagcttccagagaaatctaagcagcaggagatctaccaggagctgacccagctgaaggctgcagtggaacgcctgtgccacccctgtccctgggaatggacattcttccaaggaaactgttacttcatgtctaactcccagcggaactggcacgactccatcaccgcctgcaaagaagtgggggcccagctcgtcgtaatcaaaagtgctgaggagcagaacttcctacagctgcagtcttccagaagtaaccgcttcacctggatgggactttcagatctaaatcaggaaggcacgtggcaatgggtggacggctcacctctgttgcccagcttcaagcagtattggaacagaggagagcccaacaacgttggggaggaagactgcgcggaatttagtggcaatggctggaacgacgacaaatgtaatcttgccaaattctggatctgcaaaaagtccgcagcctcctgctccagggatgaagaacagtttctttctccagcccctgccaccccaaacccccctcctgcgtagcagaacttcacccccttttaagctacagttccttctctccatccttcgaccttcacaaaatctctgggactgttctttgtcagattcttcctcctttagaaggctgggtcccattctgtccttcttgtcatgcctccaatttcccctggtgtagagcttgtttttctggcccatccttggagctttatgagtgagctggtgtgggatgcctttgggggtggacttgtgttccaagaatccactctctcttccttttggagattaggatatttgggttgccatgtgtagctgctatgtcccctggggcgttatcttatacatgcaaacctaccatctgttcaacttccacctaccacctcctgcacccctttgatcggggacttactggttgcaagagctcattttgcaggctggaagcaccagggaattaattcccccagtcaaccaatggcacccagagagggcatggaggctccacgcaaccccttccacccccacatcttcctttgtcttatacatggcttccatttggctgtttctaagttgtattctttattttattattattattactatttttcgagatggagtttcactcttgtcgctcaggctggagtgccatggcgcgatcttggctcactgcaacctctgcctcccgggttcaagtgattctcctgcctcagcctcacgagtagctggaattacaggcaggcgccaccagacccggctaattttttgtatttttagtacagatggggtttctccgtgttggtcaggctggtcttgaactcccgacctcagatgatctgcccgcctcggcctcccaaaattgctgggattacaggtgtgagccaccgcgcctggcctattattttttgtaagaataaaacaggtttattgggatttgggactctgaacagttctgtctctactacctgatctcctcctaccacgactttgggatctagaggagctttggctccggctgtgacggctccggccgttctcactgcggctgcaccggcccccgctgcggtcactatttcttcctctgctaggtgaattgtgcctctcctggctctttgacatgtgctagtgagatttcttccttttcctttcggattccccatttcttttgtaggaatggtctggactagggttctccttccccgcagcctgtagtattcatcgtggtggcccaccctctctctccccttggagctcttgccaaaggaggagacaagcagaggtctctattggatttctcaacacctgaagaaagttgcagtgttttcctcttggacattgttgtatttcaaataaaccacaaatcatcattttccaccgagccactgggcagaattcacactgaagctgtcgtcctgcgtacataccatcgtccgttaaacagagaaagagctgcttggcattcttcttccgactggtactgaacatatatacttgcccctcaggtgaggttccaagttgcaactgaccttgaactgaatcactctccccacgttattttttaattactatttttttttaaagatggggtcttgctctgtcgccaggctggagtgcagtggcgcgatctaggctcactgcaacttccgcctcccgggttcaagcgattctcctgcctcagcctcccgagtagctgggactccactaaaagtacaaaaattagctgggcgtgcaccactgcgcccagctaattcttgtatttttggtagagacggggtttcaacatgttgaccaggatggtctcgatctcttgacctcgtgattcgcccgccgcgtcctcccaaagtgctgggattacaggcctgagccaccgcgcccagtctctccccacgttcttgaactcgggcagcacatcctcacagaaatctaggaactgttggtaggtttcttcctcgctgtactccaggcttgcttcggagtcatagtcatccctcctgcactgctcctttccaaacactgtaaacatgcttttaataagaagggtaggactggatgttgggaaatcatgtgaacatctatctccaaatctgcaagctcctgttttactgtagaagggacaattaactccatccttctccatgactctgaaatccaagggggggttccgggttttgccatgtggcgccattttccaactcattttcagcctgatccagcatcttctggacagcttccggtttttgtttcttctgtcgtttctgttcctcctcctctctctctttcctctgctgttcttcccattgttcctttaactttcgctcttgttcttgccgttttctagccacctcttccttttccttctttattctgaattcttcttgtgccttctgctctctcagcaaccactcctcatgtaatctttgcctctctcttccccatagcttttctagttgttgtttttcaataaaagtgtcctcctctttctgtgagagtcctgagtccctcagtggagcaagttcctgctggcgtttctttcgtttctccttcttcagggcggccctgtactttttgtggcttggtttctctggaaatgtcaccttttcgggcgcagccatcttgccggcaccgccccgcccctctagttgtatcctttataataaactggtaaacattgtaaccgcagattcagcccaatctggttcaactttgtgtaataaaatggcgagttgtttttcagttgtcgtggacccccaggttgcaagttacataccctgggcatgtccagatgaacgaagcgtgcaaatccacgtggaacctaagtgctcagaccgaggaacagggactgagttaagaagtggacaccacgtggcatgatccttgatccaatcagattgagccctggcgtgatccagtcagatcaagcctcctgaatcccctcattacaagatccaatcatatcatgcctcactaccctctgtatataaaatctgccccagcctccaacttggagagacagatttgggccagactcctgtgtccttgcttggctgccttgcaataaatttttctctctacaaaa

SEQ ID NO: 56389 - DNA, 807 bp, Artificial Sequence
  derived and/or modified sequence
atgagcgacagcaaggagcccagactgcagcagctgggcctgctggtgagcaaggtgcccagcagcatcagccaggagcagagcagacaggacgccatctaccagaacctgacccagctgaaggccgccgtgggcgagctgagcgagaagagcaagctgcaggagatctaccaggagctgacccagctgaaggccgccgtgggcgagctgcccgagaagagcaagctgcaggagatctaccaggagctgaccagactgaaggccgccgtgggcgagctgcccgagaagagcaagcagcaggagatctaccaggagctgacccagctgaaggccgccgtggagagactgtgccacccctgcccctgggagtggaccttcttccagggcaactgctacttcatgagcaacagccagagaaactggcacgacagcatcaccgcctgcaaggaggtgggcgcccagctggtggtgatcaagagcgccgaggagcagaacttcctgcagctgcagagcagcagaagcaacagattcacctggatgggcctgagcgacctgaaccaggagggcacctggcagtgggtggacggcagccccctgctgcccagcttcaagcagtactggaacagaggcgagcccaacaacgtgggcgaggaggactgcgccgagttcagcggcaacggctggaacgacgacaagtgcaacctggccaagttctggatctgcaagaagagcgccgccagctgcagcagagacgaggagcagttcctgagccccgcccccgccacccccaaccccccccccgcctag

SEQ ID NO: 56390 - protein, 360 aa, Artificial Sequence
  derived and/or modified sequence
MSDSKEPRLQQLGLLVSKVPSSISQEQSRQDAIYQNLTQLKAAVGELSEKSKLQEIYQELTQLKAAVGELPEKSKLQEIYQELTRLKAAVGELPEKSKLQEIYQELTWLKAAVGELPEKSKMQEIYQELTRLKAAVGELPEKSKQQEIYQELTRLKAAVGELPEKSKQQEIYQELTRLKAAVGELPEKSKQQEIYQELTQLKAAVERLCHPCPWEWTFFQGNCYFMSNSQRNWHDSITACKEVGAQLVVIKSAEEQNFLQLQSSRSNRFTWMGLSDLNQEGTWQWVDGSPLLPSFKQYWNRGEPNNVGEEDCAEFSGNGWNDDKCNLAKFWICKKSAASCSRDEEQFLSPAPATPNPPPA

SEQ ID NO: 56391 - DNA, 1083 bp, Artificial Sequence
  derived and/or modified sequence
atgagtgactccaaggagcctaggctacaacagttaggactgctggtctccaaagttccaagttctatctcccaggagcagagcagacaggatgcaatctaccagaacctgactcaacttaaggccgccgttggcgaactctcagaaaagtctaagctacaggaaatttatcaggagttgactcagcttaaagctgccgtaggagaactaccagaaaaaagcaagctgcaggaaatttaccaggaacttactcggctgaaagccgctgtgggagaattgcccgagaagagtaagctccaggaaatctatcaggagctgacgtggctgaaggcggccgtgggagagttaccggaaaagtcaaaaatgcaggagatataccaggaactaaccaggctgaaagcagctgtcggagaattgcccgagaagagcaaacaacaagaaatctaccaagaattgaccagactaaaggccgctgtcggcgagttacccgagaaatccaaacagcaagaaatctatcaagaattaacccgactgaaagccgcggtgggtgaacttccagaaaaaagtaaacagcaagaaatttatcaggagctgacccagttgaaagccgccgtagagagactctgccatccatgtccgtgggagtggacctttttccaggggaactgttacttcatgtcgaacagtcagcgaaattggcatgactcaatcacagcttgcaaagaggtaggcgcccagctagttgttatcaagtccgctgaagagcagaatttcctgcaactgcagtcgagtaggtccaacagatttacatggatgggactttccgatttgaatcaggagggaacctggcaatgggtggacggcagccctctactacccagctttaaacagtattggaacagaggggagcccaataacgttggggaggaagattgtgccgaatttagcggcaacggatggaatgacgataagtgtaacctagccaagttctggatctgcaaaaaaagtgcagccagctgttctagggatgaggagcaatttctgagtcccgcccctgcaaccccaaacccaccgccagcatag

SEQ ID NO: 56392 - DNA, 1083 bp, Artificial Sequence
  derived and/or modified sequence
atgtctgacagcaaggagccccggctgcagcagctgggcctgctggtgtccaaggtgcccagcagcatcagccaggagcagagccggcaggatgccatctaccagaacctgacccagctgaaggctgctgtgggggagctgtctgagaagagcaagctgcaggagatctaccaggagctgacccagctgaaggctgctgtgggggagctgcctgagaagagcaagctgcaggagatctaccaggagctgacccggctgaaggctgctgtgggggagctgcctgagaagagcaagctgcaggagatctaccaggagctgacctggctgaaggctgctgtgggggagctgcctgagaagagcaagatgcaggagatctaccaggagctgacccggctgaaggctgctgtgggggagctgcctgagaagagcaagcagcaggagatctaccaggagctgacccggctgaaggctgctgtgggggagctgcctgagaagagcaagcagcaggagatctaccaggagctgacccggctgaaggctgctgtgggggagctgcctgagaagagcaagcagcaggagatctaccaggagctgacccagctgaaggctgctgtggagcggctgtgccacccctgcccctgggagtggaccttcttccagggcaactgctacttcatgagcaacagccagaggaactggcatgacagcatcacagcctgcaaggaggtgggcgcccagctggtggtgatcaagtctgctgaggagcagaacttcctgcagctgcagagcagccgcagcaaccgcttcacctggatgggcctgagtgacctgaaccaggagggcacctggcagtgggtggatggcagccccctgctgcccagcttcaagcagtactggaacagaggagagcccaacaacgtgggggaggaggactgtgccgagttctctggaaatggctggaatgatgacaagtgcaacctggccaagttctggatctgcaagaagtctgctgccagctgcagcagagatgaggagcagttcctgagccctgccccagccacccccaaccccccaccagcctag

SEQ ID NO: 56393 - DNA, 1083 bp, Artificial Sequence
  derived and/or modified sequence
atgagcgacagcaaggagccccggctgcagcagctgggcctgctggtaagtaaagtgcctagctctatctcccaagagcagtccagacaggatgctatttatcagaacctcacgcaactgaaggcagctgtgggtgagttatcagaaaaatcaaagcttcaggagatctaccaggagttaacccagttaaaggccgccgtgggggagttgccagagaagagtaagcttcaggagatatatcaggagttgacacgcctaaaggccgccgtcggagagctaccagaaaagagcaagttgcaggagatatatcaggaactaacgtggctgaaggccgcggtcggcgaactgccggagaagtccaaaatgcaagagatttaccaggagctcacacggcttaaggccgcggtaggtgagctgcccgagaagtcaaagcagcaagaaatctaccaggaactcacccggctcaaagccgctgttggggagttgcctgaaaaatcgaagcagcaagaaatttaccaagaactgacccgactcaaggccgcagtcggggagctaccagagaagtctaagcaacaggaaatttaccaggagctcacccagctcaaagctgctgtggaacggctgtgccacccttgtccttgggagtggactttctttcaaggtaactgctacttcatgagcaattctcagcgtaattggcacgacagtataaccgcctgtaaggaggtcggggcccagttggttgttattaaaagtgccgaggagcagaacttccttcagttacagagcagcaggagcaatagattcacttggatggggctctctgacttgaaccaggagggtacttggcagtgggtggacggaagtcctttactgccaagtttcaaacagtactggaatagaggggaaccaaataacgttggcgaggaagattgcgccgagttttctggcaatggttggaatgatgacaagtgtaacctcgctaagttctggatctgtaagaagagcgccgcttcttgctctcgggatgaggagcagtttttaagcccggctcccgccactccgaatcctccgcccgcctag

SEQ ID NO: 56394 - DNA, 1083 bp, Artificial Sequence
  derived and/or modified sequence
atgagtgactcaaaagaacctcgcctgcaacagcttggacttctggtgtccaaagtaccatcttcgattagtcaggagcagtcgcgacaagacgccatttatcagaacctgactcagctgaaagcagccgtgggggagttgagcgagaaatccaaactccaggaaatctatcaagaactcacccagctgaaggccgcagtcggagagcttccggagaagtccaagttgcaggagatttatcaggaattgacacgccttaaagccgctgttggggaactgccggagaagtccaaacttcaagagatctatcaggaactaacatggctgaaggctgccgtgggtgaactgcccgaaaaatccaaaatgcaggagatataccaagaactcacaaggcttaaagcggctgtcggcgagcttcctgaaaagtctaagcagcaggagatctaccaagagctcacaaggctcaaggctgccgtcggagaactccctgagaagtccaagcagcaagaaatctaccaagaactgacccgcttgaaagccgcagtgggcgagctccccgagaaatccaaacagcaggagatttaccaggagttgacccagctgaaggccgctgttgagcgcctgtgtcatccctgcccatgggagtggaccttttttcagggcaattgctacttcatgtctaattcacagcgtaattggcatgattcaatcaccgcatgcaaggaggttggcgcacagttagtggtcattaaatccgcagaggagcagaacttccttcaactccagagtagccgttcaaatagatttacctggatgggtctgagcgacctaaatcaggaggggacttggcaatgggtcgatgggagccccctgttgcctagttttaaacaatactggaaccgcggtgagccaaacaacgtaggtgaggaagattgtgccgaattctcggggaatggatggaacgacgacaagtgtaatctggctaagttttggatttgcaaaaaatccgcggcttcttgtagcagagacgaggagcagttcctgtctccagcacccgcaacacccaatcccccaccggcatag

SEQ ID NO: 56395 - DNA, 4196 bp, Artificial Sequence
  derived and/or modified sequence
atcacagggtgggaaataaaagctgtggcccccaggagttctggacactgggggagagtggggtgacatgagtgactccaaggaaccaagactgcagcagctgggcctcctggtgtccaaggtccccagctccataagtcaggaacaatccaggcaagacgcgatctaccagaacctgacccagcttaaagctgcagtgggtgagctctcagagaaatccaagctgcaggagatctaccaggagctgacccagctgaaggctgcagtgggtgagcttccagagaaatctaagctgcaggagatctaccaggagctgacccggctgaaggctgcagtgggtgagcttccagagaaatctaagctgcaggagatctaccaggagctgacctggctgaaggctgcagtgggtgagcttccagagaaatctaagatgcaggagatctaccaggagctgactcggctgaaggctgcagtgggtgagcttccagagaaatctaagcagcaggagatctaccaggagctgacccggctgaaggctgcagtgggtgagcttccagagaaatctaagcagcaggagatctaccaggagctgacccggctgaaggctgcagtgggtgagcttccagagaaatctaagcagcaggagatctaccaggagctgacccagctgaaggctgcagtggaacgcctgtgccacccctgtccctgggaatggacattcttccaaggaaactgttacttcatgtctaactcccagcggaactggcacgactccatcaccgcctgcaaagaagtgggggcccagctcgtcgtaatcaaaagtgctgaggagcagaacttcctacagctgcagtcttccagaagtaaccgcttcacctggatgggactttcagatctaaatcaggaaggcacgtggcaatgggtggacggctcacctctgttgcccagcttcaagcagtattggaacagaggagagcccaacaacgttggggaggaagactgcgcggaatttagtggcaatggctggaacgacgacaaatgtaatcttgccaaattctggatctgcaaaaagtccgcagcctcctgctccagggatgaagaacagtttctttctccagcccctgccaccccaaacccccctcctgcgtagcagaacttcacccccttttaagctacagttccttctctccatccttcgaccttcacaaaatctctgggactgttctttgtcagattcttcctcctttagaaggctgggtcccattctgtccttcttgtcatgcctccaatttcccctggtgtagagcttgtttttctggcccatccttggagctttatgagtgagctggtgtgggatgcctttgggggtggacttgtgttccaagaatccactctctcttccttttggagattaggatatttgggttgccatgtgtagctgctatgtcccctggggcgttatcttatacatgcaaacctaccatctgttcaacttccacctaccacctcctgcacccctttgatcggggacttactggttgcaagagctcattttgcaggctggaagcaccagggaattaattcccccagtcaaccaatggcacccagagagggcatggaggctccacgcaaccccttccacccccacatcttcctttgtcttatacatggcttccatttggctgtttctaagttgtattctttattttattattattattactatttttcgagatggagtttcactcttgtcgctcaggctggagtgccatggcgcgatcttggctcactgcaacctctgcctcccgggttcaagtgattctcctgcctcagcctcacgagtagctggaattacaggcaggcgccaccagacccggctaattttttgtatttttagtacagatggggtttctccgtgttggtcaggctggtcttgaactcccgacctcagatgatctgcccgcctcggcctcccaaaattgctgggattacaggtgtgagccaccgcgcctggcctattattttttgtaagaataaaacaggtttattgggatttgggactctgaacagttctgtctctactacctgatctcctcctaccacgactttgggatctagaggagctttggctccggctgtgacggctccggccgttctcactgcggctgcaccggcccccgctgcggtcactatttcttcctctgctaggtgaattgtgcctctcctggctctttgacatgtgctagtgagatttcttccttttcctttcggattccccatttcttttgtaggaatggtctggactagggttctccttccccgcagcctgtagtattcatcgtggtggcccaccctctctctccccttggagctcttgccaaaggaggagacaagcagaggtctctattggatttctcaacacctgaagaaagttgcagtgttttcctcttggacattgttgtatttcaaataaaccacaaatcatcattttccaccgagccactgggcagaattcacactgaagctgtcgtcctgcgtacataccatcgtccgttaaacagagaaagagctgcttggcattcttcttccgactggtactgaacatatatacttgcccctcaggtgaggttccaagttgcaactgaccttgaactgaatcactctccccacgttattttttaattactatttttttttaaagatggggtcttgctctgtcgccaggctggagtgcagtggcgcgatctaggctcactgcaacttccgcctcccgggttcaagcgattctcctgcctcagcctcccgagtagctgggactccactaaaagtacaaaaattagctgggcgtgcaccactgcgcccagctaattcttgtatttttggtagagacggggtttcaacatgttgaccaggatggtctcgatctcttgacctcgtgattcgcccgccgcgtcctcccaaagtgctgggattacaggcctgagccaccgcgcccagtctctccccacgttcttgaactcgggcagcacatcctcacagaaatctaggaactgttggtaggtttcttcctcgctgtactccaggcttgcttcggagtcatagtcatccctcctgcactgctcctttccaaacactgtaaacatgcttttaataagaagggtaggactggatgttgggaaatcatgtgaacatctatctccaaatctgcaagctcctgttttactgtagaagggacaattaactccatccttctccatgactctgaaatccaagggggggttccgggttttgccatgtggcgccattttccaactcattttcagcctgatccagcatcttctggacagcttccggtttttgtttcttctgtcgtttctgttcctcctcctctctctctttcctctgctgttcttcccattgttcctttaactttcgctcttgttcttgccgttttctagccacctcttccttttccttctttattctgaattcttcttgtgccttctgctctctcagcaaccactcctcatgtaatctttgcctctctcttccccatagcttttctagttgttgtttttcaataaaagtgtcctcctctttctgtgagagtcctgagtccctcagtggagcaagttcctgctggcgtttctttcgtttctccttcttcagggcggccctgtactttttgtggcttggtttctctggaaatgtcaccttttcgggcgcagccatcttgccggcaccgccccgcccctctagttgtatcctttataataaactggtaaacattgtaaccgcagattcagcccaatctggttcaactttgtgtaataaaatggcgagttgtttttcagttgtcgtggacccccaggttgcaagttacataccctgggcatgtccagatgaacgaagcgtgcaaatccacgtggaacctaagtgctcagaccgaggaacagggactgagttaagaagtggacaccacgtggcatgatccttgatccaatcagattgagccctggcgtgatccagtcagatcaagcctcctgaatcccctcattacaagatccaatcatatcatgcctcactaccctctgtatataaaatctgccccagcctccaacttggagagacagatttgggccagactcctgtgtccttgcttggctgccttgcaataaatttttctctctacaaaa

SEQ ID NO: 56396 - DNA, 1083 bp, Artificial Sequence
  derived and/or modified sequence
atgagcgacagcaaggagcccagactgcagcagctgggcctgctggtgagcaaggtgcccagcagcatcagccaggagcagagcagacaggacgccatctaccagaacctgacccagctgaaggccgccgtgggcgagctgagcgagaagagcaagctgcaggagatctaccaggagctgacccagctgaaggccgccgtgggcgagctgcccgagaagagcaagctgcaggagatctaccaggagctgaccagactgaaggccgccgtgggcgagctgcccgagaagagcaagctgcaggagatctaccaggagctgacctggctgaaggccgccgtgggcgagctgcccgagaagagcaagatgcaggagatctaccaggagctgaccagactgaaggccgccgtgggcgagctgcccgagaagagcaagcagcaggagatctaccaggagctgaccagactgaaggccgccgtgggcgagctgcccgagaagagcaagcagcaggagatctaccaggagctgaccagactgaaggccgccgtgggcgagctgcccgagaagagcaagcagcaggagatctaccaggagctgacccagctgaaggccgccgtggagagactgtgccacccctgcccctgggagtggaccttcttccagggcaactgctacttcatgagcaacagccagagaaactggcacgacagcatcaccgcctgcaaggaggtgggcgcccagctggtggtgatcaagagcgccgaggagcagaacttcctgcagctgcagagcagcagaagcaacagattcacctggatgggcctgagcgacctgaaccaggagggcacctggcagtgggtggacggcagccccctgctgcccagcttcaagcagtactggaacagaggcgagcccaacaacgtgggcgaggaggactgcgccgagttcagcggcaacggctggaacgacgacaagtgcaacctggccaagttctggatctgcaagaagagcgccgccagctgcagcagagacgaggagcagttcctgagccccgcccccgccacccccaaccccccccccgcctag

SEQ ID NO: 56397 - protein, 312 aa, Artificial Sequence
  derived and/or modified sequence
MSDSKEPRLQQLGLLEEEQLRGLGFRQTRGYKSLAGCLGHGPLVLQLLSFTLLAGLLVQVSKVPSSISQEQSRQDAIYQNLTQLKAAVGELSEKSKLQEIYQELTQLKAAVGELPEKSKLQEIYQELTRLKAAVGELPEKSKLQEIYQELTWLKAAVERLCHPCPWEWTFFQGNCYFMSNSQRNWHDSITACKEVGAQLVVIKSAEEQNFLQLQSSRSNRFTWMGLSDLNQEGTWQWVDGSPLLPSFKQYWNRGEPNNVGEEDCAEFSGNGWNDDKCNLAKFWICKKSAASCSRDEEQFLSPAPATPNPPPA

SEQ ID NO: 56398 - DNA, 939 bp, Artificial Sequence
  derived and/or modified sequence
atgtctgattctaaggaaccgcgccttcagcagctgggcctcttagaagaggagcagcttcgaggtctcggattccgccagacaagaggttacaagtcattggcaggatgccttggacacgggccactggttttacaactgctgagctttactcttctggctgggcttctcgtccaggtttcgaaagttccctcctccatttcacaagagcagtctcgccaggatgccatatatcagaatctgacccagctaaaggccgcagtgggagagctgagtgaaaaatccaaactgcaggaaatataccaagaactgactcaactcaaggccgcagtcggggaattgcccgaaaagtcaaagctacaagagatttatcaggagctgacacggctcaaagcagctgtgggggaactcccggagaagagcaagctgcaggagatttaccaggaactcacatggttgaaagccgcagtggagcgtctttgccacccttgtccgtgggaatggactttcttccagggcaactgttacttcatgtccaactctcagcggaactggcatgactctatcaccgcctgtaaggaagtgggagctcagctcgtcgtgattaagagcgccgaagagcagaactttctccagctccaaagcagccggagcaataggttcacctggatggggttgtctgacctgaaccaagaaggtacctggcagtgggtggatgggtcaccactccttccttctttcaaacagtactggaatagaggagaaccaaacaacgtaggagaggaagattgcgcggagttcagcgggaacggatggaatgatgataagtgcaatctggcgaaattctggatctgtaaaaagtcggccgcttcgtgctcacgagacgaagaacagttcctgagtccagcccccgctactcctaacccgccgcccgcctag

SEQ ID NO: 56399 - DNA, 939 bp, Artificial Sequence
  derived and/or modified sequence
atgtccgactctaaggagccccgcctgcagcagctggggctgttagaggaagaacagcttagagggctgggttttagacagacccgggggtacaaaagccttgctggctgtctcggacatgggccattggtgttgcaattgctgagttttacacttctggccggcctgctggtgcaggtgtctaaggtgcctagttccatttcacaggagcaatctaggcaggatgccatttaccagaacctgacgcagctcaaggccgccgtaggcgagctaagcgagaaatccaagcttcaggagatttatcaggagctgacccagctaaaggccgccgtgggtgagctgcctgaaaagagtaagttacaagaaatctaccaggagttgaccaggctgaaagccgccgttggagagcttccggagaagtcgaaacttcaggagatttatcaggagttaacctggctcaaggcagcagtggaacggctttgtcatccatgtccctgggaatggaccttttttcagggcaattgttattttatgagtaactcccagcggaattggcatgatagtattaccgcttgcaaagaagtcggagcacaattagtggtgatcaaatcagctgaggagcagaattttttgcagcttcagtcttcgcggagcaataggttcacttggatgggcctgagcgatctaaaccaggagggaacatggcagtgggtcgacgggtctccattgctgccttcctttaaacaatactggaaccgcggggagcctaacaatgttggcgaggaggactgtgctgaattttctggaaacgggtggaacgacgataagtgtaacttagccaaattttggatatgtaagaaaagcgcagccagctgcagtcgagatgaggagcagtttctgtcacctgcgcctgctactccaaatcccccacctgcatag

SEQ ID NO: 56400 - DNA, 939 bp, Artificial Sequence
  derived and/or modified sequence
atgtctgacagcaaggagccccggctgcagcagctgggcctgctggaggaggagcagctgcggggcctgggcttccggcagacccggggctacaagagcctggccggctgcctgggccacggccccctggtgctgcagctgctgtccttcaccctgctggccggcctgctggtgcaggtgtccaaggtgcccagcagcatcagccaggagcagagccggcaggatgccatctaccagaacctgacccagctgaaggctgctgtgggggagctgtctgagaagagcaagctgcaggagatctaccaggagctgacccagctgaaggctgctgtgggggagctgcctgagaagagcaagctgcaggagatctaccaggagctgacccggctgaaggctgctgtgggggagctgcctgagaagagcaagctgcaggagatctaccaggagctgacctggctgaaggctgctgtggagcggctgtgccacccctgcccctgggagtggaccttcttccagggcaactgctacttcatgagcaacagccagaggaactggcatgacagcatcacagcctgcaaggaggtgggcgcccagctggtggtgatcaagtctgctgaggagcagaacttcctgcagctgcagagcagccgcagcaaccgcttcacctggatgggcctgagtgacctgaaccaggagggcacctggcagtgggtggatggcagccccctgctgcccagcttcaagcagtactggaacagaggagagcccaacaacgtgggggaggaggactgtgccgagttctctggaaatggctggaatgatgacaagtgcaacctggccaagttctggatctgcaagaagtctgctgccagctgcagcagagatgaggagcagttcctgagccctgccccagccacccccaaccccccaccagcctag

SEQ ID NO: 56401 - DNA, 939 bp, Artificial Sequence
  derived and/or modified sequence
atgagcgacagcaaggagccccggctgcagcagctgggcctgctggaggaagaacagcttaggggcctgggttttagacagacaaggggatataaatccctggcaggatgcctcggtcacggacctttagtgctccagctcctcagcttcacgcttctagccggtctcctagtgcaggtttccaaggttccttcatctatcagccaggagcaaagccgacaagacgccatctatcagaatctgacccagcttaaggcggccgtgggcgagctaagcgaaaaatccaagctgcaggaaatttaccaggagttgacccagctgaaggcagctgtgggagagcttccagagaagtcgaaactgcaagaaatatatcaggaactgacccgcttgaaagctgccgttggagagcttcctgagaaaagcaaactccaggagatatatcaggaattgacatggctcaaggctgccgtcgaacggctgtgccatccctgcccatgggagtggacctttttccagggcaattgttattttatgtcgaactcacaaaggaattggcacgatagcattacagcctgcaaggaggtgggtgcacagctggtagtaatcaaaagcgccgaggagcagaatttcctacagctccagagctcccgctcgaaccgcttcacttggatgggcctgagcgaccttaatcaagaaggcacctggcagtgggtggatggaagtcctctcctaccaagctttaaacaatattggaatcgtggcgagcccaataatgtgggcgaggaggattgtgctgagttctcaggcaacggctggaacgacgacaagtgcaacttggccaaattctggatatgcaaaaaatctgcagccagctgttcccgagatgaagagcagtttctatctcccgctccagcaacccctaaccctcccccagcctag

SEQ ID NO: 56402 - DNA, 939 bp, Artificial Sequence
  derived and/or modified sequence
atgagcgacagcaaggagccccggctgcagcagctgggcctgctggaagaggagcagttgagagggttgggcttcaggcaaacccggggatataaatctctcgctggctgcctaggacacgggccactggtcctgcagctgctcagtttcacacttttagctggcctgctggtgcaggtcagcaaagtgccctcaagtatctcccaggaacagtctcgccaggacgctatatatcagaaccttacacagctaaaggcggccgtgggggaattatccgaaaaatccaagctccaggaaatctaccaggagctgacccagcttaaggcagccgtgggcgagctccctgagaaatccaagctgcaggagatataccaggagctaacccggctgaaagccgccgtcggggagcttcccgagaagtcgaagctacaagaaatataccaggagctgacctggttaaaagctgccgtggagagactgtgccacccctgtccatgggaatggaccttttttcagggaaattgctattttatgagcaattcacagcggaactggcacgactccatcaccgcatgcaaagaagtcggcgcccaactggtggtaatcaagtctgcagaagagcagaattttctgcagctccagtcttctcgcagcaaccgcttcacttggatggggctgagtgatttaaaccaggaaggtacttggcaatgggttgatggatccccactgttgccttctttcaagcagtactggaaccggggcgaacctaataacgtgggtgaggaagattgcgctgagttctcagggaacggctggaacgacgataagtgcaatctcgccaagttctggatctgcaagaagtccgccgcttcgtgctctagagacgaggaacagtttctatctcctgccccagcgacaccaaacccaccacctgcttag

SEQ ID NO: 56403 - DNA, 939 bp, Artificial Sequence
  derived and/or modified sequence
atgtccgactctaaggagccaagattgcaacagctgggattgctggaagaggagcagctccgcggattaggatttaggcagactagaggatataaatccctcgccggatgtctcggccatgggccacttgtacttcagctgctgtcctttacactattggccggactcctcgtgcaggtgtctaaagtcccaagcagcattagtcaggaacagagtagacaggacgccatataccagaaccttacccagctgaaggctgctgtgggggaactgagcgaaaaatccaagttgcaggaaatctatcaggaacttacccagcttaaagcagccgtgggggaactgcccgagaagtcgaaattacaggaaatttatcaagagcttacccggctgaaagccgctgtgggcgaactcccagagaaaagcaagcttcaagagatttatcaagagttgacatggctcaaagccgcagtcgaacggttgtgccacccatgtccatgggagtggacattctttcaagggaattgttacttcatgtccaatagtcagcgcaactggcacgatagtataacggcctgcaaggaagtgggagcacaactggtggtgattaagtcagccgaggagcaaaacttcctccagctccagtcttcaaggagcaacaggttcacctggatgggcttatcggacctgaaccaggagggtacatggcaatgggtcgatggatctccactgctaccctctttcaagcagtattggaacagaggtgaacctaacaacgtgggggaagaagactgcgccgagtttagcggaaacggatggaacgatgataagtgtaacctggctaaattttggatctgcaagaagagcgccgctagctgctctagggatgaggagcagttcttgtctcctgcgccagcgacccccaatcctcctcccgcatag

SEQ ID NO: 56404 - DNA, 939 bp, Artificial Sequence
  derived and/or modified sequence
atgtccgactctaaagaacctcggttgcaacagctaggacttctggaggaagagcaactacgcggactgggtttccggcagacaagaggatacaagtcattggctggctgcctcgggcatggccctctggttttgcagctgttatcgttcacactgctcgctgggctcttagtgcaggtgtccaaagtgccatcttcaatcagccaagaacagagccggcaggatgccatctatcaaaacctgacccaactcaaggctgcggtaggagagctctctgagaagtccaagttacaagagatttatcaggaacttacccaactgaaggctgccgtgggcgagctgcccgaaaaatccaagcttcaggagatctatcaggaactcacgagactgaaggccgctgtgggtgagttaccggagaaaagcaaactccaagagatctatcaggagctgacttggctgaaagcagccgtggagaggctctgccatccttgcccatgggaatggaccttctttcagggcaattgttattttatgtcgaattctcagcgcaactggcacgacagtatcactgcctgcaaggaggttggggctcagctcgtggtaataaaatccgcagaagaacagaacttcctgcagctacagtctagcagaagcaataggtttacatggatgggtctgagtgacctgaaccaggaaggaacatggcagtgggtggacggatccccgctgttgcccagtttcaaacagtattggaacagaggggaacctaataatgtcggggaggaagattgtgcagagtttagcggcaacgggtggaacgacgataagtgcaacctggccaaattctggatctgtaaaaagtcagccgctagctgttctagggacgaggagcagtttttgtcaccagcaccggcaacacctaatcccccacctgcctag

SEQ ID NO: 56405 - DNA, 4052 bp, Artificial Sequence
  derived and/or modified sequence
atcacagggtgggaaataaaagctgtggcccccaggagttctggacactgggggagagtggggtgacatgagtgactccaaggaaccaagactgcagcagctgggcctcctggaggaggaacagctgagaggccttggattccgacagactcgaggatacaagagcttagcagggtgtcttggccatggtcccctggtgctgcaactcctctccttcacgctcttggctgggctccttgtccaagtgtccaaggtccccagctccataagtcaggaacaatccaggcaagacgcgatctaccagaacctgacccagcttaaagctgcagtgggtgagctctcagagaaatccaagctgcaggagatctaccaggagctgacccagctgaaggctgcagtgggtgagcttccagagaaatctaagctgcaggagatctaccaggagctgacccggctgaaggctgcagtgggtgagcttccagagaaatctaagctgcaggagatctaccaggagctgacctggctgaaggctgcagtggaacgcctgtgccacccctgtccctgggaatggacattcttccaaggaaactgttacttcatgtctaactcccagcggaactggcacgactccatcaccgcctgcaaagaagtgggggcccagctcgtcgtaatcaaaagtgctgaggagcagaacttcctacagctgcagtcttccagaagtaaccgcttcacctggatgggactttcagatctaaatcaggaaggcacgtggcaatgggtggacggctcacctctgttgcccagcttcaagcagtattggaacagaggagagcccaacaacgttggggaggaagactgcgcggaatttagtggcaatggctggaacgacgacaaatgtaatcttgccaaattctggatctgcaaaaagtccgcagcctcctgctccagggatgaagaacagtttctttctccagcccctgccaccccaaacccccctcctgcgtagcagaacttcacccccttttaagctacagttccttctctccatccttcgaccttcacaaaatctctgggactgttctttgtcagattcttcctcctttagaaggctgggtcccattctgtccttcttgtcatgcctccaatttcccctggtgtagagcttgtttttctggcccatccttggagctttatgagtgagctggtgtgggatgcctttgggggtggacttgtgttccaagaatccactctctcttccttttggagattaggatatttgggttgccatgtgtagctgctatgtcccctggggcgttatcttatacatgcaaacctaccatctgttcaacttccacctaccacctcctgcacccctttgatcggggacttactggttgcaagagctcattttgcaggctggaagcaccagggaattaattcccccagtcaaccaatggcacccagagagggcatggaggctccacgcaaccccttccacccccacatcttcctttgtcttatacatggcttccatttggctgtttctaagttgtattctttattttattattattattactatttttcgagatggagtttcactcttgtcgctcaggctggagtgccatggcgcgatcttggctcactgcaacctctgcctcccgggttcaagtgattctcctgcctcagcctcacgagtagctggaattacaggcaggcgccaccagacccggctaattttttgtatttttagtacagatggggtttctccgtgttggtcaggctggtcttgaactcccgacctcagatgatctgcccgcctcggcctcccaaaattgctgggattacaggtgtgagccaccgcgcctggcctattattttttgtaagaataaaacaggtttattgggatttgggactctgaacagttctgtctctactacctgatctcctcctaccacgactttgggatctagaggagctttggctccggctgtgacggctccggccgttctcactgcggctgcaccggcccccgctgcggtcactatttcttcctctgctaggtgaattgtgcctctcctggctctttgacatgtgctagtgagatttcttccttttcctttcggattccccatttcttttgtaggaatggtctggactagggttctccttccccgcagcctgtagtattcatcgtggtggcccaccctctctctccccttggagctcttgccaaaggaggagacaagcagaggtctctattggatttctcaacacctgaagaaagttgcagtgttttcctcttggacattgttgtatttcaaataaaccacaaatcatcattttccaccgagccactgggcagaattcacactgaagctgtcgtcctgcgtacataccatcgtccgttaaacagagaaagagctgcttggcattcttcttccgactggtactgaacatatatacttgcccctcaggtgaggttccaagttgcaactgaccttgaactgaatcactctccccacgttattttttaattactatttttttttaaagatggggtcttgctctgtcgccaggctggagtgcagtggcgcgatctaggctcactgcaacttccgcctcccgggttcaagcgattctcctgcctcagcctcccgagtagctgggactccactaaaagtacaaaaattagctgggcgtgcaccactgcgcccagctaattcttgtatttttggtagagacggggtttcaacatgttgaccaggatggtctcgatctcttgacctcgtgattcgcccgccgcgtcctcccaaagtgctgggattacaggcctgagccaccgcgcccagtctctccccacgttcttgaactcgggcagcacatcctcacagaaatctaggaactgttggtaggtttcttcctcgctgtactccaggcttgcttcggagtcatagtcatccctcctgcactgctcctttccaaacactgtaaacatgcttttaataagaagggtaggactggatgttgggaaatcatgtgaacatctatctccaaatctgcaagctcctgttttactgtagaagggacaattaactccatccttctccatgactctgaaatccaagggggggttccgggttttgccatgtggcgccattttccaactcattttcagcctgatccagcatcttctggacagcttccggtttttgtttcttctgtcgtttctgttcctcctcctctctctctttcctctgctgttcttcccattgttcctttaactttcgctcttgttcttgccgttttctagccacctcttccttttccttctttattctgaattcttcttgtgccttctgctctctcagcaaccactcctcatgtaatctttgcctctctcttccccatagcttttctagttgttgtttttcaataaaagtgtcctcctctttctgtgagagtcctgagtccctcagtggagcaagttcctgctggcgtttctttcgtttctccttcttcagggcggccctgtactttttgtggcttggtttctctggaaatgtcaccttttcgggcgcagccatcttgccggcaccgccccgcccctctagttgtatcctttataataaactggtaaacattgtaaccgcagattcagcccaatctggttcaactttgtgtaataaaatggcgagttgtttttcagttgtcgtggacccccaggttgcaagttacataccctgggcatgtccagatgaacgaagcgtgcaaatccacgtggaacctaagtgctcagaccgaggaacagggactgagttaagaagtggacaccacgtggcatgatccttgatccaatcagattgagccctggcgtgatccagtcagatcaagcctcctgaatcccctcattacaagatccaatcatatcatgcctcactaccctctgtatataaaatctgccccagcctccaacttggagagacagatttgggccagactcctgtgtccttgcttggctgccttgcaataaatttttctctctacaaaa

SEQ ID NO: 56406 - DNA, 939 bp, Artificial Sequence
  derived and/or modified sequence
atgagtgactccaaggaaccaagactgcagcagctgggcctcctggaggaggaacagctgagaggccttggattccgacagactcgaggatacaagagcttagcagggtgtcttggccatggtcccctggtgctgcaactcctctccttcacgctcttggctgggctccttgtccaagtgtccaaggtccccagctccataagtcaggaacaatccaggcaagacgcgatctaccagaacctgacccagcttaaagctgcagtgggtgagctctcagagaaatccaagctgcaggagatctaccaggagctgacccagctgaaggctgcagtgggtgagcttccagagaaatctaagctgcaggagatctaccaggagctgacccggctgaaggctgcagtgggtgagcttccagagaaatctaagctgcaggagatctaccaggagctgacctggctgaaggctgcagtggaacgcctgtgccacccctgtccctgggaatggacattcttccaaggaaactgttacttcatgtctaactcccagcggaactggcacgactccatcaccgcctgcaaagaagtgggggcccagctcgtcgtaatcaaaagtgctgaggagcagaacttcctacagctgcagtcttccagaagtaaccgcttcacctggatgggactttcagatctaaatcaggaaggcacgtggcaatgggtggacggctcacctctgttgcccagcttcaagcagtattggaacagaggagagcccaacaacgttggggaggaagactgcgcggaatttagtggcaatggctggaacgacgacaaatgtaatcttgccaaattctggatctgcaaaaagtccgcagcctcctgctccagggatgaagaacagtttctttctccagcccctgccaccccaaacccccctcctgcgtag

SEQ ID NO: 56407 - DNA, 939 bp, Artificial Sequence
  derived and/or modified sequence
atgagcgacagcaaggagcccagactgcagcagctgggcctgctggaggaggagcagctgagaggcctgggcttcagacagaccagaggctacaagagcctggccggctgcctgggccacggccccctggtgctgcagctgctgagcttcaccctgctggccggcctgctggtgcaggtgagcaaggtgcccagcagcatcagccaggagcagagcagacaggacgccatctaccagaacctgacccagctgaaggccgccgtgggcgagctgagcgagaagagcaagctgcaggagatctaccaggagctgacccagctgaaggccgccgtgggcgagctgcccgagaagagcaagctgcaggagatctaccaggagctgaccagactgaaggccgccgtgggcgagctgcccgagaagagcaagctgcaggagatctaccaggagctgacctggctgaaggccgccgtggagagactgtgccacccctgcccctgggagtggaccttcttccagggcaactgctacttcatgagcaacagccagagaaactggcacgacagcatcaccgcctgcaaggaggtgggcgcccagctggtggtgatcaagagcgccgaggagcagaacttcctgcagctgcagagcagcagaagcaacagattcacctggatgggcctgagcgacctgaaccaggagggcacctggcagtgggtggacggcagccccctgctgcccagcttcaagcagtactggaacagaggcgagcccaacaacgtgggcgaggaggactgcgccgagttcagcggcaacggctggaacgacgacaagtgcaacctggccaagttctggatctgcaagaagagcgccgccagctgcagcagagacgaggagcagttcctgagccccgcccccgccacccccaaccccccccccgcctag

SEQ ID NO: 56408 - protein, 380 aa, Artificial Sequence
  derived and/or modified sequence
MSDSKEPRLQQLGLLEEEQLRGLGFRQTRGYKSLAVSKVPSSISQEQSRQDAIYQNLTQLKAAVGELSEKSKLQEIYQELTQLKAAVGELPEKSKLQEIYQELTRLKAAVGELPEKSKLQEIYQELTWLKAAVGELPEKSKMQEIYQELTRLKAAVGELPEKSKQQEIYQELTRLKAAVGELPEKSKQQEIYQELTRLKAAVGELPEKSKQQEIYQELTQLKAAVERLCHPCPWEWTFFQGNCYFMSNSQRNWHDSITACKEVGAQLVVIKSAEEQNFLQLQSSRSNRFTWMGLSDLNQEGTWQWVDGSPLLPSFKQYWNRGEPNNVGEEDCAEFSGNGWNDDKCNLAKFWICKKSAASCSRDEEQFLSPAPATPNPPPA

SEQ ID NO: 56409 - protein, 34 aa, Artificial Sequence
  derived and/or modified sequence
MSDSKEPRLQQLGLLEEEQLRGLGFRQTRRNQKC

SEQ ID NO: 56410 - DNA, 1143 bp, Artificial Sequence
  derived and/or modified sequence
atgagcgactcaaaggaaccccggctgcaacaattggggttactcgaggaggaacagctgcgaggcctgggattccgtcagacccgcggctataagtcattggcagtatctaaggtgccttcatcaatctctcaggagcaaagtcgtcaggacgcgatatatcagaatctcacccagcttaaggccgcagttggggagctgtcggagaaaagcaagcttcaagaaatctaccaggagctaactcagctcaaagctgccgttggagagctccctgagaaaagcaagttacaggaaatttaccaggaactgactcgtctcaaagccgcagttggggagttaccagagaaatctaaattacaagagatataccaggaattgacctggctgaaggctgccgtcggggagctccctgagaagtctaagatgcaagaaatataccaggagctgactcgattgaaagccgccgttggggagttgcctgaaaagagtaaacagcaggagatatatcaagagctgacccggttaaaagcagccgtcggcgagcttcctgaaaagtccaagcagcaagagatctatcaggaactgacacggttaaaagccgccgtgggggagctccctgagaaaagtaaacagcaggaaatatatcaggaattgacacagttgaaggcggccgtcgagaggttatgtcacccttgcccttgggaatggacctttttccagggcaactgttatttcatgtcaaactcacagagaaattggcacgactcaatcacagcttgcaaggaggtgggcgcacagcttgtggtgatcaagtctgcagaagaacagaattttctgcaactgcagtcatctagaagcaatagattcacttggatgggactgagcgatctaaatcaggaagggacctggcagtgggtggatggaagtccactgttgccgagctttaagcagtactggaatcggggtgaaccaaataacgttggagaagaagattgcgctgagttcagtggcaacgggtggaacgacgataaatgtaatttggctaaattttggatctgcaagaagtctgccgcctcttgtagcagggatgaggaacaattcctgagcccagctcctgctacacccaaccctccccctgcttag

SEQ ID NO: 56411 - DNA, 1143 bp, Artificial Sequence
  derived and/or modified sequence
atgtctgacagcaaggagccccggctgcagcagctgggcctgctggaggaggagcagctgcggggcctgggcttccggcagacccggggctacaagagcctggccgtgtccaaggtgcccagcagcatcagccaggagcagagccggcaggatgccatctaccagaacctgacccagctgaaggctgctgtgggggagctgtctgagaagagcaagctgcaggagatctaccaggagctgacccagctgaaggctgctgtgggggagctgcctgagaagagcaagctgcaggagatctaccaggagctgacccggctgaaggctgctgtgggggagctgcctgagaagagcaagctgcaggagatctaccaggagctgacctggctgaaggctgctgtgggggagctgcctgagaagagcaagatgcaggagatctaccaggagctgacccggctgaaggctgctgtgggggagctgcctgagaagagcaagcagcaggagatctaccaggagctgacccggctgaaggctgctgtgggggagctgcctgagaagagcaagcagcaggagatctaccaggagctgacccggctgaaggctgctgtgggggagctgcctgagaagagcaagcagcaggagatctaccaggagctgacccagctgaaggctgctgtggagcggctgtgccacccctgcccctgggagtggaccttcttccagggcaactgctacttcatgagcaacagccagaggaactggcatgacagcatcacagcctgcaaggaggtgggcgcccagctggtggtgatcaagtctgctgaggagcagaacttcctgcagctgcagagcagccgcagcaaccgcttcacctggatgggcctgagtgacctgaaccaggagggcacctggcagtgggtggatggcagccccctgctgcccagcttcaagcagtactggaacagaggagagcccaacaacgtgggggaggaggactgtgccgagttctctggaaatggctggaatgatgacaagtgcaacctggccaagttctggatctgcaagaagtctgctgccagctgcagcagagatgaggagcagttcctgagccctgccccagccacccccaaccccccaccagcctag

SEQ ID NO: 56412 - DNA, 1143 bp, Artificial Sequence
  derived and/or modified sequence
atgagcgacagcaaggagccccggctgcagcagctgggcctgctggaggaagaacagcttagagggttaggatttagacaaacacgcgggtacaaaagcctggcggtttcgaaagtgccttcctccatctcccaggagcaatcgaggcaggatgcaatctatcagaacttgacgcagctgaaagccgccgtgggggagctctcagaaaaatccaagcttcaggagatctatcaggaacttactcagctgaaggcagctgtcggcgagctgcccgagaagtccaaacttcaggagatataccaggaactcacgcgcctcaaagccgccgtcggcgaattacccgaaaagagcaaactgcaggaaatataccaggagttgacatggctcaaggctgcagttggggagcttcccgaaaaatccaaaatgcaagagatctaccaggaattgacgcggcttaaagcagccgtcggtgaactgcctgagaaatctaagcaacaggaaatttaccaagaactgacgaggcttaaggctgcagtgggcgaactacccgaaaaaagtaaacagcaagagatttaccaggaactgacgaggctgaaagctgcagtgggcgagctgcccgagaagagcaagcagcaagagatttaccaggagctaacccagctgaaggccgctgtggagcgactttgccatccgtgcccttgggaatggacctttttccagggaaattgttactttatgtctaatagccagagaaattggcacgattcgataacagcctgtaaagaagtcggtgcgcaacttgtcgtcattaagtctgctgaagagcagaacttcctgcagctgcagagctctaggagtaataggttcacctggatggggctcagcgatttgaatcaagaaggcacatggcaatgggtcgatggcagccccctgctgccaagctttaaacagtactggaatcggggggaaccaaacaacgtcggggaggaggattgcgcggaattctctggcaatggttggaatgatgacaagtgcaacctcgctaagttttggatctgcaagaagtctgcagcaagctgctctagagatgaagaacaatttctgtcgccagccccagccacccccaatccgcctcccgcatag

SEQ ID NO: 56413 - DNA, 1143 bp, Artificial Sequence
  derived and/or modified sequence
atgtccgactcaaaggagccgagattacagcaactcggcctgttggaggaagagcaactgcgtggcttagggttccgtcagacccgcggatacaagtccttggcagtcagcaaggtgccttcgagcatttcacaggagcagtctaggcaggacgctatctaccagaacctgacccagctgaaggctgctgtaggcgaactcagcgagaagagtaagctccaggagatctaccaagagctgacccagctgaaagccgctgtcggagagctgcctgaaaaaagtaaactgcaggagatttatcaagagctaacaagacttaaggccgcagtgggcgaattacccgagaagtcaaagctgcaggaaatatatcaagagctcacgtggttaaaggcggcagtcggggagctcccagaaaaatctaagatgcaggaaatttaccaggaactcacccgccttaaagccgctgtaggggaactcccagagaaaagcaagcagcaggagatttatcaagaactcaccaggctcaaggctgcagtgggagaattacccgagaaatcaaagcagcaggaaatctaccaggaactcactcggctaaaagcagccgtgggcgaactgcctgagaagagcaaacagcaggaaatttaccaggaactaacacagctgaaagccgctgttgaacgcctgtgtcacccctgtccatgggaatggacatttttccaaggtaactgctatttcatgtctaactcccagcgcaactggcatgattccatcacagcttgcaaggaagtgggagctcagctcgtcgttatcaagtctgccgaggagcagaattttcttcaactgcagtcctcccggtctaacaggtttacctggatggggctcagcgatcttaaccaggaaggtacttggcagtgggtggacgggtctcctttgttgccctctttcaaacagtactggaacagaggtgaacccaacaacgtgggtgaagaagactgtgcggaatttagcgggaatgggtggaatgacgacaagtgcaaccttgcgaagttctggatctgtaagaagtctgccgcttcgtgcagcagggacgaagagcagtttctgtctccagcccctgctaccccaaacccgccacccgcttag

SEQ ID NO: 56414 - DNA, 4256 bp, Artificial Sequence
  derived and/or modified sequence
atcacagggtgggaaataaaagctgtggcccccaggagttctggacactgggggagagtggggtgacatgagtgactccaaggaaccaagactgcagcagctgggcctcctggaggaggaacagctgagaggccttggattccgacagactcgaggatacaagagcttagcagtgtccaaggtccccagctccataagtcaggaacaatccaggcaagacgcgatctaccagaacctgacccagcttaaagctgcagtgggtgagctctcagagaaatccaagctgcaggagatctaccaggagctgacccagctgaaggctgcagtgggtgagcttccagagaaatctaagctgcaggagatctaccaggagctgacccggctgaaggctgcagtgggtgagcttccagagaaatctaagctgcaggagatctaccaggagctgacctggctgaaggctgcagtgggtgagcttccagagaaatctaagatgcaggagatctaccaggagctgactcggctgaaggctgcagtgggtgagcttccagagaaatctaagcagcaggagatctaccaggagctgacccggctgaaggctgcagtgggtgagcttccagagaaatctaagcagcaggagatctaccaggagctgacccggctgaaggctgcagtgggtgagcttccagagaaatctaagcagcaggagatctaccaggagctgacccagctgaaggctgcagtggaacgcctgtgccacccctgtccctgggaatggacattcttccaaggaaactgttacttcatgtctaactcccagcggaactggcacgactccatcaccgcctgcaaagaagtgggggcccagctcgtcgtaatcaaaagtgctgaggagcagaacttcctacagctgcagtcttccagaagtaaccgcttcacctggatgggactttcagatctaaatcaggaaggcacgtggcaatgggtggacggctcacctctgttgcccagcttcaagcagtattggaacagaggagagcccaacaacgttggggaggaagactgcgcggaatttagtggcaatggctggaacgacgacaaatgtaatcttgccaaattctggatctgcaaaaagtccgcagcctcctgctccagggatgaagaacagtttctttctccagcccctgccaccccaaacccccctcctgcgtagcagaacttcacccccttttaagctacagttccttctctccatccttcgaccttcacaaaatctctgggactgttctttgtcagattcttcctcctttagaaggctgggtcccattctgtccttcttgtcatgcctccaatttcccctggtgtagagcttgtttttctggcccatccttggagctttatgagtgagctggtgtgggatgcctttgggggtggacttgtgttccaagaatccactctctcttccttttggagattaggatatttgggttgccatgtgtagctgctatgtcccctggggcgttatcttatacatgcaaacctaccatctgttcaacttccacctaccacctcctgcacccctttgatcggggacttactggttgcaagagctcattttgcaggctggaagcaccagggaattaattcccccagtcaaccaatggcacccagagagggcatggaggctccacgcaaccccttccacccccacatcttcctttgtcttatacatggcttccatttggctgtttctaagttgtattctttattttattattattattactatttttcgagatggagtttcactcttgtcgctcaggctggagtgccatggcgcgatcttggctcactgcaacctctgcctcccgggttcaagtgattctcctgcctcagcctcacgagtagctggaattacaggcaggcgccaccagacccggctaattttttgtatttttagtacagatggggtttctccgtgttggtcaggctggtcttgaactcccgacctcagatgatctgcccgcctcggcctcccaaaattgctgggattacaggtgtgagccaccgcgcctggcctattattttttgtaagaataaaacaggtttattgggatttgggactctgaacagttctgtctctactacctgatctcctcctaccacgactttgggatctagaggagctttggctccggctgtgacggctccggccgttctcactgcggctgcaccggcccccgctgcggtcactatttcttcctctgctaggtgaattgtgcctctcctggctctttgacatgtgctagtgagatttcttccttttcctttcggattccccatttcttttgtaggaatggtctggactagggttctccttccccgcagcctgtagtattcatcgtggtggcccaccctctctctccccttggagctcttgccaaaggaggagacaagcagaggtctctattggatttctcaacacctgaagaaagttgcagtgttttcctcttggacattgttgtatttcaaataaaccacaaatcatcattttccaccgagccactgggcagaattcacactgaagctgtcgtcctgcgtacataccatcgtccgttaaacagagaaagagctgcttggcattcttcttccgactggtactgaacatatatacttgcccctcaggtgaggttccaagttgcaactgaccttgaactgaatcactctccccacgttattttttaattactatttttttttaaagatggggtcttgctctgtcgccaggctggagtgcagtggcgcgatctaggctcactgcaacttccgcctcccgggttcaagcgattctcctgcctcagcctcccgagtagctgggactccactaaaagtacaaaaattagctgggcgtgcaccactgcgcccagctaattcttgtatttttggtagagacggggtttcaacatgttgaccaggatggtctcgatctcttgacctcgtgattcgcccgccgcgtcctcccaaagtgctgggattacaggcctgagccaccgcgcccagtctctccccacgttcttgaactcgggcagcacatcctcacagaaatctaggaactgttggtaggtttcttcctcgctgtactccaggcttgcttcggagtcatagtcatccctcctgcactgctcctttccaaacactgtaaacatgcttttaataagaagggtaggactggatgttgggaaatcatgtgaacatctatctccaaatctgcaagctcctgttttactgtagaagggacaattaactccatccttctccatgactctgaaatccaagggggggttccgggttttgccatgtggcgccattttccaactcattttcagcctgatccagcatcttctggacagcttccggtttttgtttcttctgtcgtttctgttcctcctcctctctctctttcctctgctgttcttcccattgttcctttaactttcgctcttgttcttgccgttttctagccacctcttccttttccttctttattctgaattcttcttgtgccttctgctctctcagcaaccactcctcatgtaatctttgcctctctcttccccatagcttttctagttgttgtttttcaataaaagtgtcctcctctttctgtgagagtcctgagtccctcagtggagcaagttcctgctggcgtttctttcgtttctccttcttcagggcggccctgtactttttgtggcttggtttctctggaaatgtcaccttttcgggcgcagccatcttgccggcaccgccccgcccctctagttgtatcctttataataaactggtaaacattgtaaccgcagattcagcccaatctggttcaactttgtgtaataaaatggcgagttgtttttcagttgtcgtggacccccaggttgcaagttacataccctgggcatgtccagatgaacgaagcgtgcaaatccacgtggaacctaagtgctcagaccgaggaacagggactgagttaagaagtggacaccacgtggcatgatccttgatccaatcagattgagccctggcgtgatccagtcagatcaagcctcctgaatcccctcattacaagatccaatcatatcatgcctcactaccctctgtatataaaatctgccccagcctccaacttggagagacagatttgggccagactcctgtgtccttgcttggctgccttgcaataaatttttctctctacaaaa

SEQ ID NO: 56415 - DNA, 1143 bp, Artificial Sequence
  derived and/or modified sequence
atgagcgacagcaaggagcccagactgcagcagctgggcctgctggaggaggagcagctgagaggcctgggcttcagacagaccagaggctacaagagcctggccgtgagcaaggtgcccagcagcatcagccaggagcagagcagacaggacgccatctaccagaacctgacccagctgaaggccgccgtgggcgagctgagcgagaagagcaagctgcaggagatctaccaggagctgacccagctgaaggccgccgtgggcgagctgcccgagaagagcaagctgcaggagatctaccaggagctgaccagactgaaggccgccgtgggcgagctgcccgagaagagcaagctgcaggagatctaccaggagctgacctggctgaaggccgccgtgggcgagctgcccgagaagagcaagatgcaggagatctaccaggagctgaccagactgaaggccgccgtgggcgagctgcccgagaagagcaagcagcaggagatctaccaggagctgaccagactgaaggccgccgtgggcgagctgcccgagaagagcaagcagcaggagatctaccaggagctgaccagactgaaggccgccgtgggcgagctgcccgagaagagcaagcagcaggagatctaccaggagctgacccagctgaaggccgccgtggagagactgtgccacccctgcccctgggagtggaccttcttccagggcaactgctacttcatgagcaacagccagagaaactggcacgacagcatcaccgcctgcaaggaggtgggcgcccagctggtggtgatcaagagcgccgaggagcagaacttcctgcagctgcagagcagcagaagcaacagattcacctggatgggcctgagcgacctgaaccaggagggcacctggcagtgggtggacggcagccccctgctgcccagcttcaagcagtactggaacagaggcgagcccaacaacgtgggcgaggaggactgcgccgagttcagcggcaacggctggaacgacgacaagtgcaacctggccaagttctggatctgcaagaagagcgccgccagctgcagcagagacgaggagcagttcctgagccccgcccccgccacccccaaccccccccccgcctag

SEQ ID NO: 56416 - protein, 398 aa, Artificial Sequence
  derived and/or modified sequence
MSDSKEPRLQQLGLLEEEQLRGLGFRQTRGYKSLAGCLGHGPLVLQLLSFTLLAGLLVQVSKVPSSISQEQSRQDAIYQNLTQLKAAVGELSEKSKLQEIYQELTQLKAAVGELPEKSKLQEIYQELTRLKAAVGELPEKSKLQEIYQELTWLKAAVGELPEKSKMQEIYQELTRLKAAVGELPEKSKQQEIYQELTRLKAAVGELPEKSKQQEIYQELTRLKAAVGELPEKSKQQEIYQELTQLKAAVERLCHPCPWEWTFFQGNCYFMSNSQRNWHDSITACKEVGAQLVVIKSAEEQSSRSNRFTWMGLSDLNQEGTWQWVDGSPLLPSFKQYWNRGEPNNVGEEDCAEFSGNGWNDDKCNLAKFWICKKSAASCSRDEEQFLSPAPATPNPPPA

SEQ ID NO: 56417 - protein, 168 aa, Artificial Sequence
  derived and/or modified sequence
MSDSKEPRLQQLGLLEEEQLRGLGFRQTRGYKSLAGCLGHGPLVLQLLSFTLLAGLLVQVSKVPSSISQEQSRSNRFTWMGLSDLNQEGTWQWVDGSPLLPSFKQYWNRGEPNNVGEEDCAEFSGNGWNDDKCNLAKFWICKKSAASCSRDEEQFLSPAPATPNPPPA

SEQ ID NO: 56418 - protein, 284 aa, Artificial Sequence
  derived and/or modified sequence
MSDSKEPRLQQLGLLGCLGHGPLVLQLLSFTLLAGLLVQVLGPVSKVPSSISQEQSRQDAIYQNLTQLKAAVGELSEKSKLQEIYQELTQLKAAVGELPEKSKLQEIYQELTRLKAAVGELPEKSKLQEIYQELTWLKAAVGELPEKSKMQEIYQELTRLKAAVGELPEKSKQQEIYQELTRLKAAVGELPEKSKQQEIYQELTRLKAAVGELPEKSKQQEIYQELTQLKAAVERLCHPCPWEWTFFQGNCYFMSNSQRNWHDSITACKEVGAQLVVIKSAEEQ

SEQ ID NO: 56419 - DNA, 1197 bp, Artificial Sequence
  derived and/or modified sequence
atgtcggactctaaagagcctcgtctgcaacaattgggactgctggaggaagagcagctgcgaggccttggatttcggcagaccagaggctataagagtctggctggctgtctaggtcacggccctctggtattgcagctgttgtcttttacgctcctggctggcctgctcgtccaggtaagcaaggtgccctcttctatctcccaggagcagagccgccaggacgctatttatcagaatctgacgcaacttaaggctgctgtaggggaactgtctgagaaatcaaagttgcaagagatttaccaggagctgactcagttgaaggccgccgtcggggagctccccgagaagtcaaagctgcaggagatttatcaggaacttacccggctcaaagctgccgttggcgaactgcccgaaaaaagtaagctgcaggaaatatatcaggaactgacttggctcaaggcagccgtcggcgaattacctgaaaagtctaagatgcaagaaatctatcaggagctgacccgtttgaaagccgccgtgggtgaactgccagaaaagtcaaaacaacaggagatttatcaggaactcaccaggctcaaagctgccgtcggggagttgcccgaaaagtctaagcaacaggaaatttaccaggagctgacgcgcctgaaggcagctgtcggcgaactgcccgagaagagcaaacagcaggaaatctatcaggaactaacacagctcaaggctgcggtggagcgcttgtgccatccttgcccctgggagtggacattcttccagggcaattgctactttatgtccaatagccagcgtaactggcacgactccattactgcctgtaaagaagttggcgcgcagctggtggtgattaaatctgctgaggaacagagctcacgaagcaacaggttcacctggatgggactgagcgacttgaatcaagaaggaacctggcagtgggtcgatggaagccctctgctcccatccttcaagcagtattggaatagaggtgaacccaacaacgtcggggaagaagattgtgccgaattttccggaaacggctggaacgatgataagtgtaacttagccaagttctggatttgtaagaagtctgccgcctcctgctcacgcgatgaggaacaatttctctcccctgccccagccaccccgaaccctccccccgcttag

SEQ ID NO: 56420 - DNA, 855 bp, Artificial Sequence
  derived and/or modified sequence
atgagtgattccaaagagccacggctgcagcagttggggttactggggtgcctaggccatggccccctggtgctccaactcctgtccttcacgctgttagcgggcctgttagtgcaggtcctgggccccgtaagtaaggtcccatcatcgatcagccaggaacagagtagacaggacgcaatctaccagaacctgacacagctcaaggctgcagttggggaactgtccgagaagtccaaattgcaggagatctatcaggagctcactcagctcaaggctgccgtcggcgagctgccagaaaaatctaagcttcaggagatttatcaggaactgactcgtctaaaagccgcggttggcgaactgcccgaaaaaagcaagctgcaggagatataccaggaactgacgtggctgaaggcggccgtcggcgagctgcctgagaaaagtaaaatgcaggagatttaccaggagctgaccagactgaaggccgctgtcggggaattaccagaaaaaagcaagcagcaggagatttaccaggaacttacgcgactgaaggcagccgtgggcgagctcccagaaaagagcaagcagcaggaaatataccaggagctgactcggctaaaggccgctgtgggcgaacttcctgagaaatcaaaacagcaggagatctatcaggagctgactcaactcaaggccgccgtagaaaggctgtgtcacccatgtccctgggaatggacattttttcagggtaactgttattttatgagtaactcccagcgcaattggcacgattccatcactgcttgtaaggaggtgggggcacagctagtggttattaaatctgcagaggagcagtag

SEQ ID NO: 56421 - DNA, 1197 bp, Artificial Sequence
  derived and/or modified sequence
atgtctgacagcaaggagccccggctgcagcagctgggcctgctggaggaggagcagctgcggggcctgggcttccggcagacccggggctacaagagcctggccggctgcctgggccacggccccctggtgctgcagctgctgtccttcaccctgctggccggcctgctggtgcaggtgtccaaggtgcccagcagcatcagccaggagcagagccggcaggatgccatctaccagaacctgacccagctgaaggctgctgtgggggagctgtctgagaagagcaagctgcaggagatctaccaggagctgacccagctgaaggctgctgtgggggagctgcctgagaagagcaagctgcaggagatctaccaggagctgacccggctgaaggctgctgtgggggagctgcctgagaagagcaagctgcaggagatctaccaggagctgacctggctgaaggctgctgtgggggagctgcctgagaagagcaagatgcaggagatctaccaggagctgacccggctgaaggctgctgtgggggagctgcctgagaagagcaagcagcaggagatctaccaggagctgacccggctgaaggctgctgtgggggagctgcctgagaagagcaagcagcaggagatctaccaggagctgacccggctgaaggctgctgtgggggagctgcctgagaagagcaagcagcaggagatctaccaggagctgacccagctgaaggctgctgtggagcggctgtgccacccctgcccctgggagtggaccttcttccagggcaactgctacttcatgagcaacagccagaggaactggcatgacagcatcacagcctgcaaggaggtgggcgcccagctggtggtgatcaagtctgctgaggagcagagcagccgcagcaaccgcttcacctggatgggcctgagtgacctgaaccaggagggcacctggcagtgggtggatggcagccccctgctgcccagcttcaagcagtactggaacagaggagagcccaacaacgtgggggaggaggactgtgccgagttctctggaaatggctggaatgatgacaagtgcaacctggccaagttctggatctgcaagaagtctgctgccagctgcagcagagatgaggagcagttcctgagccctgccccagccacccccaaccccccaccagcctag

SEQ ID NO: 56422 - DNA, 855 bp, Artificial Sequence
  derived and/or modified sequence
atgtctgacagcaaggagccccggctgcagcagctgggcctgctgggctgcctgggccacggccccctggtgctgcagctgctgtccttcaccctgctggccggcctgctggtgcaggtgctgggccctgtgtccaaggtgcccagcagcatcagccaggagcagagccggcaggatgccatctaccagaacctgacccagctgaaggctgctgtgggggagctgtctgagaagagcaagctgcaggagatctaccaggagctgacccagctgaaggctgctgtgggggagctgcctgagaagagcaagctgcaggagatctaccaggagctgacccggctgaaggctgctgtgggggagctgcctgagaagagcaagctgcaggagatctaccaggagctgacctggctgaaggctgctgtgggggagctgcctgagaagagcaagatgcaggagatctaccaggagctgacccggctgaaggctgctgtgggggagctgcctgagaagagcaagcagcaggagatctaccaggagctgacccggctgaaggctgctgtgggggagctgcctgagaagagcaagcagcaggagatctaccaggagctgacccggctgaaggctgctgtgggggagctgcctgagaagagcaagcagcaggagatctaccaggagctgacccagctgaaggctgctgtggagcggctgtgccacccctgcccctgggagtggaccttcttccagggcaactgctacttcatgagcaacagccagaggaactggcatgacagcatcacagcctgcaaggaggtgggcgcccagctggtggtgatcaagtctgctgaggagcagtag

SEQ ID NO: 56423 - DNA, 1197 bp, Artificial Sequence
  derived and/or modified sequence
atgagcgacagcaaggagccccggctgcagcagctgggcctgctggaagaggaacagctcagaggcttggggtttcggcaaacgcgtggatacaaaagcctggcggggtgtctgggacatggccccctggttctgcaactgctgagctttacactccttgcaggactccttgttcaggtcagcaaggtcccaagctccatttcccaggaacagagcagacaggatgcaatatatcagaatcttacacagttgaaggcagctgtaggtgagttgagtgagaagagcaagctgcaggaaatttatcaggagctaactcagttgaaggcagccgtaggtgaactccctgaaaaatcgaagctgcaagagatctaccaggaactgacccggcttaaggctgccgtgggcgaattgcccgagaaatctaagctgcaggaaatttatcaagagctcacatggctcaaagccgctgtgggagaactcccagaaaagagcaagatgcaagagatataccaggagctcacacggttgaaggcagccgttggagagcttcctgagaagtccaagcaacaggaaatctaccaagagcttaccaggcttaaggccgccgtgggcgaactccccgagaaatccaaacagcaggaaatctaccaggaacttaccaggctgaaagccgctgttggagagcttccggaaaagagcaaacagcaggagatttaccaggaacttacccagctaaaggctgctgttgaaaggttatgtcacccatgtccttgggagtggacatttttccaggggaactgttattttatgtctaactcacaaaggaattggcacgactcgattacagcatgcaaagaagtcggggcccaattggtagtgattaaatccgccgaggagcagtcctccaggtctaatcggttcacctggatgggacttagcgacctgaaccaggagggcacatggcaatgggtggatggatcaccattactgccaagttttaagcagtattggaataggggtgaacccaacaacgtgggggaggaagattgcgccgagttttctggtaatggctggaatgacgataaatgcaatttagccaagttttggatctgcaaaaaaagcgctgcatcttgctctcgagatgaagaacagttcctctccccagcaccggccactcccaatcctccccccgcttag

SEQ ID NO: 56424 - DNA, 855 bp, Artificial Sequence
  derived and/or modified sequence
atgagcgacagcaaggagccccggctgcagcagctgggcctgctgggatgtctggggcacggcccgttggtccttcagctgctgtcctttactcttctggcaggcctgctggtgcaagtcctcggaccagtttcgaaagtgcccagctctatatcacaggagcagtcccgtcaggatgctatctaccagaaccttacgcagcttaaggccgccgtaggggagctgagcgagaaatcgaagttgcaggaaatttatcaggagctcacccaactaaaggcggccgtcggagagctccccgaaaaaagtaaacttcaagagatttaccaagagctcacccggctgaaggctgccgtcggcgagcttcccgaaaagagtaaactgcaagagatctatcaagaactcacctggctgaaggccgcggtcggcgagctgcccgagaagagtaaaatgcaagagatctatcaggagctcacccgcctgaaggccgccgtaggtgagctgccagagaagtccaaacaacaggagatttaccaggagctgacaaggctgaaagctgctgttggagaactgcctgaaaagtccaagcagcaggagatttaccaggagttgacgaggctcaaggctgcggtgggagagctccccgagaagtctaaacagcaggagatctaccaggaattaactcagttgaaagctgctgtggagcgtctctgtcatccttgtccatgggagtggacgttttttcaggggaattgctacttcatgagtaacagccaacgcaactggcatgattctatcaccgcttgcaaggaggtgggggctcagttagttgtcatcaagtctgcagaagagcaatag

SEQ ID NO: 56425 - DNA, 1197 bp, Artificial Sequence
  derived and/or modified sequence
atgtccgacagcaaagagccaagactgcaacaacttgggctgctcgaagaagagcagctgcgcggtctgggattcagacagacgaggggttacaagtcacttgccggatgcctgggacacggtcccctagtgttacaattattgtccttcacccttctcgcaggcctgcttgtccaggtgtctaaggttccttctagcatctcacaggaacagtcacgacaggacgctatctaccagaatctgacccagttgaaagctgcagtcggagaactttccgagaaaagcaaactgcaggagatataccaagagctgactcaattaaaagccgcagtgggagagctgccagaaaaaagcaagctccaggaaatataccaggagcttacaagactgaaggccgcagtgggagaactacccgaaaagagtaagcttcaggagatataccaagaacttacgtggttgaaggctgctgttggagagctcccagagaagagcaagatgcaggagatttatcaggagctgactaggttgaaagctgcagtgggagaattacccgagaagtcaaaacaacaggaaatctatcaggagctgacccggctaaaagccgcagtgggtgagctgcctgaaaagtctaagcagcaagagatttaccaggagttgaccaggctcaaggccgctgtgggggagctgccagagaaaagtaaacagcaggaaatatatcaggagctcacccaactgaaagctgctgtcgagcggctttgccacccatgcccctgggaatggacattctttcaaggaaactgctactttatgagcaactcccaacgcaattggcacgatagcataacggcttgtaaagaggttggagcccaactcgttgtgatcaagtcggccgaggaacagtctagtcggtctaatagattcacatggatgggtctgtccgacctgaatcaggagggcacctggcagtgggtcgacggctcaccactgcttccttcattcaaacagtattggaatcgcggtgagccaaacaatgttggagaggaagactgtgcagaattcagcgggaacggatggaacgacgataaatgtaacctggctaaattctggatttgcaaaaagtcagcggcttcgtgctcgagggatgaagagcagttcctgtcccctgccccagccaccccaaatcccccacctgcttag

SEQ ID NO: 56426 - DNA, 855 bp, Artificial Sequence
  derived and/or modified sequence
atgtctgactctaaagagccgaggctccaacaactgggtctacttgggtgcctaggtcacggccctctggtgttgcaactgctctcatttactctgcttgccggtctcttggtacaggtgctcggacccgtgtcaaaggtgccgtcaagtatttcgcaagaacagagccgccaggacgccatttaccaaaacctgacccagctgaaggcggcagtgggcgagctttcagagaagtccaaacttcaggagatctatcaggaacttacgcaacttaaggcagccgtgggcgagctacccgaaaagtcaaagttacaggagatctaccaggaactgacacgcctaaaggccgcagtcggtgaactgcctgaaaaatccaagctccaagagatctaccaggaactgacttggctgaaggctgccgtcggcgaactgcccgagaaaagtaaaatgcaagagatctaccaagagctgactaggctgaaggctgccgtaggagagcttcccgagaaaagcaaacagcaggagatctatcaggagcttaccaggctgaaagctgctgttggtgaattgccggagaagtctaagcagcaggagatttatcaggagcttacacgccttaaagctgctgtcggagagctgccagagaagtccaagcagcaggagatctatcaggagttaactcagttgaaagctgctgtggagaggctatgccatccctgcccatgggaatggacattttttcaggggaactgttacttcatgagtaacagccaaagaaattggcacgattccattacggcttgcaaggaggtcggcgcacagttggtggtgatcaaatcagctgaagaacagtag

SEQ ID NO: 56427 - DNA, 4310 bp, Artificial Sequence
  derived and/or modified sequence
atcacagggtgggaaataaaagctgtggcccccaggagttctggacactgggggagagtggggtgacatgagtgactccaaggaaccaagactgcagcagctgggcctcctggaggaggaacagctgagaggccttggattccgacagactcgaggatacaagagcttagcagggtgtcttggccatggtcccctggtgctgcaactcctctccttcacgctcttggctgggctccttgtccaagtgtccaaggtccccagctccataagtcaggaacaatccaggcaagacgcgatctaccagaacctgacccagcttaaagctgcagtgggtgagctctcagagaaatccaagctgcaggagatctaccaggagctgacccagctgaaggctgcagtgggtgagcttccagagaaatctaagctgcaggagatctaccaggagctgacccggctgaaggctgcagtgggtgagcttccagagaaatctaagctgcaggagatctaccaggagctgacctggctgaaggctgcagtgggtgagcttccagagaaatctaagatgcaggagatctaccaggagctgactcggctgaaggctgcagtgggtgagcttccagagaaatctaagcagcaggagatctaccaggagctgacccggctgaaggctgcagtgggtgagcttccagagaaatctaagcagcaggagatctaccaggagctgacccggctgaaggctgcagtgggtgagcttccagagaaatctaagcagcaggagatctaccaggagctgacccagctgaaggctgcagtggaacgcctgtgccacccctgtccctgggaatggacattcttccaaggaaactgttacttcatgtctaactcccagcggaactggcacgactccatcaccgcctgcaaagaagtgggggcccagctcgtcgtaatcaaaagtgctgaggagcagtcttccagaagtaaccgcttcacctggatgggactttcagatctaaatcaggaaggcacgtggcaatgggtggacggctcacctctgttgcccagcttcaagcagtattggaacagaggagagcccaacaacgttggggaggaagactgcgcggaatttagtggcaatggctggaacgacgacaaatgtaatcttgccaaattctggatctgcaaaaagtccgcagcctcctgctccagggatgaagaacagtttctttctccagcccctgccaccccaaacccccctcctgcgtagcagaacttcacccccttttaagctacagttccttctctccatccttcgaccttcacaaaatctctgggactgttctttgtcagattcttcctcctttagaaggctgggtcccattctgtccttcttgtcatgcctccaatttcccctggtgtagagcttgtttttctggcccatccttggagctttatgagtgagctggtgtgggatgcctttgggggtggacttgtgttccaagaatccactctctcttccttttggagattaggatatttgggttgccatgtgtagctgctatgtcccctggggcgttatcttatacatgcaaacctaccatctgttcaacttccacctaccacctcctgcacccctttgatcggggacttactggttgcaagagctcattttgcaggctggaagcaccagggaattaattcccccagtcaaccaatggcacccagagagggcatggaggctccacgcaaccccttccacccccacatcttcctttgtcttatacatggcttccatttggctgtttctaagttgtattctttattttattattattattactatttttcgagatggagtttcactcttgtcgctcaggctggagtgccatggcgcgatcttggctcactgcaacctctgcctcccgggttcaagtgattctcctgcctcagcctcacgagtagctggaattacaggcaggcgccaccagacccggctaattttttgtatttttagtacagatggggtttctccgtgttggtcaggctggtcttgaactcccgacctcagatgatctgcccgcctcggcctcccaaaattgctgggattacaggtgtgagccaccgcgcctggcctattattttttgtaagaataaaacaggtttattgggatttgggactctgaacagttctgtctctactacctgatctcctcctaccacgactttgggatctagaggagctttggctccggctgtgacggctccggccgttctcactgcggctgcaccggcccccgctgcggtcactatttcttcctctgctaggtgaattgtgcctctcctggctctttgacatgtgctagtgagatttcttccttttcctttcggattccccatttcttttgtaggaatggtctggactagggttctccttccccgcagcctgtagtattcatcgtggtggcccaccctctctctccccttggagctcttgccaaaggaggagacaagcagaggtctctattggatttctcaacacctgaagaaagttgcagtgttttcctcttggacattgttgtatttcaaataaaccacaaatcatcattttccaccgagccactgggcagaattcacactgaagctgtcgtcctgcgtacataccatcgtccgttaaacagagaaagagctgcttggcattcttcttccgactggtactgaacatatatacttgcccctcaggtgaggttccaagttgcaactgaccttgaactgaatcactctccccacgttattttttaattactatttttttttaaagatggggtcttgctctgtcgccaggctggagtgcagtggcgcgatctaggctcactgcaacttccgcctcccgggttcaagcgattctcctgcctcagcctcccgagtagctgggactccactaaaagtacaaaaattagctgggcgtgcaccactgcgcccagctaattcttgtatttttggtagagacggggtttcaacatgttgaccaggatggtctcgatctcttgacctcgtgattcgcccgccgcgtcctcccaaagtgctgggattacaggcctgagccaccgcgcccagtctctccccacgttcttgaactcgggcagcacatcctcacagaaatctaggaactgttggtaggtttcttcctcgctgtactccaggcttgcttcggagtcatagtcatccctcctgcactgctcctttccaaacactgtaaacatgcttttaataagaagggtaggactggatgttgggaaatcatgtgaacatctatctccaaatctgcaagctcctgttttactgtagaagggacaattaactccatccttctccatgactctgaaatccaagggggggttccgggttttgccatgtggcgccattttccaactcattttcagcctgatccagcatcttctggacagcttccggtttttgtttcttctgtcgtttctgttcctcctcctctctctctttcctctgctgttcttcccattgttcctttaactttcgctcttgttcttgccgttttctagccacctcttccttttccttctttattctgaattcttcttgtgccttctgctctctcagcaaccactcctcatgtaatctttgcctctctcttccccatagcttttctagttgttgtttttcaataaaagtgtcctcctctttctgtgagagtcctgagtccctcagtggagcaagttcctgctggcgtttctttcgtttctccttcttcagggcggccctgtactttttgtggcttggtttctctggaaatgtcaccttttcgggcgcagccatcttgccggcaccgccccgcccctctagttgtatcctttataataaactggtaaacattgtaaccgcagattcagcccaatctggttcaactttgtgtaataaaatggcgagttgtttttcagttgtcgtggacccccaggttgcaagttacataccctgggcatgtccagatgaacgaagcgtgcaaatccacgtggaacctaagtgctcagaccgaggaacagggactgagttaagaagtggacaccacgtggcatgatccttgatccaatcagattgagccctggcgtgatccagtcagatcaagcctcctgaatcccctcattacaagatccaatcatatcatgcctcactaccctctgtatataaaatctgccccagcctccaacttggagagacagatttgggccagactcctgtgtccttgcttggctgccttgcaataaatttttctctctacaaaa

SEQ ID NO: 56428 - DNA, 1197 bp, Artificial Sequence
  derived and/or modified sequence
atgagcgacagcaaggagcccagactgcagcagctgggcctgctggaggaggagcagctgagaggcctgggcttcagacagaccagaggctacaagagcctggccggctgcctgggccacggccccctggtgctgcagctgctgagcttcaccctgctggccggcctgctggtgcaggtgagcaaggtgcccagcagcatcagccaggagcagagcagacaggacgccatctaccagaacctgacccagctgaaggccgccgtgggcgagctgagcgagaagagcaagctgcaggagatctaccaggagctgacccagctgaaggccgccgtgggcgagctgcccgagaagagcaagctgcaggagatctaccaggagctgaccagactgaaggccgccgtgggcgagctgcccgagaagagcaagctgcaggagatctaccaggagctgacctggctgaaggccgccgtgggcgagctgcccgagaagagcaagatgcaggagatctaccaggagctgaccagactgaaggccgccgtgggcgagctgcccgagaagagcaagcagcaggagatctaccaggagctgaccagactgaaggccgccgtgggcgagctgcccgagaagagcaagcagcaggagatctaccaggagctgaccagactgaaggccgccgtgggcgagctgcccgagaagagcaagcagcaggagatctaccaggagctgacccagctgaaggccgccgtggagagactgtgccacccctgcccctgggagtggaccttcttccagggcaactgctacttcatgagcaacagccagagaaactggcacgacagcatcaccgcctgcaaggaggtgggcgcccagctggtggtgatcaagagcgccgaggagcagagcagcagaagcaacagattcacctggatgggcctgagcgacctgaaccaggagggcacctggcagtgggtggacggcagccccctgctgcccagcttcaagcagtactggaacagaggcgagcccaacaacgtgggcgaggaggactgcgccgagttcagcggcaacggctggaacgacgacaagtgcaacctggccaagttctggatctgcaagaagagcgccgccagctgcagcagagacgaggagcagttcctgagccccgcccccgccacccccaaccccccccccgcctag

SEQ ID NO: 56429 - DNA, 855 bp, Artificial Sequence
  derived and/or modified sequence
atgagcgacagcaaggagcccagactgcagcagctgggcctgctgggctgcctgggccacggccccctggtgctgcagctgctgagcttcaccctgctggccggcctgctggtgcaggtgctgggccccgtgagcaaggtgcccagcagcatcagccaggagcagagcagacaggacgccatctaccagaacctgacccagctgaaggccgccgtgggcgagctgagcgagaagagcaagctgcaggagatctaccaggagctgacccagctgaaggccgccgtgggcgagctgcccgagaagagcaagctgcaggagatctaccaggagctgaccagactgaaggccgccgtgggcgagctgcccgagaagagcaagctgcaggagatctaccaggagctgacctggctgaaggccgccgtgggcgagctgcccgagaagagcaagatgcaggagatctaccaggagctgaccagactgaaggccgccgtgggcgagctgcccgagaagagcaagcagcaggagatctaccaggagctgaccagactgaaggccgccgtgggcgagctgcccgagaagagcaagcagcaggagatctaccaggagctgaccagactgaaggccgccgtgggcgagctgcccgagaagagcaagcagcaggagatctaccaggagctgacccagctgaaggccgccgtggagagactgtgccacccctgcccctgggagtggaccttcttccagggcaactgctacttcatgagcaacagccagagaaactggcacgacagcatcaccgcctgcaaggaggtgggcgcccagctggtggtgatcaagagcgccgaggagcagtag

SEQ ID NO: 56430 - DNA, 507 bp, Artificial Sequence
  derived and/or modified sequence
atgtctgatagcaaggagccgcgcctgcaacagttaggtctgcttgaagaggaacagctgcgagggctaggcttccggcagacccggggatataagtctctcgctggatgcctaggacatggtccgttggtcttgcagttgctatcatttactctccttgctggattgctggtgcaagtctcaaaagtgccctctagcattagccaggaacaatctcgatcaaatcggtttacctggatgggcctctcagatctgaatcaggagggaacttggcagtgggtcgacggctcccccttactcccctcattcaagcaatactggaataggggcgagccaaacaatgtcggtgaggaagactgcgcagagttctccggtaatggatggaacgatgataaatgcaatcttgctaaattctggatatgtaaaaagagcgcagccagttgttctagagatgaagagcagttcctctcccctgccccagcaactccaaaccccccgcccgcttag

SEQ ID NO: 56431 - DNA, 507 bp, Artificial Sequence
  derived and/or modified sequence
atgtctgacagcaaggagccccggctgcagcagctgggcctgctggaggaggagcagctgcggggcctgggcttccggcagacccggggctacaagagcctggccggctgcctgggccacggccccctggtgctgcagctgctgtccttcaccctgctggccggcctgctggtgcaggtgtccaaggtgcccagcagcatcagccaggagcagagccgcagcaaccgcttcacctggatgggcctgagtgacctgaaccaggagggcacctggcagtgggtggatggcagccccctgctgcccagcttcaagcagtactggaacagaggagagcccaacaacgtgggggaggaggactgtgccgagttctctggaaatggctggaatgatgacaagtgcaacctggccaagttctggatctgcaagaagtctgctgccagctgcagcagagatgaggagcagttcctgagccctgccccagccacccccaaccccccaccagcctag

SEQ ID NO: 56432 - DNA, 507 bp, Artificial Sequence
  derived and/or modified sequence
atgagcgacagcaaggagccccggctgcagcagctgggcctgctggaagaggaacaactgagggggcttggctttaggcagacacgcggctataagagtctagcagggtgcctgggtcacggacccctggttctgcaactgctgtcatttaccctcctggccggactgctggtgcaggtctcaaaggttcctagctcgattagccaggagcaatcacgtagcaataggtttacttggatgggactaagcgatctcaatcaggagggcacttggcagtgggtcgacggttcccccttgctgccttcattcaaacagtactggaaccggggcgaaccaaacaacgtcggggaagaggactgcgccgaatttagcggtaatgggtggaatgacgacaagtgtaaccttgctaaattttggatctgcaagaagtcagccgcgtcatgctcgcgagatgaggagcagtttctaagcccagcccctgccacccccaacccacctcccgcctag

SEQ ID NO: 56433 - DNA, 507 bp, Artificial Sequence
  derived and/or modified sequence
atgagtgattcaaaggaacctcgactgcaacagctggggctgctggaagaagaacagctccgaggtttaggattcagacagacccgtgggtacaagtctctggcaggttgcttgggccacggccctctggtactccagctgttatctttcacacttcttgccggtctgcttgttcaggtatcaaaagttcctagctccatctcacaggagcagtctagatccaaccgattcacttggatgggcctaagcgatttaaaccaggaagggacctggcagtgggtggatggatcacctctgcttccgtcctttaagcaatactggaatcgtggagagcccaataatgtgggagaggaggactgcgccgaatttagtggcaatgggtggaacgatgataagtgcaatttagctaaattttggatctgcaagaagtccgctgctagttgttccagggatgaggaacaattcttgtcgcccgcacccgctacacctaatccccctcccgcatag

SEQ ID NO: 56434 - DNA, 507 bp, Artificial Sequence
  derived and/or modified sequence
atgagcgacagcaaggagcccagactgcagcagctgggcctgctggaggaggagcagctgagaggcctgggcttcagacagaccagaggctacaagagcctggccggctgcctgggccacggccccctggtgctgcagctgctgagcttcaccctgctggccggcctgctggtgcaggtgagcaaggtgcccagcagcatcagccaggagcagagcagaagcaacagattcacctggatgggcctgagcgacctgaaccaggagggcacctggcagtgggtggacggcagccccctgctgcccagcttcaagcagtactggaacagaggcgagcccaacaacgtgggcgaggaggactgcgccgagttcagcggcaacggctggaacgacgacaagtgcaacctggccaagttctggatctgcaagaagagcgccgccagctgcagcagagacgaggagcagttcctgagccccgcccccgccacccccaaccccccccccgcctag

SEQ ID NO: 56435 - protein, 348 aa, Artificial Sequence
  derived and/or modified sequence
MSDSKEPRVQQLGLLGCLGHGALVLQLLSFMLLAGVLVAILVQVSKVPSSLSQEQSEQDAIYQNLTQLKAAVGELSEKSKLQEIYQELTQLKAAVGELPEKSKLQEIYQELTRLKAAVGELPEKSKLQEIYQELTRLKAAVGELPEKSKLQEIYQELTELKAAVGELPEKSKLQEIYQELTQLKAAVGELPDQSKQQQIYQELTDLKTAFERLCRHCPKDWTFFQGNCYFMSNSQRNWHDSVTACQEVRAQLVVIKTAEEQNFLQLQTSRSNRFSWMGLSDLNQEGTWQWVDGSPLSPSFQRYWNSGEPNNSGNEDCAEFSGSGWNDNRCDVDNYWICKKPAACFRDE

SEQ ID NO: 56436 - DNA, 1047 bp, Artificial Sequence
  derived and/or modified sequence
atgtcagattccaaggagcccagagtgcaacagctgggattactgggttgcctgggtcatggagcactggttctccaactcttgagctttatgctgctggccggtgttctggttgctattctcgtgcaagtgagcaaggttccaagctccctgtcccaggagcagtctgagcaagacgcaatttaccaaaacctcacccagctaaaagccgccgtcggagagctttcagaaaaaagtaaactccaggaaatctaccaggaactaacgcaactcaaagctgcagtgggggagcttccagaaaagagtaaattacaggaaatttatcaggagttaacgcgactgaaagcagcagtcggagagcttcccgagaagagcaagttgcaggaaatttaccaggagctaaccagacttaaagccgctgtcggagagctgcctgaaaaatccaagttacaggaaatctatcaggaactgacagaattgaaagccgccgtgggggagctgcctgagaagtctaaactgcaggaaatctatcaggaactgacacagctaaaagcagctgtgggagagttgcctgatcaatctaaacagcagcagatctaccaggaactcactgatctgaaaactgccttcgagaggctgtgtcggcattgtccaaaagactggacttttttccaaggaaattgttatttcatgagcaatagccagcgcaactggcacgacagcgttaccgcctgtcaagaggtgagggcccagctggtggtcatcaaaacagccgaggagcaaaacttcctacagctacagacttccaggagtaatcggtttagttggatgggcctcagcgatttaaatcaggagggcacctggcagtgggttgacggtagccctctaagcccgtcttttcagcgctattggaatagtggtgaaccaaataactcaggtaacgaggattgcgctgaatttagtggctccgggtggaatgacaacagatgtgatgtagataactactggatctgcaagaagccagctgcgtgtttccgggatgagtag

SEQ ID NO: 56437 - DNA, 1047 bp, Artificial Sequence
  derived and/or modified sequence
atgtctgacagcaaggagccccgggtgcagcagctgggcctgctgggctgcctgggccacggggccctggtgctgcagctgctgtccttcatgctgctggccggcgtgctggtggccatcctggtgcaggtgtccaaggtgcccagcagcctgagccaggagcagagcgagcaggatgccatctaccagaacctgacccagctgaaggctgctgtgggggagctgtctgagaagagcaagctgcaggagatctaccaggagctgacccagctgaaggctgctgtgggggagctgcctgagaagagcaagctgcaggagatctaccaggagctgacccggctgaaggctgctgtgggggagctgcctgagaagagcaagctgcaggagatctaccaggagctgacccggctgaaggctgctgtgggggagctgcctgagaagagcaagctgcaggagatctaccaggagctgacagagctgaaggctgctgtgggggagctgcctgagaagagcaagctgcaggagatctaccaggagctgacccagctgaaggctgctgtgggggagctgcctgaccagagcaagcagcagcagatctaccaggagctgacagacctgaagacagcctttgagcggctgtgccgccactgccccaaggactggaccttcttccagggcaactgctacttcatgagcaacagccagaggaactggcatgattctgtgacagcctgccaggaggtgcgggcccagctggtggtgatcaagacagctgaggagcagaacttcctgcagctgcagaccagccgcagcaaccgcttctcctggatgggcctgagtgacctgaaccaggagggcacctggcagtgggtggatggcagccccctgagccccagcttccagcgctactggaacagcggggagcccaacaacagcggaaatgaagactgtgccgagttcagcggcagcggctggaatgacaacagatgtgatgtggacaactactggatctgcaagaagccagctgcctgcttcagagatgaatag

SEQ ID NO: 56438 - DNA, 1047 bp, Artificial Sequence
  derived and/or modified sequence
atgagcgacagcaaggagccccgggtgcagcagctgggcctgctgggatgcctgggccacggcgccctagtactgcaacttctaagtttcatgctcctcgccggcgtattggtcgccattctcgtgcaagtgtccaaagtgccatccagcctgtcccaggaacagagcgagcaggatgccatttaccagaatctcacacagttgaaggcagctgtgggtgaactgtcagagaagagcaaactgcaggaaatatatcaggaactgacccagctgaaagcggccgtcggagagctcccagagaaaagcaagctgcaggagatctaccaggagctgacccgcctgaaggctgccgtgggcgaactccctgagaagtccaaactacaggagatttaccaggaattgaccaggctgaaagctgctgtgggcgaactgcctgagaagtcaaagctgcaagagatctatcaggagcttaccgaactgaaagccgccgtgggtgagctgcccgagaagtcaaagctccaggaaatctaccaggaactgacccaactgaaagcagccgtgggcgagctacccgaccaatccaagcagcagcaaatataccaggagctgacagatctgaagaccgccttcgagcgcctttgcaggcattgcccaaaagactggaccttcttccaaggaaattgctactttatgtcaaatagtcagcgaaattggcacgattccgtcacagcttgccaggaggtacgtgctcagctggtggtcataaaaaccgccgaagaacaaaactttcttcaactgcaaacaagtaggtcaaacagatttagttggatgggactctctgacctcaaccaagaaggcacttggcagtgggtggatgggtctcctttaagcccctccttccaacggtactggaacagcggcgagcctaataacagtggaaacgaggactgcgcagagttctctggcagtgggtggaacgataaccgatgcgacgtagataactactggatctgtaagaaacctgcagcttgcttcagagatgaatag

SEQ ID NO: 56439 - DNA, 1047 bp, Artificial Sequence
  derived and/or modified sequence
atgtccgactctaaggagcctcgcgtccagcagctggggctcctgggatgcctcggccacggtgcattagtgctgcagttgctgagtttcatgctgttggccggagttttagtcgccattctcgtgcaggtttcaaaggtgccgtcaagcctttcacaggagcagagtgagcaggacgcaatttaccagaatcttacgcagttaaaagccgctgttggggaactgagcgagaaaagcaagttacaggagatatatcaggaactaactcagttaaaggccgcagtgggtgaactgccagaaaagtccaagcttcaagaaatttaccaggaactgactcgcctgaaggcagccgtcggggagctgccagaaaaatccaaactccaggagatatatcaggaactgaccagactgaaagccgctgtgggagaactgccagaaaaatcgaagctccaggaaatttaccaagaattgaccgagctgaaggccgcagtcggtgaattgccggagaagtcaaaattgcaggagatctatcaggagctgacgcaactgaaggctgcagtgggagaattgcctgatcaaagcaagcagcagcaaatttaccaggagctgaccgacctgaaaaccgccttcgagagactttgtcgtcactgtcccaaggattggacattcttccaagggaactgttacttcatgagcaatagtcagcgcaattggcatgactctgtaactgcctgccaggaagtccgcgcacagcttgtggtaattaagaccgctgaggagcagaatttcctccagttgcagacatcacggagcaatcggttctcatggatgggactgtccgacctgaatcaagagggtacctggcagtgggtcgatgggtcgcccttatctccaagttttcagcgctactggaacagtggagaacccaacaattctggcaacgaggattgcgccgagttttctggaagtggttggaacgacaatcgttgcgatgttgataattattggatttgtaagaaaccagcagcttgctttagggatgagtag

SEQ ID NO: 56440 - DNA, 1781 bp, Artificial Sequence
  derived and/or modified sequence
acccagcttcctgtttgtcttcctgagagacagtagatttagaaagtgaggatcagagggtggaaaataaaagctgtggtccccaggagtcctgaacatctggggacagcgggaaaacatgagtgactccaaggaaccaagggtgcagcagctgggcctcctggggtgtcttggccatggcgccctggtgctgcaactcctctccttcatgctcttggctggggtcctggtggccatccttgtccaagtgtccaaggtccccagctccctaagtcaggaacaatccgagcaagacgcaatctaccagaacctgacccagcttaaagctgcagtgggtgagctctcagagaaatccaagctgcaggagatctaccaggagctgacccagctgaaggctgcagtgggtgagttgccagagaaatccaagctgcaggagatctaccaggagctgacccggctgaaggctgcagtgggtgagttgccagagaaatccaagctgcaggagatctaccaggagctgacccggctgaaggctgcagtgggtgagttgccagagaaatccaagctgcaggagatctaccaggagctgacggagctgaaggctgcagtgggtgagttgccagagaaatccaagctgcaggagatctaccaggagctgacccagctgaaggctgcagtgggtgagttgccagaccagtccaagcagcagcaaatctatcaagaactgaccgatttgaagactgcatttgaacgcctgtgccgccactgtcccaaggactggacattcttccaaggaaactgttacttcatgtctaactcccagcggaactggcacgactccgtcaccgcctgccaggaagtgagggcccagctcgtcgtaatcaaaactgctgaggagcagaacttcctacagctgcagacttccaggagtaaccgcttctcctggatgggactttcagacctaaatcaggaaggcacgtggcaatgggtggacggctcacctctgtcacccagcttccagcggtactggaacagtggagaacccaacaatagcgggaatgaagactgtgcggaatttagtggcagtggctggaacgacaatcgatgtgacgttgacaattactggatctgcaaaaagcccgcagcctgcttcagagacgaatagttgtttccctgctagcctcagcctccattgtggtatagcagaacttcacccacttgtaagccagcgcttcttctctccatccttggaccttcacaaatgccctgagacggttctctgttcgatttttcatcccctatgaacctgggtcttattctgtccttctgatgcctccaagtttccctggtgtagagcttgtgttcttggcccatccttggagctttataagtgacctgagtgggatgcatttagggggcgggcttggtatgttgtatgaatccactctctgttccttttggagattagactatttggattcatgtgtagctgccctgtcccctggggctttatctcatccatgcaaactaccatctgctcaacttccagctacaccccgtgcacccttttgactggggacttgctggttgaaggagctcatcttgcaggctggaagcaccagggaattaattcccccagtcaaccaatggcatccagagagggcatggaggctccatacaacctcttccacccccacatctttctttgtcctatacatgtcttccatttggctgtttctgagttgtagcctttataataaagtggtaaatgttgtaactgc

SEQ ID NO: 56441 - DNA, 1047 bp, Artificial Sequence
  derived and/or modified sequence
atgagcgacagcaaggagcccagagtgcagcagctgggcctgctgggctgcctgggccacggcgccctggtgctgcagctgctgagcttcatgctgctggccggcgtgctggtggccatcctggtgcaggtgagcaaggtgcccagcagcctgagccaggagcagagcgagcaggacgccatctaccagaacctgacccagctgaaggccgccgtgggcgagctgagcgagaagagcaagctgcaggagatctaccaggagctgacccagctgaaggccgccgtgggcgagctgcccgagaagagcaagctgcaggagatctaccaggagctgaccagactgaaggccgccgtgggcgagctgcccgagaagagcaagctgcaggagatctaccaggagctgaccagactgaaggccgccgtgggcgagctgcccgagaagagcaagctgcaggagatctaccaggagctgaccgagctgaaggccgccgtgggcgagctgcccgagaagagcaagctgcaggagatctaccaggagctgacccagctgaaggccgccgtgggcgagctgcccgaccagagcaagcagcagcagatctaccaggagctgaccgacctgaagaccgccttcgagagactgtgcagacactgccccaaggactggaccttcttccagggcaactgctacttcatgagcaacagccagagaaactggcacgacagcgtgaccgcctgccaggaggtgagagcccagctggtggtgatcaagaccgccgaggagcagaacttcctgcagctgcagaccagcagaagcaacagattcagctggatgggcctgagcgacctgaaccaggagggcacctggcagtgggtggacggcagccccctgagccccagcttccagagatactggaacagcggcgagcccaacaacagcggcaacgaggactgcgccgagttcagcggcagcggctggaacgacaacagatgcgacgtggacaactactggatctgcaagaagcccgccgcctgcttcagagacgagtag

SEQ ID NO: 56442 - protein, 332 aa, Artificial Sequence
  derived and/or modified sequence
MSDSKEPRVQQLGLLEEDPTTSGIRLFPRDFQFQQIHGHKSSTVPFLLGPVSKVPSSLSQEQSEQDAIYQNLTQLKAAVGELSEKSKLQEIYQELTQLKAAVGELPEKSKLQEIYQELTRLKAAVGELPEKSKLQEIYQELTRLKAAVGELPEKSKLQEIYQELTELKAAVGELPEKSKLQEIYQELTQLKAAVERLCRHCPKDWTFFQGNCYFMSNSQRNWHDSVTACQEVRAQLVVIKTAEEQNFLQLQTSRSNRFSWMGLSDLNQEGTWQWVDGSPLSPSFQRYWNSGEPNNSGNEDCAEFSGSGWNDNRCDVDNYWICKKPAACFRDE

SEQ ID NO: 56443 - DNA, 999 bp, Artificial Sequence
  derived and/or modified sequence
atgagtgattcgaaagagcctcgcgtccagcagctggggctcttagaagaggatccaaccacttctggcattcgtttatttccacgggattttcagtttcagcagattcacggccacaagtcatccaccgtgccattcctgctgggtcctgtgtccaaagttcctagcagtctgtcccaagagcagtcagagcaggacgcaatctaccagaatctgactcaattgaaggcagcagttggggaactgagtgaaaaatctaagttgcaggaaatctaccaggaactcacacaattgaaagctgctgtgggagaattacccgagaagagtaaactccaagagatctatcaggaactgacccgccttaaggcagccgttggtgagctccccgaaaaatccaaactccaggagatttatcaggaactgacgcgcctaaaggcagccgtaggggagctgccagagaaatccaaactgcaggaaatctatcaggagctcacagagctgaaagccgccgtcggagaactgccggagaaaagcaagctgcaggagatataccaggaactgacccaacttaaggccgcggtggaacggttgtgccgtcactgtcccaaggattggacttttttccagggcaactgttacttcatgagcaactcgcagcgaaactggcatgatagcgtcaccgcatgccaggaagtgcgagctcaactcgtggtgatcaaaaccgccgaggaacagaacttcctgcagctccaaaccagcagaagtaataggtttagctggatgggactcagcgatctgaatcaagaagggacttggcagtgggtggatggttctccattaagcccgagcttccaaaggtactggaactccggggagcccaacaactcaggtaacgaagattgcgccgagttttctggttccggctggaacgataatcggtgcgatgtcgacaactactggatctgcaaaaagcccgccgcttgcttccgcgacgaatag

SEQ ID NO: 56444 - DNA, 999 bp, Artificial Sequence
  derived and/or modified sequence
atgtctgacagcaaggagccccgggtgcagcagctgggcctgctggaggaggaccccaccaccagcggcatccgcctcttcccccgggacttccagttccagcagatccacggccacaagagcagcacagtgcccttcctgctgggccctgtgtccaaggtgcccagcagcctgagccaggagcagagcgagcaggatgccatctaccagaacctgacccagctgaaggctgctgtgggggagctgtctgagaagagcaagctgcaggagatctaccaggagctgacccagctgaaggctgctgtgggggagctgcctgagaagagcaagctgcaggagatctaccaggagctgacccggctgaaggctgctgtgggggagctgcctgagaagagcaagctgcaggagatctaccaggagctgacccggctgaaggctgctgtgggggagctgcctgagaagagcaagctgcaggagatctaccaggagctgacagagctgaaggctgctgtgggggagctgcctgagaagagcaagctgcaggagatctaccaggagctgacccagctgaaggctgctgtggagcggctgtgccgccactgccccaaggactggaccttcttccagggcaactgctacttcatgagcaacagccagaggaactggcatgattctgtgacagcctgccaggaggtgcgggcccagctggtggtgatcaagacagctgaggagcagaacttcctgcagctgcagaccagccgcagcaaccgcttctcctggatgggcctgagtgacctgaaccaggagggcacctggcagtgggtggatggcagccccctgagccccagcttccagcgctactggaacagcggggagcccaacaacagcggaaatgaagactgtgccgagttcagcggcagcggctggaatgacaacagatgtgatgtggacaactactggatctgcaagaagccagctgcctgcttcagagatgaatag

SEQ ID NO: 56445 - DNA, 999 bp, Artificial Sequence
  derived and/or modified sequence
atgagcgacagcaaggagccccgggtgcagcagctgggcctgctggaagaagaccccacgacaagtgggatccgcctctttccaagggatttccagtttcagcagatccacgggcataagagctccaccgtgccttttttgctgggacccgtcagtaaagtacctagctccctgtcgcaggagcagagtgagcaggacgccatctaccaaaacctcacgcagctcaaggccgccgtcggcgagctgtccgaaaagtctaagctgcaggagatttatcaggaactgacacagctgaaggcagcggtgggcgaattgcccgaaaagtcaaagcttcaggaaatctaccaggagttaacaaggctgaaggcagctgtaggcgagcttcccgaaaagtcaaagttgcaggagatttaccaggagctgacaagactcaaggccgcagttggagagttgccagaaaagtccaaattgcaggagatctaccaagaactcaccgagttgaaggcagccgtgggtgagttacctgagaaatctaaattgcaagagatctaccaggagctgacccaacttaaagctgcagtggaacgcctctgtcggcactgccctaaggattggaccttcttccaaggaaattgctactttatgtcaaacagtcagcggaactggcacgattccgtgacagcctgccaggaagttcgcgctcagctggtggtcatcaagacagctgaggagcagaatttcctgcagcttcaaacatcccggagtaataggttctcttggatggggctgtctgatcttaaccaagaagggacatggcagtgggtggatggcagcccactgagtccatcattccaaaggtactggaattctggagaacctaacaattctggtaatgaggattgtgcagagtttagcgggtccggatggaacgacaatcggtgtgatgttgacaattactggatctgcaaaaagcctgccgcgtgttttcgcgatgagtag

SEQ ID NO: 56446 - DNA, 999 bp, Artificial Sequence
  derived and/or modified sequence
atgtccgattccaaagaacctcgcgtgcagcagctgggattactcgaagaggacccaactacttccggaatcagactgttccctcgggatttccagttccaacagatccacggacacaagagcagcacagtgccgtttctcttgggccctgtgagcaaggtgccaagctccctgagccaggaacagagcgagcaggatgctatttaccagaatctcactcagctgaaggctgctgtcggtgagttatcagagaagagcaagttgcaggagatctaccaagaactgactcagttgaaagctgccgtcggggagctgccggagaaaagtaagctgcaggaaatctaccaggagttaacaaggctgaaagccgcagtaggcgagctccccgaaaaaagcaagcttcaggagatctaccaggaattgactcgcctcaaagccgctgtcggagagctgcctgaaaagtctaaactgcaggagatttatcaggagctaactgaattgaaagccgcagtgggagagctcccagagaagtccaagctccaagaaatataccaggagcttacccagttgaaagctgccgtggagaggctgtgtaggcactgcccgaaggactggacattcttccagggtaactgctactttatgagtaactctcagcggaactggcacgacagcgtaaccgcctgtcaggaggttcgtgcccaactggtggtgattaagaccgcggaagaacagaattttctgcagcttcagaccagcagatcgaacaggtttagctggatggggcttagtgacttgaaccaggaaggtacatggcagtgggtcgacggatccccgctgagtccctcattccaacgctactggaactccggcgagcccaataattcgggaaacgaggactgtgcagagttcagcggatccgggtggaacgacaatcgttgcgacgtggataactattggatctgtaaaaagccggctgcttgtttccgggacgaatag

SEQ ID NO: 56447 - DNA, 1733 bp, Artificial Sequence
  derived and/or modified sequence
acccagcttcctgtttgtcttcctgagagacagtagatttagaaagtgaggatcagagggtggaaaataaaagctgtggtccccaggagtcctgaacatctggggacagcgggaaaacatgagtgactccaaggaaccaagggtgcagcagctgggcctcctggaagaagatccaacaaccagtggcatcagactttttccaagagactttcaattccagcagatacatggccacaagagctctacagttccttttcttcttggcccagtgtccaaggtccccagctccctaagtcaggaacaatccgagcaagacgcaatctaccagaacctgacccagcttaaagctgcagtgggtgagctctcagagaaatccaagctgcaggagatctaccaggagctgacccagctgaaggctgcagtgggtgagttgccagagaaatccaagctgcaggagatctaccaggagctgacccggctgaaggctgcagtgggtgagttgccagagaaatccaagctgcaggagatctaccaggagctgacccggctgaaggctgcagtgggtgagttgccagagaaatccaagctgcaggagatctaccaggagctgacggagctgaaggctgcagtgggtgagttgccagagaaatccaagctgcaggagatctaccaggagctgacccagctgaaggctgcagtggaacgcctgtgccgccactgtcccaaggactggacattcttccaaggaaactgttacttcatgtctaactcccagcggaactggcacgactccgtcaccgcctgccaggaagtgagggcccagctcgtcgtaatcaaaactgctgaggagcagaacttcctacagctgcagacttccaggagtaaccgcttctcctggatgggactttcagacctaaatcaggaaggcacgtggcaatgggtggacggctcacctctgtcacccagcttccagcggtactggaacagtggagaacccaacaatagcgggaatgaagactgtgcggaatttagtggcagtggctggaacgacaatcgatgtgacgttgacaattactggatctgcaaaaagcccgcagcctgcttcagagacgaatagttgtttccctgctagcctcagcctccattgtggtatagcagaacttcacccacttgtaagccagcgcttcttctctccatccttggaccttcacaaatgccctgagacggttctctgttcgatttttcatcccctatgaacctgggtcttattctgtccttctgatgcctccaagtttccctggtgtagagcttgtgttcttggcccatccttggagctttataagtgacctgagtgggatgcatttagggggcgggcttggtatgttgtatgaatccactctctgttccttttggagattagactatttggattcatgtgtagctgccctgtcccctggggctttatctcatccatgcaaactaccatctgctcaacttccagctacaccccgtgcacccttttgactggggacttgctggttgaaggagctcatcttgcaggctggaagcaccagggaattaattcccccagtcaaccaatggcatccagagagggcatggaggctccatacaacctcttccacccccacatctttctttgtcctatacatgtcttccatttggctgtttctgagttgtagcctttataataaagtggtaaatgttgtaactgc

SEQ ID NO: 56448 - DNA, 999 bp, Artificial Sequence
  derived and/or modified sequence
atgagcgacagcaaggagcccagagtgcagcagctgggcctgctggaggaggaccccaccaccagcggcatcagactgttccccagagacttccagttccagcagatccacggccacaagagcagcaccgtgcccttcctgctgggccccgtgagcaaggtgcccagcagcctgagccaggagcagagcgagcaggacgccatctaccagaacctgacccagctgaaggccgccgtgggcgagctgagcgagaagagcaagctgcaggagatctaccaggagctgacccagctgaaggccgccgtgggcgagctgcccgagaagagcaagctgcaggagatctaccaggagctgaccagactgaaggccgccgtgggcgagctgcccgagaagagcaagctgcaggagatctaccaggagctgaccagactgaaggccgccgtgggcgagctgcccgagaagagcaagctgcaggagatctaccaggagctgaccgagctgaaggccgccgtgggcgagctgcccgagaagagcaagctgcaggagatctaccaggagctgacccagctgaaggccgccgtggagagactgtgcagacactgccccaaggactggaccttcttccagggcaactgctacttcatgagcaacagccagagaaactggcacgacagcgtgaccgcctgccaggaggtgagagcccagctggtggtgatcaagaccgccgaggagcagaacttcctgcagctgcagaccagcagaagcaacagattcagctggatgggcctgagcgacctgaaccaggagggcacctggcagtgggtggacggcagccccctgagccccagcttccagagatactggaacagcggcgagcccaacaacagcggcaacgaggactgcgccgagttcagcggcagcggctggaacgacaacagatgcgacgtggacaactactggatctgcaagaagcccgccgcctgcttcagagacgagtag

SEQ ID NO: 56449 - protein, 377 aa, Artificial Sequence
  derived and/or modified sequence
MSDSKEPRVQQLGLLEEDPTTSGIRLFPRDFQFQQIHGHKSSTGCLGHGALVLQLLSFMLLAGVLVAILVQVSKVPSSLSQEQSEQDAIYQNLTQLKAAVGELSEKSKLQEIYQELTQLKAAVVGELPEKSKLQEIYQELTRLKAAVGELPEKSKLQEIYQELTRLKAAVGELPEKSKLQEIYQELTELKAAVGELPEKSKLQEIYQELTQLKAAVGELPDQSKQQQIYQELTDLKTAFERLCRHCPKDWTFFQGNCYFMSNSQRNWHDSVTACQEVRAQLVVIKTAEEQNFLQLQTSRSNRFSWMGLSDLNQEGTWQWVDGSPLSPSFQRYWNSGEPNNSGNEDCAEFSGSGWNDNRCDVDNYWICKKPAACFRDE

SEQ ID NO: 56450 - DNA, 1134 bp, Artificial Sequence
  derived and/or modified sequence
atgagtgactcaaaagaacccagggtccagcagctaggactcctcgaagaggatcccaccacaagcggcatacggctgttccctcgcgacttccagttccagcagatacatggacataagtccagcacgggctgtctgggccatggcgccctagtgttacagctcttatcgtttatgcttctggcaggtgtcctagtagccattctagttcaggtgtctaaagttccgtcttctctgagccaggaacagtccgaacaggatgctatttatcagaatttgactcagctgaaggcagccgtgggagagctctccgaaaagagtaagctgcaagaaatataccaggagttaacacaacttaaggctgccgtcgtgggggagctcccagagaaaagcaagttacaagaaatttaccaggagcttactcgcctgaaagcagcagtgggtgaactgccagaaaagagtaagctgcaggaaatctaccaggagctgacacgactgaaagcagctgtgggcgagctgcctgagaagtccaaactgcaggaaatctatcaggagctgaccgagctcaaagctgctgtgggggagctgcctgagaaaagcaaattacaggagatctatcaggaactgacacagcttaaagccgccgttggcgaactgcccgaccagagcaaacagcagcagatataccaagagttgacagacctcaagactgctttcgaacgtctctgcagacattgtcctaaagattggacctttttccaggggaactgttactttatgtccaattcccagagaaattggcacgactctgttacagcatgccaagaggtgcgagcccagctcgttgtaattaaaactgccgaggagcaaaacttcttgcagcttcagacatctcggagtaaccgattctcttggatgggactgtcagaccttaaccaggaagggacatggcagtgggtcgacggcagtcctctttcaccctccttccagcggtactggaatagcggcgagccgaacaattcagggaatgaagactgcgccgaatttagcggcagcggatggaacgacaacaggtgtgacgtggataattattggatttgcaagaagcctgcggcatgtttcagagatgaatag

SEQ ID NO: 56451 - DNA, 1134 bp, Artificial Sequence
  derived and/or modified sequence
atgtctgacagcaaggagccccgggtgcagcagctgggcctgctggaggaggaccccaccaccagcggcatccgcctcttcccccgggacttccagttccagcagatccacggccacaagagcagcacaggctgcctgggccacggggccctggtgctgcagctgctgtccttcatgctgctggccggcgtgctggtggccatcctggtgcaggtgtccaaggtgcccagcagcctgagccaggagcagagcgagcaggatgccatctaccagaacctgacccagctgaaggctgctgtgggggagctgtctgagaagagcaagctgcaggagatctaccaggagctgacccagctgaaggctgctgtggtgggggagctgcctgagaagagcaagctgcaggagatctaccaggagctgacccggctgaaggctgctgtgggggagctgcctgagaagagcaagctgcaggagatctaccaggagctgacccggctgaaggctgctgtgggggagctgcctgagaagagcaagctgcaggagatctaccaggagctgacagagctgaaggctgctgtgggggagctgcctgagaagagcaagctgcaggagatctaccaggagctgacccagctgaaggctgctgtgggggagctgcctgaccagagcaagcagcagcagatctaccaggagctgacagacctgaagacagcctttgagcggctgtgccgccactgccccaaggactggaccttcttccagggcaactgctacttcatgagcaacagccagaggaactggcatgacagcgtgacagcctgccaggaggtgcgggcccagctggtggtgatcaagacagctgaggagcagaacttcctgcagctgcagaccagccgcagcaaccgcttctcctggatgggcctgagtgacctgaaccaggagggcacctggcagtgggtggatggcagccccctgagccccagcttccagcgctactggaacagcggggagcccaacaacagcggaaatgaagactgtgccgagttcagcggcagcggctggaatgacaacagatgtgatgtggacaactactggatctgcaagaagccagctgcctgcttcagagatgaatag

SEQ ID NO: 56452 - DNA, 1134 bp, Artificial Sequence
  derived and/or modified sequence
atgagcgacagcaaggagccccgggtgcagcagctgggcctgctggaggaggatcctactacaagcgggataaggctgtttccgagagatttccaattccagcagatccatggccacaaaagcagcacagggtgcctcggccatggggctctagtcctgcaactgctttccttcatgctgctggccggggtgctggtagcgatcctggtgcaggtgagcaaggttccgtctagcctgtcgcaagaacagtctgaacaggacgctatttaccaaaatcttacacagctaaaggctgccgtgggcgagctgtccgagaaatctaaactgcaggagatctaccaagaattaacacaactgaaggccgccgtagtcggtgaactgccagagaagtccaagttgcaggagatttaccaggaactgacgagactgaaggctgctgtgggcgaactacctgagaagtccaaacttcaggagatctatcaggaactgactcgcttaaaggctgcagtcggggagctgcccgagaagtccaaattgcaggaaatctatcaggaactcaccgaactgaaggccgcggtgggagaactcccagagaagagcaagctccaagaaatctatcaggagttgacccaattgaaggcagcagttggtgagctgcctgaccagtccaagcagcagcagatttaccaggagctgacagatctgaagactgctttcgaacgtttatgccggcactgcccaaaggattggaccttctttcagggcaactgctactttatgtccaattctcagcgaaactggcacgactcagttacagcctgtcaggaggtccgagcacaactcgttgtgattaagactgcagaggagcagaacttcctacagctacagacaagtagatcaaatcgcttcagttggatgggcctcagcgacctgaatcaggaaggtacctggcaatgggtagatggatccccattgagcccgagctttcaaagatactggaactctggggagccaaacaattctgggaacgaagactgtgcggagttttccggatctggctggaatgataataggtgcgatgtcgataattattggatctgtaagaagcccgcagcatgctttcgagatgagtag

SEQ ID NO: 56453 - DNA, 1134 bp, Artificial Sequence
  derived and/or modified sequence
atgtccgattctaaagagccaagggtgcagcagctcggcttgctggaggaggatccaactacaagtggtattaggttgttccctcgtgatttccaattccagcagatccacgggcacaaatccagtacaggctgtctcgggcacggcgctttggtactgcagctgcttagttttatgctgctcgccggagtcttggtcgcaatactggtgcaagtatccaaagtgccgagctctctcagccaggagcaatcggaacaggacgccatctatcaaaatttgactcaactgaaggccgctgttggggagctttctgagaagagcaagttacaagagatctaccaggagttaacccaacttaaggccgcagtcgttggcgaattacctgagaaaagcaaactgcaagagatctatcaggaactgacccgactgaaggccgcagtaggcgagttgccagaaaagtctaagctgcaggaaatttatcaggaacttacaaggctgaaagcggctgtgggcgaattgccagagaagtcaaaactccaagaaatttaccaggaactgactgagctcaaagcagctgtcggagagctgccagaaaagtctaaattacaggaaatctatcaggaattgacgcaactcaaggccgctgtcggtgaactcccagaccaaagtaaacagcagcagatctatcaggaattgacagatctgaagactgctttcgagcgtctctgtagacattgtccaaaggactggaccttcttccaggggaactgttacttcatgtccaacagtcagagaaattggcatgactccgtgactgcatgtcaagaagtgagagcccagctggtcgttatcaaaactgccgaggaacaaaattttctgcagctacaaacatcgcgaagtaacagattcagctggatggggctgtcagacctgaaccaggagggtacctggcaatgggtagacggttctcctttgagtccatcatttcagcgctactggaacagcggcgagcccaacaacagtggaaatgaagactgtgcggagttctccggctctggatggaatgacaacagatgtgatgtagataactattggatatgtaaaaaaccggctgcttgttttcgcgacgaatag

SEQ ID NO: 56454 - DNA, 1868 bp, Artificial Sequence
  derived and/or modified sequence
acccagcttcctgtttgtcttcctgagagacagtagatttagaaagtgaggatcagagggtggaaaataaaagctgtggtccccaggagtcctgaacatctggggacagcgggaaaacatgagtgactccaaggaaccaagggtgcagcagctgggcctcctggaagaagatccaacaaccagtggcatcagactttttccaagagactttcaattccagcagatacatggccacaagagctctacagggtgtcttggccatggcgccctggtgctgcaactcctctccttcatgctcttggctggggtcctggtggccatccttgtccaagtgtccaaggtccccagctccctaagtcaggaacaatccgagcaagacgcaatctaccagaacctgacccagcttaaagctgcagtgggtgagctctcagagaaatccaagctgcaggagatctaccaggagctgacccagctgaaggctgcagtggtgggtgagttgccagagaaatccaagctgcaggagatctaccaggagctgacccggctgaaggctgcagtgggtgagttgccagagaaatccaagctgcaggagatctaccaggagctgacccggctgaaggctgcagtgggtgagttgccagagaaatccaagctgcaggagatctaccaggagctgacggagctgaaggctgcagtgggtgagttgccagagaaatccaagctgcaggagatctaccaggagctgacccagctgaaggctgcagtgggtgagttgccagaccagtccaagcagcagcaaatctatcaagaactgaccgatttgaagactgcatttgaacgcctgtgccgccactgtcccaaggactggacattcttccaaggaaactgttacttcatgtctaactcccagcggaactggcacgactccgtcaccgcctgccaggaagtgagggcccagctcgtcgtaatcaaaactgctgaggagcagaacttcctacagctgcagacttccaggagtaaccgcttctcctggatgggactttcagacctaaatcaggaaggcacgtggcaatgggtggacggctcacctctgtcacccagcttccagcggtactggaacagtggagaacccaacaatagcgggaatgaagactgtgcggaatttagtggcagtggctggaacgacaatcgatgtgacgttgacaattactggatctgcaaaaagcccgcagcctgcttcagagacgaatagttgtttccctgctagcctcagcctccattgtggtatagcagaacttcacccacttgtaagccagcgcttcttctctccatccttggaccttcacaaatgccctgagacggttctctgttcgatttttcatcccctatgaacctgggtcttattctgtccttctgatgcctccaagtttccctggtgtagagcttgtgttcttggcccatccttggagctttataagtgacctgagtgggatgcatttagggggcgggcttggtatgttgtatgaatccactctctgttccttttggagattagactatttggattcatgtgtagctgccctgtcccctggggctttatctcatccatgcaaactaccatctgctcaacttccagctacaccccgtgcacccttttgactggggacttgctggttgaaggagctcatcttgcaggctggaagcaccagggaattaattcccccagtcaaccaatggcatccagagagggcatggaggctccatacaacctcttccacccccacatctttctttgtcctatacatgtcttccatttggctgtttctgagttgtagcctttataataaagtggtaaatgttgtaactgc

SEQ ID NO: 56455 - DNA, 1134 bp, Artificial Sequence
  derived and/or modified sequence
atgagcgacagcaaggagcccagagtgcagcagctgggcctgctggaggaggaccccaccaccagcggcatcagactgttccccagagacttccagttccagcagatccacggccacaagagcagcaccggctgcctgggccacggcgccctggtgctgcagctgctgagcttcatgctgctggccggcgtgctggtggccatcctggtgcaggtgagcaaggtgcccagcagcctgagccaggagcagagcgagcaggacgccatctaccagaacctgacccagctgaaggccgccgtgggcgagctgagcgagaagagcaagctgcaggagatctaccaggagctgacccagctgaaggccgccgtggtgggcgagctgcccgagaagagcaagctgcaggagatctaccaggagctgaccagactgaaggccgccgtgggcgagctgcccgagaagagcaagctgcaggagatctaccaggagctgaccagactgaaggccgccgtgggcgagctgcccgagaagagcaagctgcaggagatctaccaggagctgaccgagctgaaggccgccgtgggcgagctgcccgagaagagcaagctgcaggagatctaccaggagctgacccagctgaaggccgccgtgggcgagctgcccgaccagagcaagcagcagcagatctaccaggagctgaccgacctgaagaccgccttcgagagactgtgcagacactgccccaaggactggaccttcttccagggcaactgctacttcatgagcaacagccagagaaactggcacgacagcgtgaccgcctgccaggaggtgagagcccagctggtggtgatcaagaccgccgaggagcagaacttcctgcagctgcagaccagcagaagcaacagattcagctggatgggcctgagcgacctgaaccaggagggcacctggcagtgggtggacggcagccccctgagccccagcttccagagatactggaacagcggcgagcccaacaacagcggcaacgaggactgcgccgagttcagcggcagcggctggaacgacaacagatgcgacgtggacaactactggatctgcaagaagcccgccgcctgcttcagagacgagtag

SEQ ID NO: 56456 - protein, 296 aa, Artificial Sequence
  derived and/or modified sequence
MSDSKEPRVQQLGLLGCLGHGALVLQLLSFMLLAGVLVAILVQVSKVPSSLSQEQSEQDAIYQNLTQLKAAVGELSEKSKLQEIYQELTQLKAAVGELPEKSKLQEIYQELTRLKAAVGELPEKSKLQEIYQELTRLKAAVGELPEKSKLQEIYQELTRLKAAVGELPEKSKLQEIYQELTELKAAVGELPEKSKLQEIYQELTQLKAAVGELPDQSKQQQIYQELTDLKTAFERLCRHCPKDWTFFQGNCYFMSNSQRNWHDSVTACQEVRAQLVVIKTAEEQLPAVLEQWRTQQ

SEQ ID NO: 56457 - DNA, 891 bp, Artificial Sequence
  derived and/or modified sequence
atgtccgattctaaggagccaagggtgcagcaactgggactcctgggatgccttggtcatggagccctggtgctacagctgttatcattcatgctgcttgccggagttttggttgctatcttggtgcaggtctccaaggtgccaagctcactcagccaggaacagtcagagcaggacgcaatttaccaaaatttaacccagttaaaggcagcagtgggcgaactgtcagagaaaagcaagctgcaagagatctatcaagaactcacgcagctgaaggcggctgtgggggagctgccggaaaaatcaaaacttcaagaaatctatcaagagctgacaaggctgaaggcggccgtgggagaactgcccgaaaaatcaaaactgcaggaaatctaccaggaacttacaaggctgaaggcggccgttggcgaattaccagaaaaatctaagctccaggaaatctaccaggaactgaccaggctgaaggcggcagtcggggaactgcctgaaaagtccaagctgcaggagatctatcaggaactgaccgagctgaaagcagccgtgggtgagctcccggaaaagtccaaattgcaagagatctaccaggaattgactcaactcaaagctgccgtgggagaattgcctgaccagtccaagcagcagcaaatataccaggaactgacagatctgaagacggctttcgaacgcctttgcaggcattgccctaaagactggaccttcttccagggcaactgttacttcatgtcgaattcacagcgtaattggcacgactcggtgactgcctgtcaggaggtgcgcgctcagctcgttgtgatcaagaccgcagaggaacagctccccgcagtgttagaacagtggaggacgcagcagtag

SEQ ID NO: 56458 - DNA, 891 bp, Artificial Sequence
  derived and/or modified sequence
atgtctgacagcaaggagccccgggtgcagcagctgggcctgctgggctgcctgggccacggggccctggtgctgcagctgctgtccttcatgctgctggccggcgtgctggtggccatcctggtgcaggtgtccaaggtgcccagcagcctgagccaggagcagagcgagcaggatgccatctaccagaacctgacccagctgaaggctgctgtgggggagctgtctgagaagagcaagctgcaggagatctaccaggagctgacccagctgaaggctgctgtgggggagctgcctgagaagagcaagctgcaggagatctaccaggagctgacccggctgaaggctgctgtgggggagctgcctgagaagagcaagctgcaggagatctaccaggagctgacccggctgaaggctgctgtgggggagctgcctgagaagagcaagctgcaggagatctaccaggagctgacccggctgaaggctgctgtgggggagctgcctgagaagagcaagctgcaggagatctaccaggagctgacagagctgaaggctgctgtgggggagctgcctgagaagagcaagctgcaggagatctaccaggagctgacccagctgaaggctgctgtgggggagctgcctgaccagagcaagcagcagcagatctaccaggagctgacagacctgaagacagcctttgagcggctgtgccgccactgccccaaggactggaccttcttccagggcaactgctacttcatgagcaacagccagaggaactggcatgacagcgtgacagcctgccaggaggtgcgggcccagctggtggtgatcaagacagctgaggagcagctgcctgctgtgctggagcagtggaggacccagcagtag

SEQ ID NO: 56459 - DNA, 891 bp, Artificial Sequence
  derived and/or modified sequence
atgagcgacagcaaggagccccgggtgcagcagctgggcctgctggggtgccttggacatggcgcgctggtgctgcagctgctgtccttcatgttgctggcaggtgtgttggtggccatcctggttcaagtgagcaaagtgccttcttctctaagccaagaacagagcgaacaggacgccatctatcagaatctgacccagctgaaggccgctgtaggggagctctccgagaaaagcaagctgcaggaaatctatcaggagctcactcagcttaaggcagctgtaggcgaactgcccgagaagtcgaagttgcaagagatataccaggagctgactcgactgaaagccgcagtgggtgaactccccgagaagagcaagcttcaggaaatttatcaggaactgaccagacttaaagccgctgtcggagagctaccagagaagtcgaagcttcaggaaatctaccaggaactgactaggctaaaagccgctgtgggagagttgccagagaaatctaagctccaggaaatctatcaggagctaaccgagttgaaagccgccgttggggaactgcctgagaaatcgaagctgcaggagatttatcaagaacttacccagctgaaagcagcagtgggcgagttaccagaccagagtaagcagcagcagatttaccaggagttgaccgatctgaagaccgccttcgagaggctctgtagacattgtccaaaggactggacctttttccaggggaactgttatttcatgtccaattcccagaggaattggcacgattcagtaaccgcttgccaggaggtcagggcccagctggttgtcattaaaacggcggaggagcagttgccagccgttctggagcagtggagaacgcagcaatag

SEQ ID NO: 56460 - DNA, 891 bp, Artificial Sequence
  derived and/or modified sequence
atgtctgacagcaaagagccaagggtacaacaactgggactgttggggtgtctcgggcatggagctttagtgcttcagcttctctcctttatgttactagcaggggtcctggtagcaattcttgtccaagtcagcaaagtgcccagcagcctgtcacaggagcaatctgagcaggatgccatttatcaaaatctcacccagctgaaagcagcggtgggcgaactgtccgagaaatctaagctccaggagatctaccaagagctcacgcagttaaaggccgctgtgggagagttgcctgaaaaatctaaacttcaggaaatttatcaggaactcacaaggcttaaagcagctgtgggggaattgccagaaaagtctaagttgcaggaaatctaccaagagttgacgcgccttaaggcagcggtcggagagcttccagagaagagtaagctgcaagagatctaccaggagctgaccagactgaaagccgctgtcggtgagctgcctgagaaaagcaagttacaggagatatatcaggaactgaccgaattgaaggctgcggttggcgaacttccagaaaaatcaaaactgcaggaaatttaccaggaactgacccaactcaaggctgctgtgggggaactgcccgatcagagcaagcagcagcaaatctatcaggagctcactgatctaaagactgcctttgagcgtctgtgcaggcattgcccgaaagactggaccttttttcaggggaattgttattttatgtctaacagccagcgcaactggcacgattctgtcaccgcatgtcaagaggtgagggctcagctggtcgtgataaagacagccgaagaacagctgcccgcagtgctcgagcagtggcggactcaacagtag

SEQ ID NO: 56461 - DNA, 1669 bp, Artificial Sequence
  derived and/or modified sequence
aaaagctgtggtccccaggagtcctgaacatctggggacagcgggaaaacatgagtgactccaaggaaccaagggtgcagcagctgggcctcctggggtgtcttggccatggcgccctggtgctgcaactcctctccttcatgctcttggctggggtcctggtggccatccttgtccaagtgtccaaggtccccagctccctaagtcaggaacaatccgagcaagacgcaatctaccagaacctgacccagcttaaagctgcagtgggtgagctctcagagaaatccaagctgcaggagatctaccaggagctgacccagctgaaggctgcagtgggtgagttgccagagaaatccaagctgcaggagatctaccaggagctgacccggctgaaggctgcagtgggtgagttgccagagaaatccaagctgcaggagatctaccaggagctgacccggctgaaggctgcagtgggtgagttgccagagaaatccaagctgcaggagatctaccaggagctgacccggctgaaggctgcagtgggtgagttgccagagaaatccaagctgcaggagatctaccaggagctgacggagctgaaggctgcagtgggtgagttgccagagaaatccaagctgcaggagatctaccaggagctgacccagctgaaggctgcagtgggtgagttgccagaccagtccaagcagcagcaaatctatcaagaactgaccgatttgaagactgcatttgaacgcctgtgccgccactgtcccaaggactggacattcttccaaggaaactgttacttcatgtctaactcccagcggaactggcacgactccgtcaccgcctgccaggaagtgagggcccagctcgtcgtaatcaaaactgctgaggagcagcttccagcggtactggaacagtggagaacccaacaatagcgggaatgaagactgtgcggaatttagtggcagtggctggaacgacaatcgatgtgacgttgacaattactggatctgcaaaaagcccgcagcctgcttcagagacgaatagttgtttccctgctagcctcagcctccattgtggtatagcagaacttcacccacttgtaagccagcgcttcttctctccatccttggaccttcacaaatgccctgagacggttctctgttcgatttttcatcccctatgaacctgggtcttattctgtccttctgatgcctccaagtttccctggtgtagagcttgtgttcttggcccatccttggagctttataagtgacctgagtgggatgcatttagggggcgggcttggtatgttgtatgaatccactctctgttccttttggagattagactatttggattcatgtgtagctgccctgtcccctggggctttatctcatccatgcaaactaccatctgctcaacttccagctacaccccgtgcacccttttgactggggacttgctggttgaaggagctcatcttgcaggctggaagcaccagggaattaattcccccagtcaaccaatggcatccagagagggcatggaggctccatacaacctcttccacccccacatctttctttgtcctatacatgtcttccatttggctgtttctgagttgtagcctttataataaagtggtaaatgttgtaactgc

SEQ ID NO: 56462 - DNA, 891 bp, Artificial Sequence
  derived and/or modified sequence
atgagcgacagcaaggagcccagagtgcagcagctgggcctgctgggctgcctgggccacggcgccctggtgctgcagctgctgagcttcatgctgctggccggcgtgctggtggccatcctggtgcaggtgagcaaggtgcccagcagcctgagccaggagcagagcgagcaggacgccatctaccagaacctgacccagctgaaggccgccgtgggcgagctgagcgagaagagcaagctgcaggagatctaccaggagctgacccagctgaaggccgccgtgggcgagctgcccgagaagagcaagctgcaggagatctaccaggagctgaccagactgaaggccgccgtgggcgagctgcccgagaagagcaagctgcaggagatctaccaggagctgaccagactgaaggccgccgtgggcgagctgcccgagaagagcaagctgcaggagatctaccaggagctgaccagactgaaggccgccgtgggcgagctgcccgagaagagcaagctgcaggagatctaccaggagctgaccgagctgaaggccgccgtgggcgagctgcccgagaagagcaagctgcaggagatctaccaggagctgacccagctgaaggccgccgtgggcgagctgcccgaccagagcaagcagcagcagatctaccaggagctgaccgacctgaagaccgccttcgagagactgtgcagacactgccccaaggactggaccttcttccagggcaactgctacttcatgagcaacagccagagaaactggcacgacagcgtgaccgcctgccaggaggtgagagcccagctggtggtgatcaagaccgccgaggagcagctgcccgccgtgctggagcagtggagaacccagcagtag

SEQ ID NO: 56463 - protein, 93 aa, Artificial Sequence
  derived and/or modified sequence
MAAATGDPGLSKLQFAPFSSALDVGFWHELTQKKLNEYRLDEAPKDIKGYYYNGDSAGLPARLTLEFSAFDMSAPTPARCCPAIGTLYNTNTL

SEQ ID NO: 56464 - protein, 623 aa, Artificial Sequence
  derived and/or modified sequence
MAAATGDPGLSKLQFAPFSSALDVGFWHELTQKKLNEYRLDEAPKDIKGYYYNGDSAGLPARLTLEFSAFDMSAPTPARCCPAIGTLYNTNTLESFKTADKKLLLEQAANEIWESIKSGTALENPVLLNKFLLLTFAIEALECAYDNLCQTEGVTALPYFLIKYDENMVLVSLLKHYSDFFQGQRTKITIGVYDPCNLAQYPGWPLRNFLVLAAHRWSSSFQSVEVVCFRDRTMQGARDVAHSIIFEVKLPEMAFSPDCPKAVGWEKNQKGGMGPRMVNLSECMDPKRLAESSVDLNLKLMCWRLVPTLDLDKVVSVKCLLLGAGTLGCNVARTLMGWGVRHITFVDNAKISYSNPVRQPLYEFEDCLGGGKPKALAAADRLQKIFPGVNARGFNMSIPMPGHPVNFSSVTLEQARRDVEQLEQLIESHDVVFLLMDTRESRWLPAVIAASKRKLVINAALGFDTFVVMRHGLKKPKQQGAGDLCPNHPVASADLLGSSLFANIPGYKLGCYFCNDVVAPGDSTRDRTLDQQCTVSRPGLAVIAGALAVELMVSVLQHPEGGYAIASSSDDRMNEPPTSLGLVPHQIRGFLSRFDNVLPVSLAFDKCTACSSKIWDMSDDETI

SEQ ID NO: 56465 - DNA, 270 bp, Artificial Sequence
  derived and/or modified sequence
atggccgccgccaccggcgaccccggcctgagcaagctgcagttcgcccccttcagcagcgccctggacgtgggcttctggcacgagctgacccagaagaagctgaacgagtacagactggacgaggcccccaaggacatcaagggctactactacaacggcgacagcgccggcctgcccgccagactgaccctggagttcagcgccttcgacatgagcgcccccacccccgccagatgctgccccgccatcggcaccctgtacaactag

SEQ ID NO: 56466 - DNA, 381 bp, Artificial Sequence
  derived and/or modified sequence
atggccgccgccaccggcgaccccggcctgagcaagctgcagttcgcccccttcagcagcgccctggacgtgggcttctggcacgagctgacccagaagaagctgaacgagtacagactggacgaggcccccaaggacatcaagggctactactacaacggcgacagcgccggcctgcccgccagactgaccctggagttcagcgccttcgacatgagcgcccccacccccgccagatgctgccccgccatcggcaccctgtacaacaccaacaccctggagagcttcaagaccgccgacaagaagctgctgctggagcaggccgccaacgagatctgggagagcatcaagagcggcaccgccctggagaaccccgtgtag

SEQ ID NO: 56467 - DNA, 201 bp, Artificial Sequence
  derived and/or modified sequence
atggccgccgccaccggcgaccccggcctgagcaagctgcagttcgcccccttcagcagcgccctggacgtgggcttctggcacgagctgacccagaagaagctgaacgagtacagactggacgaggcccccaaggacatcaagggctactactacaacggcgacagcgccggcctgcccgccagactgaccctggagtag

SEQ ID NO: 56468 - DNA, 282 bp, Artificial Sequence
  derived and/or modified sequence
atggccgccgccaccggcgaccccggcctgagcaagctgcagttcgcccccttcagcagcgccctggacgtgggcttctggcacgagctgacccagaagaagctgaacgagtacagactggacgaggcccccaaggacatcaagggctactactacaacggcgacagcgccggcctgcccgccagactgaccctggagttcagcgccttcgacatgagcgcccccacccccgccagatgctgccccgccatcggcaccctgtacaacaccaacaccctgtag

SEQ ID NO: 56469 - DNA, 1872 bp, Artificial Sequence
  derived and/or modified sequence
atggccgccgccaccggcgaccccggcctgagcaagctgcagttcgcccccttcagcagcgccctggacgtgggcttctggcacgagctgacccagaagaagctgaacgagtacagactggacgaggcccccaaggacatcaagggctactactacaacggcgacagcgccggcctgcccgccagactgaccctggagttcagcgccttcgacatgagcgcccccacccccgccagatgctgccccgccatcggcaccctgtacaacaccaacaccctggagagcttcaagaccgccgacaagaagctgctgctggagcaggccgccaacgagatctgggagagcatcaagagcggcaccgccctggagaaccccgtgctgctgaacaagttcctgctgctgaccttcgccatcgaggccctggagtgcgcctacgacaacctgtgccagaccgagggcgtgaccgccctgccctacttcctgatcaagtacgacgagaacatggtgctggtgagcctgctgaagcactacagcgacttcttccagggccagagaaccaagatcaccatcggcgtgtacgacccctgcaacctggcccagtaccccggctggcccctgagaaacttcctggtgctggccgcccacagatggagcagcagcttccagagcgtggaggtggtgtgcttcagagacagaaccatgcagggcgccagagacgtggcccacagcatcatcttcgaggtgaagctgcccgagatggccttcagccccgactgccccaaggccgtgggctgggagaagaaccagaagggcggcatgggccccagaatggtgaacctgagcgagtgcatggaccccaagagactggccgagagcagcgtggacctgaacctgaagctgatgtgctggagactggtgcccaccctggacctggacaaggtggtgagcgtgaagtgcctgctgctgggcgccggcaccctgggctgcaacgtggccagaaccctgatgggctggggcgtgagacacatcaccttcgtggacaacgccaagatcagctacagcaaccccgtgagacagcccctgtacgagttcgaggactgcctgggcggcggcaagcccaaggccctggccgccgccgacagactgcagaagatcttccccggcgtgaacgccagaggcttcaacatgagcatccccatgcccggccaccccgtgaacttcagcagcgtgaccctggagcaggccagaagagacgtggagcagctggagcagctgatcgagagccacgacgtggtgttcctgctgatggacaccagagagagcagatggctgcccgccgtgatcgccgccagcaagagaaagctggtgatcaacgccgccctgggcttcgacaccttcgtggtgatgagacacggcctgaagaagcccaagcagcagggcgccggcgacctgtgccccaaccaccccgtggccagcgccgacctgctgggcagcagcctgttcgccaacatccccggctacaagctgggctgctacttctgcaacgacgtggtggcccccggcgacagcaccagagacagaaccctggaccagcagtgcaccgtgagcagacccggcctggccgtgatcgccggcgccctggccgtggagctgatggtgagcgtgctgcagcaccccgagggcggctacgccatcgccagcagcagcgacgacagaatgaacgagccccccaccagcctgggcctggtgccccaccagatcagaggcttcctgagcagattcgacaacgtgctgcccgtgagcctggccttcgacaagtgcaccgcctgcagcagcaagatctgggacatgagcgacgacgagaccatctag

SEQ ID NO: 56470 - DNA, 270 bp, Artificial Sequence
  derived and/or modified sequence
atggcagcggcaactggagatcccggattgagcaaactgcagttcgcccccttttcatctgcactcgacgtgggattctggcatgagctgacccaaaaaaagttgaacgaatacaggctggatgaggcaccaaaggatattaagggatactattacaacggggatagtgcaggtttaccagcccggttgacactcgagtttagcgctttcgatatgtcggctcccactcccgcaagatgttgtccggccatcggaaccctttacaattag

SEQ ID NO: 56471 - DNA, 381 bp, Artificial Sequence
  derived and/or modified sequence
atggccgccgctacgggcgatccagggctgagtaagctgcagtttgccccgttctcaagtgcactggatgtcggcttttggcatgagctgactcagaagaagctaaacgagtaccgcctggacgaggccccaaaggacatcaagggttactactacaacggagacagcgccggcttgcccgcccggctaactttggagttctcggcttttgatatgagtgctcctactccagcccgctgttgccctgccattggcaccttatataacacaaacacacttgagtcttttaaaactgcggataaaaagctgttgttggagcaagccgctaacgagatatgggaatctattaaatctggcacagccctggaaaatcctgtgtag

SEQ ID NO: 56472 - DNA, 201 bp, Artificial Sequence
  derived and/or modified sequence
atggctgctgccactggtgatcctggcctcagcaaactgcagttcgccccctttagcagcgctctggatgtgggattctggcacgaacttacccaaaagaagttaaatgagtaccgcttggatgaagcacctaaagatattaaggggtactactataatggggactctgccggcttgccagcccgcctgacactagaatag

SEQ ID NO: 56473 - DNA, 282 bp, Artificial Sequence
  derived and/or modified sequence
atggctgccgccaccggtgaccccggactgagcaagctccaattcgcgccattcagtagtgcactcgacgtgggattctggcacgaactgacgcagaagaagctgaacgagtacagactggatgaagcccccaaggacatcaaaggctattattataatggggattccgccggattaccagctcgcctcactctggagttctctgcattcgatatgagtgcacctactcctgcgcgctgctgccctgccattggaaccctatacaatacgaacactctgtag

SEQ ID NO: 56474 - DNA, 1872 bp, Artificial Sequence
  derived and/or modified sequence
atggccgctgcaaccggcgatcctggactaagcaagcttcagttcgccccctttagctctgcactcgatgtaggattttggcatgagctgacccagaagaaactcaacgaatatcgtctggacgaggcacctaaagatattaaggggtattactacaacggagacagtgccggcctcccggcaagactaaccttagagttctcagctttcgatatgtctgcccccactccagcccgttgttgtcctgctattggcaccttgtataataccaacacacttgaaagcttcaagactgctgataaaaagttactgctggagcaggcggctaatgaaatttgggagagtattaagtccggtacagcactggaaaaccctgtgctgctgaacaagtttctcttacttactttcgccatcgaagcactggaatgtgcatacgacaatctctgtcagaccgaaggagtcactgcgctgccttacttcctgatcaagtatgatgagaatatggtcttggtatcgctcctgaaacactactcagattttttccagggccagaggaccaaaatcactatcggggtgtatgacccctgcaatctggctcagtatcctggatggcctttgcgtaattttctggttttagcagcgcatagatggagtagttcctttcagtcggtggaggttgtctgcttccgagaccgaacaatgcaaggagctagggacgtcgctcattctataatttttgaagtgaagttgccagagatggcattcagcccagactgcccaaaggccgtgggatgggaaaagaatcagaaaggaggaatgggccccagaatggtgaatctctccgagtgcatggatccaaaaaggctggcagaaagcagcgtcgatttaaatctcaagctgatgtgctggaggctcgtccccactctggatctggataaggtggtgagcgtgaagtgtctgctactcggcgccgggacactgggctgcaacgttgccaggactctgatgggttggggcgtaagacacattacctttgtggataacgctaaaatctcatacagcaaccccgtaaggcaaccattgtatgagttcgaggactgcctgggaggaggaaagcctaaagcgctggcagcagccgataggcttcagaagatctttcctggggtgaatgctcgcggtttcaatatgtccatccctatgcccggacatcccgtgaattttagctccgtcactctggaacaggctcgcagggacgttgagcagttggaacagctgattgagtcccacgacgtcgtcttcctcttgatggatactagggaatcacgttggctgccggccgtcatcgcagcctccaagcgaaaactagttattaacgctgctctcggtttcgacacctttgtcgtcatgagacacgggctaaaaaaacccaaacagcaaggagcgggcgatttgtgtcctaatcatcctgtggcgtctgctgacctcctggggtccagcttgttcgctaacatccccgggtacaagctcggatgttacttttgcaatgacgtcgtagccccgggggacagtacccgggaccgcaccctcgaccagcagtgtaccgtgagtaggcctggacttgccgtgattgctggtgctttggcagtcgagctgatggtatctgtgctgcagcaccctgagggagggtacgcgatcgcatcatcgtctgacgaccgcatgaatgagccaccaacctccctgggcctggttccccatcaaattaggggttttcttagccggttcgataacgtgctcccagtgtccttagcgttcgataagtgtactgcatgctcaagcaaaatctgggacatgagtgacgatgaaaccatatag

SEQ ID NO: 56475 - DNA, 270 bp, Artificial Sequence
  derived and/or modified sequence
atggctgctgccactggagaccccggcctgagcaagctgcagtttgcccccttcagcagcgccctggatgtgggcttctggcatgagctgacccagaagaagctgaatgagtaccgcctggatgaggcccccaaggacatcaagggctactactacaatggagacagcgctggcctgcctgcccggctgaccctggagttcagcgcctttgacatgtctgcccccaccccagcccgctgctgcccagccatcggcaccctgtacaactag

SEQ ID NO: 56476 - DNA, 381 bp, Artificial Sequence
  derived and/or modified sequence
atggctgctgccactggagaccccggcctgagcaagctgcagtttgcccccttcagcagcgccctggatgtgggcttctggcatgagctgacccagaagaagctgaatgagtaccgcctggatgaggcccccaaggacatcaagggctactactacaatggagacagcgctggcctgcctgcccggctgaccctggagttcagcgcctttgacatgtctgcccccaccccagcccgctgctgcccagccatcggcaccctgtacaacaccaacaccctggagagcttcaagacagctgacaagaagctgctgctggagcaggccgccaatgagatctgggagagcatcaagagcggcacagccctggagaaccctgtgtag

SEQ ID NO: 56477 - DNA, 201 bp, Artificial Sequence
  derived and/or modified sequence
atggctgctgccactggagaccccggcctgagcaagctgcagtttgcccccttcagcagcgccctggatgtgggcttctggcatgagctgacccagaagaagctgaatgagtaccgcctggatgaggcccccaaggacatcaagggctactactacaatggagacagcgctggcctgcctgcccggctgaccctggagtag

SEQ ID NO: 56478 - DNA, 282 bp, Artificial Sequence
  derived and/or modified sequence
atggctgctgccactggagaccccggcctgagcaagctgcagtttgcccccttcagcagcgccctggatgtgggcttctggcatgagctgacccagaagaagctgaatgagtaccgcctggatgaggcccccaaggacatcaagggctactactacaatggagacagcgctggcctgcctgcccggctgaccctggagttcagcgcctttgacatgtctgcccccaccccagcccgctgctgcccagccatcggcaccctgtacaacaccaacaccctgtag

SEQ ID NO: 56479 - DNA, 1872 bp, Artificial Sequence
  derived and/or modified sequence
atggctgctgccactggagaccccggcctgagcaagctgcagtttgcccccttcagcagcgccctggatgtgggcttctggcatgagctgacccagaagaagctgaatgagtaccgcctggatgaggcccccaaggacatcaagggctactactacaatggagacagcgctggcctgcctgcccggctgaccctggagttcagcgcctttgacatgtctgcccccaccccagcccgctgctgcccagccatcggcaccctgtacaacaccaacaccctggagagcttcaagacagctgacaagaagctgctgctggagcaggccgccaatgagatctgggagagcatcaagagcggcacagccctggagaaccctgtgctgctgaacaagttcctgctgctgacctttgccatcgaggccctggagtgtgcctatgacaacctgtgccagacagaaggagtgacagccctgccctacttcctgatcaagtatgatgagaacatggtgctggtgtccctgctgaagcactacagcgacttcttccagggccagaggaccaagatcaccatcggcgtgtatgacccctgcaacctggcccagtacccaggctggcccctgaggaacttcctggtgctggccgcccaccgctggagcagcagcttccagagcgtggaggtggtgtgcttccgggacaggaccatgcagggcgccagagatgtggcccacagcatcatctttgaggtgaagctgcctgagatggccttctccccagactgccccaaggctgtgggctgggagaagaaccagaagggcggcatgggccccaggatggtgaacctgtctgagtgcatggaccccaagaggctggccgagagctctgtggacctgaacctgaagctgatgtgctggaggctggtgcccaccctggacctggacaaggtggtgtctgtgaagtgcctgctgctgggcgccggcaccctgggctgcaatgtggcccggaccctgatgggctggggcgtgcgccacatcacctttgtggacaatgccaagatctcctacagcaaccctgtgcggcagcccctgtatgaatttgaggactgcctgggcggcggcaagcccaaggccctggccgctgctgaccggctgcagaagatcttccctggggtgaatgcccggggcttcaacatgagcatccccatgcctggccaccctgtgaacttcagctctgtgaccctggagcaggccaggagagatgtggagcagctggagcagctgattgagagccatgatgtggtgttcctgctgatggacacccgggagagccgctggctgcctgctgtgattgctgccagcaagaggaagctggtgatcaatgctgccctgggctttgacacctttgtggtgatgagacatggcctgaagaagcccaagcagcagggcgctggggacctgtgccccaaccaccctgtggccagcgctgacctgctgggcagcagcctgtttgccaacatccctggctacaagctgggctgctacttctgcaatgatgtggtggcccctggggacagcacccgggacaggaccctggaccagcagtgcaccgtgtcccggcccggcctggccgtgattgctggggccctggccgtggagctgatggtgtctgtgctgcagcaccctgagggcggctacgccatcgccagcagcagtgatgacaggatgaatgagccccccaccagcctgggcctggtgccccaccagatccggggcttcctgagcagatttgacaacgtgctgcctgtgtccctggcctttgacaagtgcacagcctgcagcagcaagatctgggacatgtctgatgatgagaccatctag

SEQ ID NO: 56480 - DNA, 270 bp, Artificial Sequence
  derived and/or modified sequence
atggccgccgccaccggcgaccccggcctgagcaagctgcagttcgcacccttttccagcgcactggacgtggggttctggcatgagttgacccagaagaagctaaatgagtatcggctggacgaggcccctaaagacattaagggatactactataacggcgacagtgcaggcttacctgcccgcctgacactggagtttagcgcatttgatatgtccgctccaacacccgcccgctgttgtcccgctatcggaaccctgtataactag

SEQ ID NO: 56481 - DNA, 381 bp, Artificial Sequence
  derived and/or modified sequence
atggccgccgccaccggcgaccccggcctgagcaagctgcagttcgcgcccttctccagcgctctggatgtaggtttctggcacgagcttacacaaaagaaactgaatgaatatcggctggacgaggctccaaaagatatcaaaggatattactacaacggtgattccgcaggactgccagccagattgacgttggagttttctgcctttgacatgtccgcccccactcctgctcggtgctgccccgcaatagggacactttataacacaaataccttagagagctttaagactgccgacaagaagctgcttttggagcaggccgctaatgaaatctgggagtcaatcaaaagcgggacagctctggagaacccagtctag

SEQ ID NO: 56482 - DNA, 201 bp, Artificial Sequence
  derived and/or modified sequence
atggccgccgccaccggcgaccccggcctgagcaagctgcagttcgcccctttctctagcgccttggacgtcggcttttggcacgaactgactcagaaaaaactcaacgagtaccgactcgacgaggcccccaaggacattaaagggtattactacaatggggattctgccggtctgcctgctaggctgactctggaatag

SEQ ID NO: 56483 - DNA, 282 bp, Artificial Sequence
  derived and/or modified sequence
atggccgccgccaccggcgaccccggcctgagcaagctgcagttcgccccattctcatctgccttggatgtgggcttttggcacgagctcacgcagaagaaactcaatgagtatcgactggacgaggcacctaaagatattaaaggatactactacaacggcgattcggccggcctgcccgccagactaactttggagttctccgcgttcgacatgagcgcaccgacccccgcacggtgctgccctgcaattgggaccctgtacaataccaatacactctag

SEQ ID NO: 56484 - DNA, 1872 bp, Artificial Sequence
  derived and/or modified sequence
atggccgccgccaccggcgaccccggcctgagcaagctgcagttcgccccattttcatccgctctcgatgtgggcttctggcatgagctgacgcagaagaaactaaacgagtaccgtctcgatgaggcacctaaggacattaagggctactattataacggagactcagccggcctgccggcacgcctaacgcttgagttttccgccttcgatatgagtgctcccacgccggctaggtgttgtcccgctatcgggacactctataataccaacaccctggagagcttcaaaacagctgataagaagctactcctggagcaggcagcaaatgagatctgggaatccataaaatccggtacagctctggaaaatccagttttactgaacaagttcctgctgctcacttttgctatcgaggctttggagtgcgcctacgataacctgtgtcagaccgagggagtaaccgccctgccctactttttgattaaatacgatgagaatatggtgctcgtatctctcctgaaacactacagtgatttttttcagggccagagaactaaaataacgattggagtgtacgatccttgtaacctggcccagtatccaggatggccattacgcaacttcctcgtcctcgctgcacataggtggagttctagctttcagtcagtggaggtagtttgcttcagagataggactatgcagggagcccgggacgtcgctcattccattattttcgaggtgaaattgcccgagatggccttctcccctgattgcccaaaggctgtgggttgggaaaagaaccagaaaggcggaatggggcccagaatggtgaacctgtccgaatgtatggatcctaaacgcctggctgagtcgtctgtggacctcaatctgaagctgatgtgctggcggctggtgccaacgctcgaccttgataaagtggtgtctgtcaagtgcctgttgctgggcgccggcacacttggttgtaatgtcgcgagaacactgatgggctggggcgtgcgccacatcactttcgtcgacaatgccaaaatctcatattctaatcctgtccggcagcctctttacgagtttgaagattgcctgggaggcggtaaacccaaggccttggctgccgccgacagactccagaagatttttcccggagtcaacgcgcgaggcttcaatatgtccatcccaatgcctgggcaccccgtgaacttctcaagtgtgaccctggagcaggcccgaagggatgtcgaacaattggagcagctcatcgaaagtcatgacgtggtctttttattaatggacactagagagagcaggtggcttcccgcggttattgccgccagtaaacggaagctcgtcatcaacgcagccctcggctttgataccttcgtagtgatgcgtcacggtttgaagaagccaaagcagcagggagccggagacctttgcccgaatcacccagttgcttcagcagacctactcggcagcagtttgttcgccaacattcccggttataaactaggatgttatttttgtaacgacgtcgtagcccccggggactctacaagagaccgtacgctggaccagcagtgcaccgtttccaggccaggcctggcagttatcgccggggctttggctgtagagcttatggtatccgtgctccaacaccccgagggtggttacgcgattgccagctcgagtgacgatcgaatgaatgagcctccaacatctctggggctagtgcctcaccaaatccgcgggtttcttagccggtttgacaacgtcctgccagtaagtcttgcgttcgacaaatgtacagcatgcagctcaaaaatatgggatatgtccgatgatgagacaatttag

SEQ ID NO: 56485 - DNA, 565 bp, Artificial Sequence
  derived and/or modified sequence
gagcggcggtaagtgagccgcggcgggcgagggtgtagtggggtcttgctgggccggttttggaggcctggagtcaaggggcgagctcgccagggagggcgagggtcacagcaagtctcaggatcctcctctgccagtttctgggtggtccttcctcctccagggactcactgattccggctggcgcccttcgtctgtagccgcgtcccctcagactggttcagtccggggtcttctgacttggaagctcgtgctgatttcctaagtcagcccctcctgtcctcttggcaagaaataatggcggcagctacgggggatcctggactctctaaactgcagtttgccccttttagtagtgccttggatgttgggttttggcatgagttgacccagaagaagctgaacgagtatcggctggatgaagctcccaaggacattaagggttattactacaatggtgactctgctgggctgccagctcgcttaacattggagttcagtgcttttgacatgagtgctcccaccccagcccgttgctgcccagctattggaacactgtataaca

SEQ ID NO: 56486 - DNA, 589 bp, Artificial Sequence
  derived and/or modified sequence
agtctggtcctcactgctgtggattgcctttactaaaatagagatctatgcagaaatacagttgcatagcttttcacataaggctcttcatgatatggcctttgcctgcttttatggcatggtccatctactctgccccatgtgcctctccttgctgccatacagaactctatcaggggaacctgcccccaatatttcaaggcaagaaataatggcggcagctacgggggatcctggactctctaaactgcagtttgccccttttagtagtgccttggatgttgggttttggcatgagttgacccagaagaagctgaacgagtatcggctggatgaagctcccaaggacattaagggttattactacaatggtgactctgctgggctgccagctcgcttaacattggagttcagtgcttttgacatgagtgctcccaccccagcccgttgctgcccagctattggaacactgtataacaccaacacactcgagtctttcaagactgcagataagaagctccttttggaacaagcagcaaatgagatatgggaatccataaaatcaggcactgctcttgaaaaccctgta

SEQ ID NO: 56487 - DNA, 270 bp, Artificial Sequence
  derived and/or modified sequence
atggccgctgcaactggcgacccaggtctgagcaagctccagttcgccccattcagctcagctctggatgtgggattttggcacgagctcacccagaaaaaactgaatgagtatcgactggacgaagccccaaaggacattaagggatactattacaacggtgactccgccggactccccgctcggcttactctcgaatttagcgctttcgatatgtcagccccaaccccagcgcgatgctgcccggctatcggcaccttgtacaactag

SEQ ID NO: 56488 - DNA, 381 bp, Artificial Sequence
  derived and/or modified sequence
atggccgctgccacaggcgaccctggattgtccaaattacagttcgccccattcagctccgcccttgacgttggcttttggcacgagctcacccaaaaaaagctgaatgaatatagattagatgaggctcccaaggacatcaaaggctactattataacggggattctgccggactgccagctagactcaccctcgagttctccgccttcgacatgagcgcacccacaccagcgagatgttgtcccgcaataggaaccctgtataacaccaacaccctggagtcattcaaaacagccgacaagaagctgttgctggagcaagctgcaaatgagatctgggagagcataaaaagcggtaccgccctggagaatcccgtctag

SEQ ID NO: 56489 - DNA, 201 bp, Artificial Sequence
  derived and/or modified sequence
atggctgcggctaccggcgaccctggtctaagtaagctacaattcgcaccattctcaagtgctctcgacgtcggcttttggcatgaacttactcagaaaaagctgaacgaataccggctcgatgaggctcccaaggacattaagggatactactataatggagatagtgctggattgcccgcaaggctgaccttagagtag

SEQ ID NO: 56490 - DNA, 282 bp, Artificial Sequence
  derived and/or modified sequence
atggcagcagctactggcgatcccggactcagcaagctccagtttgcccctttctcatcagctctggacgtcggattttggcacgaactcacccagaagaagctgaacgagtatcggctggatgaggcccctaaggacatcaagggctattactacaatggtgattcagcaggactgccagcgcgtctcactctcgaattttccgccttcgacatgtctgcaccgacaccggctcgttgttgccccgctattggtaccctgtataatacaaatacactgtag

SEQ ID NO: 56491 - DNA, 1872 bp, Artificial Sequence
  derived and/or modified sequence
atggccgctgctactggcgatccaggactgtccaaacttcaattcgcacctttctcttctgccctggatgttggattctggcacgagctgacccaaaaaaagctcaacgaataccgcttagatgaggcgccaaaggatattaaagggtattactataatggcgattcagccggactgcccgcacgcctgacattggagttctcagcatttgatatgtctgcacccactcccgcacgatgctgtccagccatcggcacactctacaataccaatactctcgagagttttaagactgctgacaagaagctgttgcttgaacaggccgctaatgaaatctgggaaagtatcaagtcaggtaccgcattggaaaacccagtgttattgaataaatttttgcttctgaccttcgcgatcgaggccctggagtgtgcttacgacaatctatgtcaaacagagggtgtaacagcactgccctattttctaatcaagtacgatgagaatatggtgctggtttccctgctgaaacactattcagattttttccaaggacagcgcaccaaaatcactattggggtatatgacccatgtaacctggcccagtatcctggatggcctctgcgcaactttctcgttctggccgcacaccgctggagttcttccttccaatcggtggaggtggtgtgctttcgggaccgcacaatgcagggcgcaagggatgtcgcccatagcattatcttcgaggtgaagttaccagaaatggccttttcccccgattgccctaaagcagtcggctgggaaaagaaccagaaggggggaatgggtccaagaatggtcaacctctcggagtgcatggatcccaagcgcttagccgaaagttctgtcgaccttaaccttaagctgatgtgttggaggctggtccccacgttggatctcgacaaagtcgtgagcgtgaagtgtttgttgctgggcgctggtactcttggatgcaacgtggctagaacgctcatgggatggggtgtcagacacattacttttgtcgacaatgctaaaatcagctattcaaatcccgtgcgacagcctctgtacgaattcgaggactgtctgggagggggtaaaccaaaagcgttagccgctgcggatcggcttcagaagattttccctggtgtcaatgccagagggtttaacatgtcaattcccatgccagggcaccctgtgaatttctcatctgtgactcttgagcaagccaggagggatgtcgaacagctggagcagctgatcgagagccacgacgtggtgtttctgttgatggacactcgggagtccaggtggctgcccgctgtgatagcagccagtaagaggaagctggttataaatgccgcattgggtttcgacacatttgtcgtgatgagacacggcctcaagaagcctaaacagcagggggcaggagacctctgccctaaccatcctgtggcatctgctgatttgttgggaagctctcttttcgcaaacattccaggatacaagcttggctgttatttctgcaatgatgtagtggcacctggcgactcaacgagggaccggaccctggatcaacagtgtactgtaagccggccaggcctggccgttatcgccggtgcactggccgttgagctcatggtgtctgtgctccagcatccagagggaggctatgcgatcgcatcaagtagtgacgatcgaatgaatgaacccccaacctccctgggccttgtgccccaccaaatacgagggttcctctctcgattcgataacgtcctgcccgtttccctggcctttgacaagtgcactgcctgcagctccaaaatctgggacatgtcagacgatgagacaatatag

SEQ ID NO: 56492 - DNA, 647 bp, Artificial Sequence
  derived and/or modified sequence
agtggcaagcgcgggcaggaccgcgttgcgtcatcggggcgcgcgcctcagagagagctgtggttgccggaagttgagcggcggatccaattcctgtatcttcaccttgtctaccgggatttctagagcagccttgtgagagacatttctgagacctgtatgtcctgcgtctatgattcttccctgatcaaggcttctcaaaccccataatgctggtatccagtgcatccgttctcaaaaactgaagctgatggacaccagattgcatgtgaaggtgaaggatattatagcagaaggaaaccaaaataaaagaaaaacagctcctggaagtaaccaatgagaaggacagataagagtttgaagactgtggatgtgactgcttgttccctggttgacacactgaagaagaaatcatgttgattcagagttggcttggaggcaagaaataatggcggcagctacgggggatcctggactctctaaactgcagtttgccccttttagtagtgccttggatgttgggttttggcatgagttgacccagaagaagctgaacgagtatcggctggatgaagctcccaaggacattaagggttattactacaatggtgactctgctgggctgccagctcgcttaacattggagt

SEQ ID NO: 56493 - DNA, 565 bp, Artificial Sequence
  derived and/or modified sequence
agctgtggttgccggaagttgagcggcggcttctcaaaccccataatgctggtatccagtgcatccgttctcaaaaactgaagctgatggacaccagattgcatgtgaaggtgaaggatattatagcagaaggaaaccaaaataaaagaaaaacagctcctggaagtaaccaatgagaaggacagataagagtttgaagactgtggatgtgactgcttgttccctggttgacacactgaagaagaaatcatgttgattcagagttggcttggaggcaagaaataatggcggcagctacgggggatcctggactctctaaactgcagtttgccccttttagtagtgccttggatgttgggttttggcatgagttgacccagaagaagctgaacgagtatcggctggatgaagctcccaaggacattaagggttattactacaatggtgactctgctgggctgccagctcgcttaacattggagttcagtgcttttgacatgagtgctcccaccccagcccgttgctgcccagctattggaacactgtataacaccaacacactcga

SEQ ID NO: 56494 - DNA, 2042 bp, Artificial Sequence
  derived and/or modified sequence
ggaagttgagcggcggcaagaaataatggcggcagctacgggggatcctggactctctaaactgcagtttgccccttttagtagtgccttggatgttgggttttggcatgagttgacccagaagaagctgaacgagtatcggctggatgaagctcccaaggacattaagggttattactacaatggtgactctgctgggctgccagctcgcttaacattggagttcagtgcttttgacatgagtgctcccaccccagcccgttgctgcccagctattggaacactgtataacaccaacacactcgagtctttcaagactgcagataagaagctccttttggaacaagcagcaaatgagatatgggaatccataaaatcaggcactgctcttgaaaaccctgtactcctcaacaagttcctcctcttgacatttgcaattgaagcactagagtgtgcatatgataatctttgtcaaacagaaggagtcacagctcttccttacttcttaatcaagtatgatgagaacatggtgctggtttccttgcttaaacactacagtgatttcttccaaggtcaaaggacgaagataacaattggtgtatatgatccctgtaacttagcccagtaccctggatggcctttgaggaattttttggtcctagcagcccacagatggagtagcagtttccagtctgttgaagttgtttgcttccgtgaccgtaccatgcagggggcgagagacgttgcccacagcatcatcttcgaagtgaagcttccagaaatggcatttagcccagattgtcctaaagcagttggatgggaaaagaaccagaaaggaggcatgggaccaaggatggtgaacctcagtgaatgtatggaccctaaaaggttagctgagtcatcagtggatctaaatctcaaactgatgtgttggagattggttcctactttagacttggacaaggttgtgtctgtcaaatgtctgctgcttggagccggcaccttgggttgcaatgtagctaggacgttgatgggttggggcgtgagacacatcacatttgtggacaatgccaagatctcctactccaatcctgtgaggcagcctctctatgagtttgaagattgcctagggggtggtaagcccaaggctctggcagcagcggaccggctccagaaaatattccccggtgtgaatgccagaggattcaacatgagcatacctatgcctgggcatccagtgaacttctccagtgtcactctggagcaagcccgcagagatgtggagcaactggagcagctcatcgaaagccatgatgtcgtcttcctattgatggacaccagggagagccggtggcttcctgccgtcattgctgcaagcaagagaaagctggtcatcaatgctgctttgggatttgacacatttgttgtcatgagacatggtctgaagaaaccaaagcagcaaggagctggggacttgtgtccaaaccaccctgtggcatctgctgacctcctgggctcatcgctttttgccaacatccctggttacaagcttggctgctacttctgcaatgatgtggtggccccaggagattcaaccagagaccggaccttggaccagcagtgcactgtgagtcgtccaggactggccgtgattgcaggagccctggccgtggaattgatggtatctgttttgcagcatccagaagggggctatgccattgccagcagcagtgacgatcggatgaatgagcctccaacctctcttgggcttgtgcctcaccagatccggggatttctttcacggtttgataatgtccttcccgtcagcctggcatttgacaaatgtacagcttgttcttccaaaatctgggacatgagcgatgatgagaccatctgagatggccccgctgtggggctgacttctccccggccgcctgctgaggagctctccatcgccagagcaggactgctgaccccaggcctggtgattctgggcccctcctccataccccgaggtctgggattcccccctctgctgccca

SEQ ID NO: 56495 - protein, 254 aa, Artificial Sequence
  derived and/or modified sequence
MVSWGRFICLVVVTMATLSLARPSFSLVEDTTLEPEEPPTKYQISQPEVYVAAPGESLEVRCLLKDAAVISWTKDGVHLGPNNRTVLIGEYLQIKGATPRDSGLYACTASRTVDSETWYFMVNVTDAISSGDDEDDTDGAEDFVSENSNNKRAPYWTNTEKMEKRLHAVPAANTVKFRCPAGGNPMPTMRWLKNGKEFKQEHRIGGYKVRNQHWSLIMESVVPSDKGNYTCVVENEYGSINHTYHLDVVGSQGL

SEQ ID NO: 56496 - protein, 769 aa, Artificial Sequence
  derived and/or modified sequence
MVSWGRFICLVVVTMATLSLARPSFSLVEDTTLEPEEPPTKYQISQPEVYVAAPGESLEVRCLLKDAAVISWTKDGVHLGPNNRTVLIGEYLQIKGATPRDSGLYACTASRTVDSETWYFMVNVTDAISSGDDEDDTDGAEDFVSENSNNKRAPYWTNTEKMEKRLHAVPAANTVKFRCPAGGNPMPTMRWLKNGKEFKQEHRIGGYKVRNQHWSLIMESVVPSDKGNYTCVVENEYGSINHTYHLDVVERSPHRPILQAGLPANASTVVGGDVEFVCKVYSDAQPHIQWIKHVEKNGSKYGPDGLPYLKVLKHSGINSSNAEVLALFNVTEADAGEYICKVSNYIGQANQSAWLTVLPKQQAPGREKEITASPDYLEIAIYCIGVFLIACMVVTVILCRMKNTTKKPDFSSQPAVHKLTKRIPLRRQVTVSAESSSSMNSNTPLVRITTRLSSTADTPMLAGVSEYELPEDPKWEFPRDKLTLGKPLGEGCFGQVVMAEAVGIDKDKPKEAVTVAVKMLKDDATEKDLSDLVSEMEMMKMIGKHKNIINLLGACTQDGPLYVIVEYASKGNLREYLRARRPPGMEYSYDINRVPEEQMTFKDLVSCTYQLARGMEYLASQKCIHRDLAARNVLVTENNVMKIADFGLARDINNIDYYKKTTNGRLPVKWMAPEALFDRVYTHQSDVWSFGVLMWEIFTLGGSPYPGIPVEELFKLLKEGHRMDKPANCTNELYMMMRDCWHAVPSQRPTFKQLVEDLDRILTLTTNEI

SEQ ID NO: 56497 - protein, 768 aa, Artificial Sequence
  derived and/or modified sequence
MVSWGRFICLVVVTMATLSLARPSFSLVEDTTLEPEEPPTKYQISQPEVYVAAPGESLEVRCLLKDAAVISWTKDGVHLGPNNRTVLIGEYLQIKGATPRDSGLYACTASRTVDSETWYFMVNVTDAISSGDDEDDTDGAEDFVSENSNNKRAPYWTNTEKMEKRLHAVPAANTVKFRCPAGGNPMPTMRWLKNGKEFKQEHRIGGYKVRNQHWSLIMESVVPSDKGNYTCVVENEYGSINHTYHLDVVERSPHRPILQAGLPANASTVVGGDVEFVCKVYSDAQPHIQWIKHVEKNGSKYGPDGLPYLKVLKHSGINSSNAEVLALFNVTEADAGEYICKVSNYIGQANQSAWLTVLPKQQAPGREKEITASPDYLEIAIYCIGVFLIACMVVTVILCRMKNTTKKPDFSSQPAVHKLTKRIPLRRQVTVSAESSSSMNSNTPLVRITTRLSSTADTPMLAGVSEYELPEDPKWEFPRDKLTLGKPLGEGCFGQVVMAEAVGIDKDKPKEAVTVAVKMLKDDATEKDLSDLVSEMEMMKMIGKHKNIINLLGACTQDGPLYVIVEYASKGNLREYLRARRPPGMEYSYDINRVPEEQMTFKDLVSCTYQLARGMEYLASQKCIHRDLAARNVLVTENNVMKIADFGLARDINNIDYYKKTTNGRLPVKWMAPEALFDRVYTHQSDVWSFGVLMWEIFTLGGSPYPGIPVEELFKLLKEGHRMDKPANCTNELYMMMRDCWHAVPSQRPTFKQLVEDLDRILTLTTNE

SEQ ID NO: 56498 - DNA, 2310 bp, Artificial Sequence
  derived and/or modified sequence
atggtttcgtggggacggttcatttgcctcgtagtcgttaccatggccaccctctctctagccaggccgtcattcagtctcgtggaggataccacactcgaaccagaggagccacccaccaaataccaaataagtcagccagaggtgtatgtcgccgcccccggtgaatcactggaggtgaggtgtctgctgaaggacgctgcagtaatcagttggactaaggatggcgttcatttagggcccaataaccgcacagtactgatcggagaataccttcagattaagggtgccacgccaagggatagcggtctctacgcctgcactgccagcaggactgtagatagcgagacatggtattttatggtgaatgtgaccgacgccatctcctctggcgacgacgaagacgatacagatggcgcagaggactttgtgtccgagaacagcaacaacaagagagcaccttactggactaacaccgagaagatggagaagcggctgcacgctgtcccagccgctaataccgtgaagtttaggtgtccagctggaggcaatcccatgccaacaatgcgatggctgaagaacgggaaggaatttaagcaggaacacaggataggtggctacaaagttcggaaccaacactggtcactgatcatggagagcgtagttccaagcgataaagggaattacacatgtgtagtggaaaacgaatacggctccatcaatcacacttaccacctggacgtggtcgaaagatcaccacacaggccaatcctccaggccgggctgccagctaatgcttcaactgtggttggcggggacgtggagtttgtgtgtaaggtgtatagtgacgctcaaccacacattcagtggattaagcacgtagagaaaaacggctctaagtacggacccgatggcctcccctatttaaaagtgcttaaacactccggaattaactcaagtaatgccgaagttcttgcccttttcaacgttaccgaagctgatgccggggaatacatttgtaaggtcagcaattacataggacaagcgaaccaatctgcctggttgactgtgttacccaagcagcaggcgcctggacgagaaaaagagattaccgcatctccggattacctggaaatcgcaatttactgcatcggcgtctttctcatagcctgcatggtagtgaccgtcattctgtgtagaatgaagaacacaaccaagaagcctgacttctcttcccaacctgctgtgcataagctgaccaagcgcattcctttgcgaaggcaggtgacggtgtctgcagaaagcagcagctcaatgaattcaaacacacccctggtccgaattacaacaagattgagcagcaccgctgatacccctatgttagcaggagtgtctgagtatgagctgccagaggacccaaaatgggagtttccaagagacaagttgaccttaggaaagcctctgggtgaagggtgcttcggtcaggtcgtcatggcggaagccgtagggatcgacaaagataagcctaaagaggctgtgactgtggccgtcaagatgctcaaagatgatgcgacggaaaaggatctcagcgatttggtttctgaaatggagatgatgaagatgataggtaaacacaagaatatcattaatcttctgggggcttgcacccaggacggtcctctctatgtgatagtggagtacgccagtaagggcaacctgagagaatacctgcgggcccgtcgccccccaggtatggaatatagttatgacattaaccgcgttcccgaagaacaaatgacattcaaagacctggtgagttgtacataccagcttgcccgcgggatggagtacctggcatcccagaaatgcatccacagagacctcgcagcacgtaacgttctggtaaccgagaataacgttatgaagatcgccgacttcggcctggccagggatataaacaatatcgactactataagaaaaccactaacggcagactgccagtgaagtggatggcccctgaggcccttttcgatcgtgtctatactcatcaaagcgacgtgtggtccttcggggttttaatgtgggagatctttactctcggaggcagcccttacccaggaattcccgtggaagagctctttaagctgttaaaagagggacaccgaatggataagcccgcaaattgcaccaacgagctctacatgatgatgcgagattgctggcacgcggtgccttcacagagacctaccttcaagcagcttgttgaagacctggatcggatccttaccctgacaacaaatgagatctag

SEQ ID NO: 56499 - DNA, 2307 bp, Artificial Sequence
  derived and/or modified sequence
atggtgagctggggccgttttatatgcctcgtagtggtcactatggccaccctgagcttggctcgcccttccttttcgctggtggaagataccacattagaacccgaggaaccgccgacaaagtatcagatatcacagcccgaggtgtatgtcgccgccccaggcgaatccctcgaagtacgctgtctcctgaaggacgcagctgtcataagctggaccaaagatggggtgcacttaggtcctaacaacaggaccgtgttaatcggagagtatctgcagattaaaggtgcaacacccagagatagtggactgtatgcctgtacagccagccgaacggttgattccgagacttggtatttcatggtaaacgtgaccgacgctatctcttcgggggacgacgaggatgacaccgacggcgctgaagacttcgtttctgagaacagcaataacaaaagagcgccctattggactaatactgagaagatggagaaacgattgcacgccgtcccggctgcaaacacagtgaagttccgttgccctgcaggcgggaatcctatgcctaccatgagatggcttaaaaacgggaaggaattcaaacaggagcatcggattgggggatataaagtacgaaaccagcactggagtctcattatggagtccgtggtcccctctgataagggaaattacacctgcgttgtagagaatgagtacggaagcattaatcacacataccacctcgacgtcgtggagaggtctccccaccgcccaatcctgcaagctggattgccagctaatgcttcaaccgtggtcggtggagacgttgaatttgtctgcaaggtttatagcgatgcacagcctcacattcagtggattaagcacgtggaaaaaaacgggagtaaatacggccccgacggcctgccatatttaaaagtgctgaaacatagcggcattaattctagtaatgccgaagtcctggcactgtttaacgtaaccgaggccgacgccggagagtatatttgcaaggtcagcaactatatagggcaagctaaccaaagcgcatggttgacagtcctccctaaacaacaggctcccggtagggagaaagaaattaccgccagtcctgattacctagaaattgctatttattgtattggtgtgttcctgatcgcttgtatggttgttactgtgatcctctgccgcatgaaaaatacgacgaagaagcctgattttagcagccaaccagctgtgcacaagttgaccaagcgaatacctcttcgacgccaggtgaccgtatctgcggagtcctcatcctccatgaatagcaacacaccgctggtgcgaattacgacacgcttatcatcgactgccgatacccctatgctcgcaggggtgagcgaatatgaattgcccgaagacccgaaatgggagtttccccgggataagctgacactgggcaaaccacttggggagggctgctttgggcaggtggtcatggctgaggcggttggcattgataaagataaacctaaagaggcggttactgtcgcagtgaaaatgctgaaagacgatgcaactgagaaggacttgagcgatctggtgtccgagatggagatgatgaaaatgatcggaaagcacaaaaacattatcaatctgttgggggcatgtacccaggacgggcctctgtatgtcatcgtcgaatacgcttcaaagggtaacctgcgagagtatttgcgcgctcgacgccctcctgggatggagtactcttatgatatcaatcgcgtgcctgaggagcagatgaccttcaaggacctggttagctgtacttatcaacttgcgcgagggatggaatatctggcaagtcagaagtgtatacatcgggacttggcagcaagaaatgtactggtaaccgagaataacgttatgaagattgcagatttcggcctggccagggacatcaacaacatcgactactacaagaagacaacaaatggccgcctgcctgttaaatggatggcacccgaggccctcttcgacagggtttacacacatcaaagtgatgtgtggagtttcggcgtactgatgtgggagatttttactctggggggctcaccttacccggggataccagtggaggagctctttaaattgctaaaagaaggccaccgaatggataagcccgctaactgtactaacgagctatatatgatgatgagagactgttggcatgcggtgccctcacaacgccctacatttaaacagttggttgaagatctagatcggatcctcacgctaacgaccaatgagtag

SEQ ID NO: 56500 - DNA, 2310 bp, Artificial Sequence
  derived and/or modified sequence
atggtgtcctggggccgcttcatctgcctggtggtggtgaccatggccaccctgagcctggcccggcccagcttcagcctggtggaggacaccaccctggagcctgaggagccccccaccaagtaccagatcagccagcctgaggtgtatgtggccgcccctggagagagcctggaggtgcgctgcctgctgaaggatgctgctgtgatctcctggaccaaggatggagtgcacctgggccccaacaacagaacagtgctgattggagagtacctgcagatcaagggggccaccccccgggacagcggcctgtatgcctgcacagccagcaggacagtggacagcgagacctggtacttcatggtgaatgtgacagatgccatcagcagtggagatgatgaagatgacacagatggagcagaagattttgtgtctgagaacagcaacaacaagagggccccctactggaccaacacagagaagatggagaagaggctgcatgctgtgcctgctgccaacacagtgaagttccgctgcccagctgggggcaaccccatgcccaccatgcgctggctgaagaatggcaaggagttcaagcaggagcaccgcatcggcggctacaaggtgaggaaccagcactggagcctcatcatggagagcgtggtgcccagcgacaagggcaactacacctgtgtggtggagaatgaatatggcagcatcaaccacacctaccacctggatgtggtggagaggagcccccaccggcccatcctgcaggccggcctgcctgccaatgccagcacagtggtgggcggagatgtggagtttgtgtgcaaggtgtacagtgatgcccagccccacatccagtggatcaagcacgtggagaagaatggcagcaaatatggcccagatggcctgccctacctgaaggtgctgaagcacagcggcatcaacagcagcaatgctgaggtgctggccctcttcaacgtgacagaagcagatgctggggagtacatctgcaaggtgagcaactacatcggccaggccaaccagagcgcctggctgactgtgctgcccaagcagcaggcccctggccgggagaaggagatcacagccagcccagactacctggagatcgccatctactgcatcggggtcttcctgattgcctgcatggtggtgaccgtcatcctgtgcaggatgaagaacaccaccaagaagccagacttcagcagccagcctgctgtgcacaagctgaccaagaggatccccctgcggcggcaggtgacagtgtctgctgagagcagcagctccatgaacagcaacacccccctggtgcgcatcaccacccggctgagcagcacagctgacacccccatgctggccggcgtgtctgaatatgagctgcctgaggaccccaagtgggagttcccccgggacaagctgaccctgggcaagcccctgggggagggctgcttcggccaggtggtgatggccgaggccgtgggcatcgacaaggacaagcccaaggaggccgtgacagtggccgtgaagatgctgaaggatgatgccacagagaaggacctgagtgacctggtgtctgagatggagatgatgaagatgattggcaagcacaagaacatcatcaacctgctgggcgcctgcacccaggacggccccctgtatgtgattgtggagtatgccagcaagggcaacctgcgggagtacctgcgggcccggcggcccccaggcatggagtacagctatgacatcaacagagtgcctgaggagcagatgaccttcaaggacctggtgtcctgcacctaccagctggcccggggcatggagtacctggccagccagaagtgcatccaccgggacctggccgccagaaatgtgctggtgacagaaaataatgtgatgaagattgctgactttggcctggcccgggacatcaacaacatcgactactacaagaagaccaccaacggccgcctgcctgtgaagtggatggcccctgaggccctgtttgacagagtgtacacccaccagagtgatgtgtggagctttggagtgctgatgtgggagatcttcaccctgggcggcagcccctacccaggcatccctgtggaggagctgttcaagctgctgaaggagggccacaggatggacaagccagccaactgcaccaatgagctgtacatgatgatgagggactgctggcatgctgtgcccagccagaggcccaccttcaagcagctggtggaggacctggaccgcatcctgaccctgaccaccaatgagatctag

SEQ ID NO: 56501 - DNA, 2307 bp, Artificial Sequence
  derived and/or modified sequence
atggtgtcctggggccgcttcatctgcctggtggtggtgaccatggccaccctgagcctggcccggcccagcttcagcctggtggaggacaccaccctggagcctgaggagccccccaccaagtaccagatcagccagcctgaggtgtatgtggccgcccctggagagagcctggaggtgcgctgcctgctgaaggatgctgctgtgatctcctggaccaaggatggagtgcacctgggccccaacaacagaacagtgctgattggagagtacctgcagatcaagggggccaccccccgggacagcggcctgtatgcctgcacagccagcaggacagtggacagcgagacctggtacttcatggtgaatgtgacagatgccatcagcagtggagatgatgaagatgacacagatggagcagaagattttgtgtctgagaacagcaacaacaagagggccccctactggaccaacacagagaagatggagaagaggctgcatgctgtgcctgctgccaacacagtgaagttccgctgcccagctgggggcaaccccatgcccaccatgcgctggctgaagaatggcaaggagttcaagcaggagcaccgcatcggcggctacaaggtgaggaaccagcactggagcctcatcatggagagcgtggtgcccagcgacaagggcaactacacctgtgtggtggagaatgaatatggcagcatcaaccacacctaccacctggatgtggtggagaggagcccccaccggcccatcctgcaggccggcctgcctgccaatgccagcacagtggtgggcggagatgtggagtttgtgtgcaaggtgtacagtgatgcccagccccacatccagtggatcaagcacgtggagaagaatggcagcaaatatggcccagatggcctgccctacctgaaggtgctgaagcacagcggcatcaacagcagcaatgctgaggtgctggccctcttcaacgtgacagaagcagatgctggggagtacatctgcaaggtgagcaactacatcggccaggccaaccagagcgcctggctgactgtgctgcccaagcagcaggcccctggccgggagaaggagatcacagccagcccagactacctggagatcgccatctactgcatcggggtcttcctgattgcctgcatggtggtgaccgtcatcctgtgcaggatgaagaacaccaccaagaagccagacttcagcagccagcctgctgtgcacaagctgaccaagaggatccccctgcggcggcaggtgacagtgtctgctgagagcagcagctccatgaacagcaacacccccctggtgcgcatcaccacccggctgagcagcacagctgacacccccatgctggccggcgtgtctgaatatgagctgcctgaggaccccaagtgggagttcccccgggacaagctgaccctgggcaagcccctgggggagggctgcttcggccaggtggtgatggccgaggccgtgggcatcgacaaggacaagcccaaggaggccgtgacagtggccgtgaagatgctgaaggatgatgccacagagaaggacctgagtgacctggtgtctgagatggagatgatgaagatgattggcaagcacaagaacatcatcaacctgctgggcgcctgcacccaggacggccccctgtatgtgattgtggagtatgccagcaagggcaacctgcgggagtacctgcgggcccggcggcccccaggcatggagtacagctatgacatcaacagagtgcctgaggagcagatgaccttcaaggacctggtgtcctgcacctaccagctggcccggggcatggagtacctggccagccagaagtgcatccaccgggacctggccgccagaaatgtgctggtgacagaaaataatgtgatgaagattgctgactttggcctggcccgggacatcaacaacatcgactactacaagaagaccaccaacggccgcctgcctgtgaagtggatggcccctgaggccctgtttgacagagtgtacacccaccagagtgatgtgtggagctttggagtgctgatgtgggagatcttcaccctgggcggcagcccctacccaggcatccctgtggaggagctgttcaagctgctgaaggagggccacaggatggacaagccagccaactgcaccaatgagctgtacatgatgatgagggactgctggcatgctgtgcccagccagaggcccaccttcaagcagctggtggaggacctggaccgcatcctgaccctgaccaccaatgaatag

SEQ ID NO: 56502 - DNA, 2310 bp, Artificial Sequence
  derived and/or modified sequence
atggtgagctggggccggttcatctgcctggtggtggtgaccatggcaactttaagtctagcacgcccttccttctccctggtagaggacacgactttggagccggaggaaccacccaccaaataccaaatctcacagccagaggtctatgttgcagctccaggcgagtctctcgaagttcgatgcttactgaaggacgccgccgtgattagctggacaaaagatggcgtgcatctaggacctaacaaccgaaccgttttgatcggcgagtatttgcagattaagggcgcaactccccgcgattcaggtctgtacgcttgcaccgcatctcggactgtggactctgaaacctggtactttatggttaatgttaccgacgctatcagttccggggatgacgaagatgacacagacggcgctgaagatttcgtctccgagaattctaacaacaagagggccccttactggacgaataccgagaagatggaaaaacgactgcacgcggtgcccgctgccaacaccgtgaagtttagatgtccggctggcggtaaccccatgcccacgatgagatggctgaagaacggcaaggagtttaagcaggagcacaggatcggcggctacaaagttagaaaccagcattggagcctgatcatggaatccgtggtccctagcgacaaggggaactacacctgtgtggtagagaacgagtatgggtccataaaccacacttatcatctagacgtcgtggaacgaagcccacacagacctattctgcaggccggacttccagctaatgccagcaccgtggtcggaggggacgtagaattcgtctgcaaagtgtacagtgacgcacagccccatattcagtggatcaagcatgttgagaagaacggatccaagtatggacctgatggactgccttacctcaaagttcttaagcatagcggtattaactccagcaacgctgaggtgctggccctgtttaacgtgacggaagcagacgcaggggaatatatttgtaaagtttccaactacattggacaggccaatcaaagtgcctggctaacggtgctgcctaaacaacaagcacctggccgcgaaaaggaaattactgcgtcccctgactatctagagattgctatctactgcataggcgtgttcctgatcgcgtgtatggtagttactgtgatcctctgtagaatgaagaatacaacgaaaaaacctgatttctccagccaaccagctgtccacaagctgacaaagcgaatcccactgagaaggcaggtcacggtgtcagcagaatcttcttccagtatgaattcgaatacaccattggtgaggatcactacccgtctgtcttcaactgccgacacccctatgctggctggggttagcgaatacgagctgcccgaagatcctaagtgggagttcccacgggacaagttgactttaggaaagcctcttggagagggctgcttcggccaggtggtcatggcggaagccgtgggcattgacaaagataaacctaaggaagcggtaacggtggccgtaaagatgctaaaggacgatgccaccgaaaaagatttgtctgatctagtctctgaaatggagatgatgaaaatgattggcaaacacaagaatatcataaatctgctgggcgcctgcactcaggatggtcctctgtacgtaatcgtggagtacgcctccaaaggaaatttacgcgaatacttacgggcacgacgaccccccggtatggaatactcctacgacataaatcgagtccctgaagaacagatgacattcaaagatctggtgtcctgtacttaccagctcgccaggggaatggagtatttggcttctcagaagtgtattcacagagacctggcagccaggaatgttctagtgacagagaacaatgtcatgaagatagccgactttggactggctcgggacattaataacatcgattattacaagaagactaccaacggacggcttcctgtgaagtggatggctccggaagccctttttgatcgggtgtatacacaccagtcggacgtatggtcatttggggtactgatgtgggagatattcaccctgggcgggagtccatacccagggatcccagttgaggagctcttcaaactcctgaaggagggtcacaggatggataagcccgcgaattgtacaaatgagctgtacatgatgatgcgcgactgttggcacgccgtgccctcccagagacccacattcaagcagctggttgaagacctagaccgaattctgacgctgactaccaacgaaatttag

SEQ ID NO: 56503 - DNA, 2307 bp, Artificial Sequence
  derived and/or modified sequence
atggtgagctggggccggttcatctgcctggtggtggtgaccatggcaactttgtccctggctcgtcccagcttctctctcgtggaggacaccacactagagcccgaggagccccccaccaagtaccagatcagtcagccagaggtgtatgtggcagcacccggagaaagcttagaagtccggtgcctgctgaaggacgctgctgtcatcagctggacaaaagacggagtacaccttggccccaacaacaggaccgtactgataggagaatatctccagattaagggggccaccccaagggattctggcctgtacgcctgcactgcatccagaacagtcgacagcgagacatggtattttatggtgaacgtcactgatgccatcagcagcggcgacgatgaagatgacacagacggggccgaggatttcgtgtccgagaattctaacaataaacgcgccccctactggaccaacacagagaagatggagaagaggctgcacgccgtgccagccgccaacacagttaaatttagatgtcccgccggagggaaccctatgccaacaatgcgatggttaaagaatgggaaagaatttaagcaggagcaccgaatcggcggatataaagtccggaatcagcattggtctctgatcatggagtccgtcgtgccatccgacaagggaaattatacttgcgtcgtcgagaatgagtacggctccatcaatcatacctatcatctggacgtggtggagagatctcctcatcgacctatcttgcaagcaggcctgccagccaacgctagcactgtggttggcggtgacgtcgagtttgtatgtaaggtttactccgacgcccagcctcacattcaatggatcaaacatgtggagaagaacggatcaaaatacgggccagatggtctgccatatcttaaggttcttaagcactctggaatcaatagctccaatgctgaggtcctcgcattatttaacgtgaccgaggccgatgccggtgagtatatttgtaaagtgtcaaactatattggacaagccaatcagtcggcctggctcacggtgctgcccaaacagcaggctcctggaagggaaaaggaaatcaccgcttcacccgactatctggagatcgccatttattgtatcggcgtgttcctgatcgcatgtatggtggtcaccgttattctgtgcagaatgaaaaatactactaagaagccagacttctcctcacaacccgccgtgcataaacttaccaaacgtattcctctgaggcgacaggtgaccgtgtccgccgaatcctctagtagtatgaattctaatactccacttgtaagaatcacaactaggctcagtagcaccgccgacactccgatgcttgctggggttagcgagtacgagcttcccgaggaccccaaatgggaattcccccgtgacaagttaaccttggggaagccgctgggggaaggatgtttcgggcaagtagtgatggctgaggccgtgggtatcgacaaggataaaccaaaagaggccgtcaccgtcgccgtgaaaatgcttaaggacgacgccacggaaaaggatctgagcgatctggtgtccgagatggaaatgatgaagatgattggtaaacacaagaatataatcaaccttttgggcgcttgtacacaggatgggcccctatacgtgatagtcgagtacgcaagcaaaggtaatctccgtgagtacttgagagcaaggaggcctccgggcatggagtattcctatgacataaatcgggtgcccgaggaacagatgacatttaaagatttggtgagttgtacctaccagcttgcccgcggcatggaatacttggcaagtcaaaagtgtatccaccgggatctggccgcccgaaacgtgctcgtcacagagaacaatgtcatgaagattgccgacttcggcctggctagggacatcaataatatagattactataaaaagaccactaacgggcggttgcccgtgaagtggatggctcccgaggccttattcgaccgcgtgtacacacatcagagtgatgtctggagctttggcgtgctgatgtgggagatctttactctcggcgggagtccttatcctggcattcctgttgaggaactgtttaagttgctgaaggaaggacaccggatggacaagcccgcgaactgtactaacgagctttatatgatgatgcgagattgctggcatgccgtcccatctcagcgacccacctttaagcagctggtggaagatctggataggattctaaccctaacgaccaatgagtag

SEQ ID NO: 56504 - DNA, 2310 bp, Artificial Sequence
  derived and/or modified sequence
atggtgtcgtgggggcgatttatttgtctggttgtcgtgacgatggccacactctctcttgcacggccatcatttagtttggtggaagacactactctggaacctgaagagccgcctaccaagtatcagattagccaaccagaagtgtatgtggctgccccaggtgaatccctggaagtacgatgtctgctgaaggatgctgccgtgatcagctggactaaagatggggtccatctggggcctaacaacaggaccgtcctgatcggcgagtatctgcagattaagggggctactccaagagatagtggcttgtacgcatgtaccgcctctcggacggtcgatagcgaaacatggtacttcatggtcaacgtgacggacgcaatctccagcggtgacgatgaagatgataccgacggagctgaagactttgtgtccgagaactctaataacaagcgagcaccctattggacaaatacggaaaagatggaaaaacgattacacgccgtgccagctgccaacaccgtgaagtttcgatgtcctgccggaggcaatccgatgcctacaatgagatggctgaaaaacggcaaagagttcaagcaggagcacagaatcggcggatacaaggttaggaatcagcattggtcattgataatggagagcgtggtcccgtcagacaagggcaattacacttgtgttgtggagaatgaatatgggtccatcaaccacacttaccacctagacgttgtggaaaggtcaccacatagacctattctccaggccggactcccagccaatgccagcaccgtcgtcggcggagatgtggagtttgtgtgtaaagtgtacagcgacgcacagcctcacattcagtggattaagcacgtggagaaaaatggatctaaatacggccctgatggtctcccttacctgaaagtgctgaagcactcggggattaattccagcaatgcagaagttctggccctttttaatgtgaccgaggccgacgccggtgagtatatttgtaaggtatctaattatataggacaggcaaatcaatccgcatggctgaccgtcctgcccaagcagcaggcaccgggtcgagaaaaggagataacagccagccccgattacctggaaattgccatatattgcatcggcgtgttcctgattgcctgcatggtcgtcaccgtaattttatgccgcatgaagaacacgacaaaaaagccagactttagttcccaaccagccgtccataaactgacaaagaggattccactgcgacgacaagtgactgtaagcgcagaatctagcagcagcatgaatagcaatactcccctggtacgcatcacaactagattatccagcacggcagacacgcccatgctggccggagtgtctgagtacgaactccccgaagatccaaagtgggagtttcctcgggacaagctcacactcggcaaaccactgggcgaagggtgttttggtcaggtggttatggccgaagctgtgggcattgacaaggacaaaccgaaagaggctgtaacggtcgctgttaagatgctgaaagatgacgcaacagagaaggatctatccgacctggtcagcgagatggaaatgatgaagatgattgggaagcacaagaacatcataaatctcctaggcgcatgtacacaggatggcccactatacgtgattgtcgagtacgcttccaagggcaatttgagggaatatctgagggcaagacggccaccaggaatggaatacagctatgacatcaatcgagtcccagaggagcaaatgacgtttaaggatctggtgtcctgtacataccaacttgctcgcggtatggagtatctggcctcccaaaagtgtatccatcgggatctggctgctcgcaatgtgctggtgactgaaaataacgtgatgaaaatcgctgatttcggcctcgcccgtgatattaataatattgattattacaagaaaactaccaatgggagactgccagtgaagtggatggcacctgaggcattgttcgatagagtttatacccatcagagtgacgtgtggtcgttcggggttctaatgtgggaaatattcacgctaggaggaagcccctacccaggaatacccgtggaagagctcttcaagctcctgaaggaaggccatagaatggataaacctgcgaattgcaccaatgagctttacatgatgatgcgggactgctggcacgccgtgccctcccagcggccaacatttaagcagctcgttgaagacctagacagaattttgactctgacaactaacgagatttag

SEQ ID NO: 56505 - DNA, 2307 bp, Artificial Sequence
  derived and/or modified sequence
atggtatcatggggacgttttatctgtctcgtcgttgtgacaatggccacgcttagcttagcacgaccctccttctcactcgtggaggatacaactcttgaaccagaggagccccctaccaagtaccagatatcccaacccgaggtgtatgtagctgctcctggtgaatccctggaggtgcgatgtctgctgaaggatgctgctgtaatatcctggaccaaggacggtgtgcacttaggtccgaataatcgtaccgttctgatcggcgaatacttgcagatcaagggtgccacgccgcgtgactctggactgtatgcatgcacagcttctcgcacagtcgattccgaaacctggtattttatggtgaatgtcactgatgctataagctccggcgatgatgaggatgataccgacggagctgaggattttgtttccgagaattctaataacaagcgggcaccgtactggaccaatacggaaaagatggaaaaacgtctgcacgccgtccctgcagcgaacactgtcaaatttcggtgcccagccggaggaaatcctatgcccacaatgcggtggctaaaaaacggcaaggagttcaaacaggagcacagaatcgggggatacaaagtccggaaccaacattggagcctgatcatggagtccgtcgtgccttccgacaaggggaactacacctgcgtcgtcgaaaacgaatacgggtccatcaaccatacataccacctggatgtggtggagcggagcccacataggcctatccttcaagccggtttacccgcaaatgcctctacagtggttggaggcgatgtggagttcgtgtgtaaagtttattctgacgcacaaccacacattcagtggatcaagcacgtggagaagaacggttccaaatatggacccgacgggctcccgtatttgaaagtgttgaagcattcgggaatcaattctagcaacgccgaggttctggcgctgttcaacgtgaccgaagcagatgctggagagtatatctgtaaggtttccaactacatcggccaggctaaccagagcgcatggcttacagttttgcctaaacagcaagcaccaggcagagaaaaagagattaccgctagtcctgattacctggaaatcgctatctactgtataggcgttttcctgatcgcttgtatggtcgttaccgttatcctgtgccggatgaagaacaccacgaagaagccagacttttctagccagcccgctgtgcacaagttaacaaaaagaattcctctcagacgccaggttactgtgtccgctgagtcatcatcctcaatgaatagcaataccccgctcgtacggatcaccacccgactctcctccaccgcagatactcctatgctcgcgggagtctccgaatatgaactgcccgaggatccaaaatgggagtttcccagggacaaacttaccctgggaaagccccttggcgaggggtgcttcgggcaggtcgttatggctgaggctgtgggaattgacaaggacaagcccaaagaggccgttaccgtcgccgtgaagatgcttaaggatgatgctactgagaaagatctttccgatctagtcagcgagatggaaatgatgaagatgattgggaagcataagaatatcatcaacctgttgggcgcttgtactcaagatggcccactctatgtgatcgtggagtacgcatctaagggaaacctgagggagtaccttcgcgctcgcagacctccaggaatggagtactcgtacgatattaacagggtgcccgaagagcagatgacatttaaagacctggtctcctgtacttaccaactcgccaggggcatggagtatctggcatcccaaaaatgcatccacagggatctcgcagcgcgaaacgtgttggtgaccgagaataacgtgatgaagatcgctgattttgggctcgctcgcgacattaacaatatagactactacaaaaagaccaccaatggtcgactgcctgtgaaatggatggcccctgaggccctgttcgacagggtgtacactcaccagagcgatgtatggtcgtttggagtcctgatgtgggagattttcaccttgggagggtccccctatcccggaatccccgttgaagagctcttcaagctgctcaaagagggccaccgcatggacaagccagcaaactgtaccaatgaactttacatgatgatgcgggactgttggcacgctgtgccctctcagagacccactttcaagcaacttgtggaggatctggatcggatccttactcttacaacaaacgaatag

SEQ ID NO: 56506 - DNA, 2310 bp, Artificial Sequence
  derived and/or modified sequence
atggtgagctggggcagattcatctgcctggtggtggtgaccatggccaccctgagcctggccagacccagcttcagcctggtggaggacaccaccctggagcccgaggagccccccaccaagtaccagatcagccagcccgaggtgtacgtggccgcccccggcgagagcctggaggtgagatgcctgctgaaggacgccgccgtgatcagctggaccaaggacggcgtgcacctgggccccaacaacagaaccgtgctgatcggcgagtacctgcagatcaagggcgccacccccagagacagcggcctgtacgcctgcaccgccagcagaaccgtggacagcgagacctggtacttcatggtgaacgtgaccgacgccatcagcagcggcgacgacgaggacgacaccgacggcgccgaggacttcgtgagcgagaacagcaacaacaagagagccccctactggaccaacaccgagaagatggagaagagactgcacgccgtgcccgccgccaacaccgtgaagttcagatgccccgccggcggcaaccccatgcccaccatgagatggctgaagaacggcaaggagttcaagcaggagcacagaatcggcggctacaaggtgagaaaccagcactggagcctgatcatggagagcgtggtgcccagcgacaagggcaactacacctgcgtggtggagaacgagtacggcagcatcaaccacacctaccacctggacgtggtggagagaagcccccacagacccatcctgcaggccggcctgcccgccaacgccagcaccgtggtgggcggcgacgtggagttcgtgtgcaaggtgtacagcgacgcccagccccacatccagtggatcaagcacgtggagaagaacggcagcaagtacggccccgacggcctgccctacctgaaggtgctgaagcacagcggcatcaacagcagcaacgccgaggtgctggccctgttcaacgtgaccgaggccgacgccggcgagtacatctgcaaggtgagcaactacatcggccaggccaaccagagcgcctggctgaccgtgctgcccaagcagcaggcccccggcagagagaaggagatcaccgccagccccgactacctggagatcgccatctactgcatcggcgtgttcctgatcgcctgcatggtggtgaccgtgatcctgtgcagaatgaagaacaccaccaagaagcccgacttcagcagccagcccgccgtgcacaagctgaccaagagaatccccctgagaagacaggtgaccgtgagcgccgagagcagcagcagcatgaacagcaacacccccctggtgagaatcaccaccagactgagcagcaccgccgacacccccatgctggccggcgtgagcgagtacgagctgcccgaggaccccaagtgggagttccccagagacaagctgaccctgggcaagcccctgggcgagggctgcttcggccaggtggtgatggccgaggccgtgggcatcgacaaggacaagcccaaggaggccgtgaccgtggccgtgaagatgctgaaggacgacgccaccgagaaggacctgagcgacctggtgagcgagatggagatgatgaagatgatcggcaagcacaagaacatcatcaacctgctgggcgcctgcacccaggacggccccctgtacgtgatcgtggagtacgccagcaagggcaacctgagagagtacctgagagccagaagaccccccggcatggagtacagctacgacatcaacagagtgcccgaggagcagatgaccttcaaggacctggtgagctgcacctaccagctggccagaggcatggagtacctggccagccagaagtgcatccacagagacctggccgccagaaacgtgctggtgaccgagaacaacgtgatgaagatcgccgacttcggcctggccagagacatcaacaacatcgactactacaagaagaccaccaacggcagactgcccgtgaagtggatggcccccgaggccctgttcgacagagtgtacacccaccagagcgacgtgtggagcttcggcgtgctgatgtgggagatcttcaccctgggcggcagcccctaccccggcatccccgtggaggagctgttcaagctgctgaaggagggccacagaatggacaagcccgccaactgcaccaacgagctgtacatgatgatgagagactgctggcacgccgtgcccagccagagacccaccttcaagcagctggtggaggacctggacagaatcctgaccctgaccaccaacgagatctag

SEQ ID NO: 56507 - DNA, 2307 bp, Artificial Sequence
  derived and/or modified sequence
atggtgagctggggcagattcatctgcctggtggtggtgaccatggccaccctgagcctggccagacccagcttcagcctggtggaggacaccaccctggagcccgaggagccccccaccaagtaccagatcagccagcccgaggtgtacgtggccgcccccggcgagagcctggaggtgagatgcctgctgaaggacgccgccgtgatcagctggaccaaggacggcgtgcacctgggccccaacaacagaaccgtgctgatcggcgagtacctgcagatcaagggcgccacccccagagacagcggcctgtacgcctgcaccgccagcagaaccgtggacagcgagacctggtacttcatggtgaacgtgaccgacgccatcagcagcggcgacgacgaggacgacaccgacggcgccgaggacttcgtgagcgagaacagcaacaacaagagagccccctactggaccaacaccgagaagatggagaagagactgcacgccgtgcccgccgccaacaccgtgaagttcagatgccccgccggcggcaaccccatgcccaccatgagatggctgaagaacggcaaggagttcaagcaggagcacagaatcggcggctacaaggtgagaaaccagcactggagcctgatcatggagagcgtggtgcccagcgacaagggcaactacacctgcgtggtggagaacgagtacggcagcatcaaccacacctaccacctggacgtggtggagagaagcccccacagacccatcctgcaggccggcctgcccgccaacgccagcaccgtggtgggcggcgacgtggagttcgtgtgcaaggtgtacagcgacgcccagccccacatccagtggatcaagcacgtggagaagaacggcagcaagtacggccccgacggcctgccctacctgaaggtgctgaagcacagcggcatcaacagcagcaacgccgaggtgctggccctgttcaacgtgaccgaggccgacgccggcgagtacatctgcaaggtgagcaactacatcggccaggccaaccagagcgcctggctgaccgtgctgcccaagcagcaggcccccggcagagagaaggagatcaccgccagccccgactacctggagatcgccatctactgcatcggcgtgttcctgatcgcctgcatggtggtgaccgtgatcctgtgcagaatgaagaacaccaccaagaagcccgacttcagcagccagcccgccgtgcacaagctgaccaagagaatccccctgagaagacaggtgaccgtgagcgccgagagcagcagcagcatgaacagcaacacccccctggtgagaatcaccaccagactgagcagcaccgccgacacccccatgctggccggcgtgagcgagtacgagctgcccgaggaccccaagtgggagttccccagagacaagctgaccctgggcaagcccctgggcgagggctgcttcggccaggtggtgatggccgaggccgtgggcatcgacaaggacaagcccaaggaggccgtgaccgtggccgtgaagatgctgaaggacgacgccaccgagaaggacctgagcgacctggtgagcgagatggagatgatgaagatgatcggcaagcacaagaacatcatcaacctgctgggcgcctgcacccaggacggccccctgtacgtgatcgtggagtacgccagcaagggcaacctgagagagtacctgagagccagaagaccccccggcatggagtacagctacgacatcaacagagtgcccgaggagcagatgaccttcaaggacctggtgagctgcacctaccagctggccagaggcatggagtacctggccagccagaagtgcatccacagagacctggccgccagaaacgtgctggtgaccgagaacaacgtgatgaagatcgccgacttcggcctggccagagacatcaacaacatcgactactacaagaagaccaccaacggcagactgcccgtgaagtggatggcccccgaggccctgttcgacagagtgtacacccaccagagcgacgtgtggagcttcggcgtgctgatgtgggagatcttcaccctgggcggcagcccctaccccggcatccccgtggaggagctgttcaagctgctgaaggagggccacagaatggacaagcccgccaactgcaccaacgagctgtacatgatgatgagagactgctggcacgccgtgcccagccagagacccaccttcaagcagctggtggaggacctggacagaatcctgaccctgaccaccaacgagtag

SEQ ID NO: 56508 - protein, 709 aa, Artificial Sequence
  derived and/or modified sequence
MVSWGRFICLVVVTMATLSLARPSFSLVEDTTLEPEEPPTKYQISQPEVYVAAPGESLEVRCLLKDAAVISWTKDGVHLGPNNRTVLIGEYLQIKGATPRDSGLYACTASRTVDSETWYFMVNVTDAISSGDDEDDTDGAEDFVSENSNNKRAPYWTNTEKMEKRLHAVPAANTVKFRCPAGGNPMPTMRWLKNGKEFKQEHRIGGYKVRNQHWSLIMESVVPSDKGNYTCVVENEYGSINHTYHLDVVAPGREKEITASPDYLEIAIYCIGVFLIACMVVTVILCRMKNTTKKPDFSSQPAVHKLTKRIPLRRQVTVSAESSSSMNSNTPLVRITTRLSSTADTPMLAGVSEYELPEDPKWEFPRDKLTLGKPLGEGCFGQVVMAEAVGIDKDKPKEAVTVAVKMLKDDATEKDLSDLVSEMEMMKMIGKHKNIINLLGACTQDGPLYVIVEYASKGNLREYLRARRPPGMEYSYDINRVPEEQMTFKDLVSCTYQLARGMEYLASQKCIHRDLAARNVLVTENNVMKIADFGLARDINNIDYYKKTTNGRLPVKWMAPEALFDRVYTHQSDVWSFGVLMWEIFTLGGSPYPGIPVEELFKLLKEGHRMDKPANCTNELYMMMRDCWHAVPSQRPTFKQLVEDLDRILTLTTNEEYLDLSQPLEQYSPSYPDTRSSCSSGDDSVFSPDPMPYEPCLPQYPHINGSVKT

SEQ ID NO: 56509 - DNA, 3803 bp, Artificial Sequence
  derived and/or modified sequence
tgactgcagcagcagcggcagcgcctcggttcctgagcccaccgcaggctgaaggcattgcgcgtagtccatgcccgtagaggaagtgtgcagatgggattaacgtccacatggagatatggaagaggaccggggattggtaccgtaaccatggtcagctggggtcgtttcatctgcctggtcgtggtcaccatggcaaccttgtccctggcccggccctccttcagtttagttgaggataccacattagagccagaagagccaccaaccaaataccaaatctctcaaccagaagtgtacgtggctgcgccaggggagtcgctagaggtgcgctgcctgttgaaagatgccgccgtgatcagttggactaaggatggggtgcacttggggcccaacaataggacagtgcttattggggagtacttgcagataaagggcgccacgcctagagactccggcctctatgcttgtactgccagtaggactgtagacagtgaaacttggtacttcatggtgaatgtcacagatgccatctcatccggagatgatgaggatgacaccgatggtgcggaagattttgtcagtgagaacagtaacaacaagagagcaccatactggaccaacacagaaaagatggaaaagcggctccatgctgtgcctgcggccaacactgtcaagtttcgctgcccagccggggggaacccaatgccaaccatgcggtggctgaaaaacgggaaggagtttaagcaggagcatcgcattggaggctacaaggtacgaaaccagcactggagcctcattatggaaagtgtggtcccatctgacaagggaaattatacctgtgtagtggagaatgaatacgggtccatcaatcacacgtaccacctggatgttgtggcgcctggaagagaaaaggagattacagcttccccagactacctggagatagccatttactgcataggggtcttcttaatcgcctgtatggtggtaacagtcatcctgtgccgaatgaagaacacgaccaagaagccagacttcagcagccagccggctgtgcacaagctgaccaaacgtatccccctgcggagacaggtaacagtttcggctgagtccagctcctccatgaactccaacaccccgctggtgaggataacaacacgcctctcttcaacggcagacacccccatgctggcaggggtctccgagtatgaacttccagaggacccaaaatgggagtttccaagagataagctgacactgggcaagcccctgggagaaggttgctttgggcaagtggtcatggcggaagcagtgggaattgacaaagacaagcccaaggaggcggtcaccgtggccgtgaagatgttgaaagatgatgccacagagaaagacctttctgatctggtgtcagagatggagatgatgaagatgattgggaaacacaagaatatcataaatcttcttggagcctgcacacaggatgggcctctctatgtcatagttgagtatgcctctaaaggcaacctccgagaatacctccgagcccggaggccacccgggatggagtactcctatgacattaaccgtgttcctgaggagcagatgaccttcaaggacttggtgtcatgcacctaccagctggccagaggcatggagtacttggcttcccaaaaatgtattcatcgagatttagcagccagaaatgttttggtaacagaaaacaatgtgatgaaaatagcagactttggactcgccagagatatcaacaatatagactattacaaaaagaccaccaatgggcggcttccagtcaagtggatggctccagaagccctgtttgatagagtatacactcatcagagtgatgtctggtccttcggggtgttaatgtgggagatcttcactttagggggctcgccctacccagggattcccgtggaggaactttttaagctgctgaaggaaggacacagaatggataagccagccaactgcaccaacgaactgtacatgatgatgagggactgttggcatgcagtgccctcccagagaccaacgttcaagcagttggtagaagacttggatcgaattctcactctcacaaccaatgaggaatacttggacctcagccaacctctcgaacagtattcacctagttaccctgacacaagaagttcttgttcttcaggagatgattctgttttttctccagaccccatgccttacgaaccatgccttcctcagtatccacacataaacggcagtgttaaaacatgaatgactgtgtctgcctgtccccaaacaggacagcactgggaacctagctacactgagcagggagaccatgcctcccagagcttgttgtctccacttgtatatatggatcagaggagtaaataattggaaaagtaatcagcatatgtgtaaagatttatacagttgaaaacttgtaatcttccccaggaggagaagaaggtttctggagcagtggactgccacaagccaccatgtaacccctctcacctgccgtgcgtactggctgtggaccagtaggactcaaggtggacgtgcgttctgccttccttgttaattttgtaataattggagaagatttatgtcagcacacacttacagagcacaaatgcagtatataggtgctggatgtatgtaaatatattcaaattatgtataaatatatattatatatttacaaggagttattttttgtattgattttaaatggatgtcccaatgcacctagaaaattggtctctctttttttaatagctatttgctaaatgctgttcttacacataatttcttaattttcaccgagcagaggtggaaaaatacttttgctttcagggaaaatggtataacgttaatttattaataaattggtaatatacaaaacaattaatcatttatagttttttttgtaatttaagtggcatttctatgcaggcagcacagcagactagttaatctattgcttggacttaactagttatcagatcctttgaaaagagaatatttacaatatatgactaatttggggaaaatgaagttttgatttatttgtgtttaaatgctgctgtcagacgattgttcttagacctcctaaatgccccatattaaaagaactcattcataggaaggtgtttcattttggtgtgcaaccctgtcattacgtcaacgcaacgtctaactggacttcccaagataaatggtaccagcgtcctcttaaaagatgccttaatccattccttgaggacagaccttagttgaaatgatagcagaatgtgcttctctctggcagctggccttctgcttctgagttgcacattaatcagattagcctgtattctcttcagtgaattttgataatggcttccagactctttggcgttggagacgcctgttaggatcttcaagtcccatcatagaaaattgaaacacagagttgttctgctgatagttttggggatacgtccatctttttaagggattgctttcatctaattctggcaggacctcaccaaaagatccagcctcatacctacatcagacaaaatatcgccgttgttccttctgtactaaagtattgtgttttgctttggaaacacccactcactttgcaatagccgtgcaagatgaatgcagattacactgatcttatgtgttacaaaattggagaaagtatttaataaaacctgttaatttttatactgacaataaaaatgtttctacagatattaatgttaacaagacaaaataaatgtcacgcaacttattttttt

SEQ ID NO: 56510 - DNA, 2130 bp, Artificial Sequence
  derived and/or modified sequence
atggtctcatggggacgtttcatctgcctcgtcgtagtcacaatggcaacgttatctttggccaggcctagcttttccctagttgaagacaccaccctggagccggaggagcctcccactaaatatcagattagtcagccagaagtgtacgtggcagcccctggagaaagcttggaagtccgatgtttgttaaaagatgccgctgtaatctcatggacaaaggatggggtgcatcttggccctaacaaccggacagtcctcattggggaatacctgcaaattaagggcgccactccccgggattctggcttatacgcttgtactgctagccggacagtggactctgaaacctggtactttatggtgaacgtcactgatgccataagctctggcgacgatgaggacgacactgatggtgccgaagactttgttagcgagaattccaataataaacgcgctccttactggaccaacaccgaaaagatggagaagagactccatgctgtccccgcggccaatacagtaaagttccgttgcccagctgggggaaacccaatgccgaccatgcggtggctgaaaaacggaaaagagtttaagcaggagcacagaataggaggatacaaggtgcgaaaccagcattggtccctgattatggaaagcgtggtgcctagtgataaggggaattacacttgtgtcgtcgagaatgaatatggatccatcaaccacacgtatcatctggatgtggtggcccccgggcgggaaaaggagataacggcctcaccagactatctggaaatagccatttactgtataggagtattccttattgcctgtatggtagtgaccgtcatcctgtgccggatgaagaacaccacaaagaagccagatttttcctcgcagcccgcggttcataaacttaccaaacggatcccccttcggcgtcaagtgacggtatccgctgaatcctcaagcagcatgaatagcaacacaccactggtgcgcatcactacccgcctgtccagcaccgccgataccccaatgctagccggggtgagcgagtacgagttgccagaagaccctaagtgggaatttcccagagacaaattaaccctgggtaaacccctcggggagggctgttttggacaagtggttatggccgaagccgtggggatcgacaaagataagcctaaagaagctgtgactgtagccgtgaaaatgctgaaagacgacgcaacagagaaggatttatctgatctcgtgagtgagatggagatgatgaagatgataggaaagcataaaaatatcataaacctgctgggtgcctgcacgcaagacggccccctgtatgtcattgtggaatatgcgtccaagggtaacctgagggaatacctccgggcccggagaccccctggcatggaatattcctacgatatcaacagggtgcctgaagaacagatgacgttcaaagatctggtgagttgcacgtatcaactcgcgagggggatggaatacttagcgtcccaaaagtgcatccatagggatctcgccgccagaaacgtgctggtgacagaaaataacgtgatgaaaatcgccgactttgggttggcccgggacattaacaatatagactactataaaaagaccaccaacggacggctaccagtgaagtggatggctcccgaagcactctttgatagggtttacactcatcagagcgacgtctggtcctttggcgttctcatgtgggaaattttcaccctgggcggatcaccatatcctggcataccagtggaagagctgtttaagctattgaaagaaggtcatcggatggataagccagcgaactgtactaatgagctatacatgatgatgcgcgactgctggcacgcggtgccatcccaaagaccaacctttaagcaactggtggaggacctagacaggattctcacactcacaaccaacgaggagtacctcgacctaagtcagccgctggagcaatatagcccatcctatcccgacacgcggagcagctgctcttccggagacgattctgtgttctctccggacccaatgccttacgaaccctgcctccctcaatacccacacatcaatggttctgtcaagacctag

SEQ ID NO: 56511 - DNA, 2130 bp, Artificial Sequence
  derived and/or modified sequence
atggtgtcctggggccgcttcatctgcctggtggtggtgaccatggccaccctgagcctggcccggcccagcttcagcctggtggaggacaccaccctggagcctgaggagccccccaccaagtaccagatcagccagcctgaggtgtatgtggccgcccctggagagagcctggaggtgcgctgcctgctgaaggatgctgctgtgatctcctggaccaaggatggagtgcacctgggccccaacaacagaacagtgctgattggagagtacctgcagatcaagggggccaccccccgggacagcggcctgtatgcctgcacagccagcaggacagtggacagcgagacctggtacttcatggtgaatgtgacagatgccatcagcagtggagatgatgaagatgacacagatggagcagaagattttgtgtctgagaacagcaacaacaagagggccccctactggaccaacacagagaagatggagaagaggctgcatgctgtgcctgctgccaacacagtgaagttccgctgcccagctgggggcaaccccatgcccaccatgcgctggctgaagaatggcaaggagttcaagcaggagcaccgcatcggcggctacaaggtgaggaaccagcactggagcctcatcatggagagcgtggtgcccagcgacaagggcaactacacctgtgtggtggagaatgaatatggcagcatcaaccacacctaccacctggatgtggtggcccctggccgggagaaggagatcacagccagcccagactacctggagatcgccatctactgcattggagtcttcctgattgcctgcatggtggtgaccgtcatcctgtgcaggatgaagaacaccaccaagaagccagacttcagcagccagcctgctgtgcacaagctgaccaagaggatccccctgcggcggcaggtgacagtgtctgctgagagcagcagctccatgaacagcaacacccccctggtgcgcatcaccacccggctgagcagcacagctgacacccccatgctggccggcgtgtctgaatatgagctgcctgaggaccccaagtgggagttcccccgggacaagctgaccctgggcaagcccctgggggagggctgcttcggccaggtggtgatggccgaggccgtgggcatcgacaaggacaagcccaaggaggccgtgacagtggccgtgaagatgctgaaggatgatgccacagagaaggacctgagtgacctggtgtctgagatggagatgatgaagatgattggcaagcacaagaacatcatcaacctgctgggcgcctgcacccaggacggccccctgtatgtgattgtggagtatgccagcaaaggaaacctgcgggagtacctgcgggcccggcggcccccaggcatggagtacagctatgacatcaacagagtgcctgaggagcagatgaccttcaaggacctggtgtcctgcacctaccagctggcccggggcatggagtacctggccagccagaagtgcatccaccgggacctggccgccagaaatgtgctggtgacagagaacaacgtgatgaagattgctgactttggcctggcccgggacatcaacaacatcgactactacaagaagaccaccaacggccgcctgcctgtgaagtggatggcccctgaggccctgtttgacagagtgtacacccaccagagtgatgtgtggagctttggagtgctgatgtgggagatcttcaccctgggcggcagcccctacccaggcatccctgtggaggagctgttcaagctgctgaaggagggccacaggatggacaagccagccaactgcaccaatgagctgtacatgatgatgagggactgctggcatgctgtgcccagccagaggcccaccttcaagcagctggtggaggacctggaccgcatcctgaccctgaccaccaatgaggagtacctggacctgagccagcccctggagcagtacagccccagctacccagacaccaggagcagctgcagcagtggagatgacagcgtcttctccccagaccccatgccctatgagccctgcctgccccagtacccccacatcaatggatctgtgaagacctag

SEQ ID NO: 56512 - DNA, 2130 bp, Artificial Sequence
  derived and/or modified sequence
atggtgagctggggccggttcatctgcctggtggtggtgaccatggccacattgtctcttgctcgcccttctttctcactggttgaggataccactctggaaccggaggaacctcccaccaagtatcaaatcagccagccagaggtttacgtagcagcccccggagagtctctcgaggtgcgatgcctcttaaaagacgcggccgtgatttcctggacgaaagatggagtgcacctgggaccaaataatcgcactgtgctaattggcgagtacttgcaaataaagggggcaacccctagagactctggcctgtatgcttgcacagccagcagaaccgtcgacagcgagacatggtactttatggtcaatgtgacggacgccatctcctccggtgacgacgaagatgacacagacggagcggaagactttgtttcagaaaattccaacaacaaaagagcaccatattggacgaatactgaaaagatggaaaagagactccatgcggttcctgccgccaacaccgtcaaattccggtgtcccgccggggggaatccaatgcctactatgaggtggctgaaaaatgggaaggagttcaaacaagaacatagaataggtggctacaaagtgcgcaatcaacattggtcactgattatggaatccgtcgtgccctcggataaaggcaattacacgtgtgtggtagaaaacgagtatggcagtatcaatcacacctaccatttggatgtcgtcgctcccggccgagaaaaagagattactgcatccccggactacctggagatcgctatctattgtattggagtttttctaattgcctgcatggtcgtcactgtgattctgtgtcgaatgaaaaacacaactaagaaacctgacttttcttcccagcccgcagtgcacaagctgaccaagcggattccattgcgccggcaagtaacagttagtgccgagagcagtagcagtatgaatagtaatacacccctcgtacggattaccacgaggctttctagcaccgccgatacccctatgttggccggcgtctctgagtacgaactgccagaggatcccaaatgggagttccctcgcgataaactgaccttggggaagccattgggcgaggggtgctttgggcaagttgtcatggccgaggctgtgggaatagataaagataaacccaaagaggccgtgaccgtcgctgttaaaatgttgaaggatgatgcaactgagaaagatctgagcgatctcgtcagtgaaatggaaatgatgaagatgataggcaaacataagaatatcataaacctcctgggggcctgcactcaggatggacctctctacgtgattgtcgaatacgccagcaagggcaatctgagggagtatttgagggcaaggaggccacctggcatggaatatagttacgacattaatcgggtccccgaggagcagatgacattcaaggatttagtcagctgcacttatcagctcgcgcgaggcatggagtatttggcctctcagaaatgtattcaccgggatctggccgctaggaacgttctggtaaccgaaaacaatgtcatgaagattgcagactttggcctcgcgagggatataaacaatatagactactacaaaaagaccaccaacggacgactcccagtgaagtggatggccccagaagctcttttcgatcgcgtttacacccatcagtctgacgtgtggagcttcggtgtgctcatgtgggaaatctttactctggggggctccccttatcctgggataccagtggaagaactgtttaagctacttaaagaaggccaccgcatggataaaccagctaactgcacaaacgaactctatatgatgatgagagattgctggcacgcggtaccaagtcagcgacctacgtttaaacagctcgtggaagacctggatcgtatactaactctgacaacgaacgaagaatacctagatctcagccaacctctggagcagtactctccctcttatccagatacacgctcttcctgtagtagcggtgacgactcagtgttctcaccagaccccatgccttatgagccatgcctccctcagtatccccatattaatggctcggtgaaaacttag

SEQ ID NO: 56513 - DNA, 2130 bp, Artificial Sequence
  derived and/or modified sequence
atggtgtcttggggcaggtttatttgcctcgtggtcgtgacgatggccactctatctcttgcgaggccctctttctccctcgttgaggatacaacactggagccagaggaaccaccgaccaagtaccagatttcccagcctgaagtttatgtggcggcacctggggaatccctggaagtgcgatgtcttttgaaggacgccgcagttattagctggaccaaagatggagtgcacctggggcctaataatcggactgtactcattggcgagtacctgcagatcaaaggagctactcccagagatagtggcctgtatgcgtgcactgccagccggaccgtggactccgaaacctggtacttcatggtgaatgttacggatgcaatctcttcaggagatgatgaagatgatactgatggggctgaagactttgtgagcgaaaattctaataacaagcgggcaccctactggaccaatactgagaagatggaaaaacgactgcacgccgtgccggctgcaaatacagttaagtttagatgtccggctggaggcaatcccatgcccactatgaggtggctgaagaacggaaaggagttcaagcaggaacacagaattggcggttataaggtgagaaatcagcactggtcactgatcatggagagtgtggttccatctgacaagggaaactatacttgtgttgtggaaaatgagtacggctctataaatcatacctaccatctcgacgtggtcgcacctggacgcgagaaagagattacagccagcccagattacctggagatcgcaatctactgtattggcgtttttctgattgcctgtatggtcgtgacggtgattctgtgtcggatgaagaatactaccaagaaacctgattttagctctcagcctgctgttcacaagctgactaaaaggatcccccttcggaggcaggtgacggttagcgccgaatcctcaagctccatgaactctaatactccactcgtgcggattacaacccgactttcatcgactgctgatacacctatgctggctggggtgagcgaatacgagttgcctgaagaccccaagtgggagtttcctagagataagctgacactgggcaagccgctgggggagggttgttttgggcaagtcgttatggccgaagccgtcggtatcgacaaagacaagcccaaagaggcagtgacagtggccgtgaagatgttgaaagatgatgccaccgagaaagacctttcggacctggtttctgagatggaaatgatgaagatgatcggcaaacacaagaacataattaatctgctcggcgcatgcacacaggacgggccactctatgtaattgtcgagtatgccagcaaaggtaatcttcgagaatatctgagggctaggcgccctcctgggatggaatattcttatgatatcaacagggttccagaggagcagatgactttcaaggaccttgttagttgtacataccagctggcccgaggcatggaatatctcgcaagccagaagtgcattcacagagacctcgccgctcgaaacgtgctggtaacagaaaataatgtgatgaagatagcagattttggacttgcgagggacattaataatatagattactataagaagaccacgaacggaaggttacccgtgaaatggatggcccctgaggctctgttcgaccgcgtgtacacacatcagtctgatgtatggagctttggagttctaatgtgggaaattttcacattgggcggatctccatatcctgggattcccgtcgaagagctattcaaactcctgaaagaagggcaccggatggataagcctgccaattgtacaaacgaactctacatgatgatgagggactgctggcatgctgtgccttctcagaggccgacttttaaacagctggtagaagatcttgaccgcatcttaacactcacaacaaatgaagagtaccttgacctctcccagcccttagaacaatattctcccagttacccagatacaagatcctcctgtagcagcggtgatgacagcgtgttttctcctgatcctatgccctatgagccttgcctacctcagtaccctcatataaacggatccgttaagacatag

SEQ ID NO: 56514 - DNA, 2130 bp, Artificial Sequence
  derived and/or modified sequence
atggtgagctggggcagattcatctgcctggtggtggtgaccatggccaccctgagcctggccagacccagcttcagcctggtggaggacaccaccctggagcccgaggagccccccaccaagtaccagatcagccagcccgaggtgtacgtggccgcccccggcgagagcctggaggtgagatgcctgctgaaggacgccgccgtgatcagctggaccaaggacggcgtgcacctgggccccaacaacagaaccgtgctgatcggcgagtacctgcagatcaagggcgccacccccagagacagcggcctgtacgcctgcaccgccagcagaaccgtggacagcgagacctggtacttcatggtgaacgtgaccgacgccatcagcagcggcgacgacgaggacgacaccgacggcgccgaggacttcgtgagcgagaacagcaacaacaagagagccccctactggaccaacaccgagaagatggagaagagactgcacgccgtgcccgccgccaacaccgtgaagttcagatgccccgccggcggcaaccccatgcccaccatgagatggctgaagaacggcaaggagttcaagcaggagcacagaatcggcggctacaaggtgagaaaccagcactggagcctgatcatggagagcgtggtgcccagcgacaagggcaactacacctgcgtggtggagaacgagtacggcagcatcaaccacacctaccacctggacgtggtggcccccggcagagagaaggagatcaccgccagccccgactacctggagatcgccatctactgcatcggcgtgttcctgatcgcctgcatggtggtgaccgtgatcctgtgcagaatgaagaacaccaccaagaagcccgacttcagcagccagcccgccgtgcacaagctgaccaagagaatccccctgagaagacaggtgaccgtgagcgccgagagcagcagcagcatgaacagcaacacccccctggtgagaatcaccaccagactgagcagcaccgccgacacccccatgctggccggcgtgagcgagtacgagctgcccgaggaccccaagtgggagttccccagagacaagctgaccctgggcaagcccctgggcgagggctgcttcggccaggtggtgatggccgaggccgtgggcatcgacaaggacaagcccaaggaggccgtgaccgtggccgtgaagatgctgaaggacgacgccaccgagaaggacctgagcgacctggtgagcgagatggagatgatgaagatgatcggcaagcacaagaacatcatcaacctgctgggcgcctgcacccaggacggccccctgtacgtgatcgtggagtacgccagcaagggcaacctgagagagtacctgagagccagaagaccccccggcatggagtacagctacgacatcaacagagtgcccgaggagcagatgaccttcaaggacctggtgagctgcacctaccagctggccagaggcatggagtacctggccagccagaagtgcatccacagagacctggccgccagaaacgtgctggtgaccgagaacaacgtgatgaagatcgccgacttcggcctggccagagacatcaacaacatcgactactacaagaagaccaccaacggcagactgcccgtgaagtggatggcccccgaggccctgttcgacagagtgtacacccaccagagcgacgtgtggagcttcggcgtgctgatgtgggagatcttcaccctgggcggcagcccctaccccggcatccccgtggaggagctgttcaagctgctgaaggagggccacagaatggacaagcccgccaactgcaccaacgagctgtacatgatgatgagagactgctggcacgccgtgcccagccagagacccaccttcaagcagctggtggaggacctggacagaatcctgaccctgaccaccaacgaggagtacctggacctgagccagcccctggagcagtacagccccagctaccccgacaccagaagcagctgcagcagcggcgacgacagcgtgttcagccccgaccccatgccctacgagccctgcctgccccagtacccccacatcaacggcagcgtgaagacctag

SEQ ID NO: 56515 - protein, 669 aa, Artificial Sequence
  derived and/or modified sequence
MVSWGRFICLVVVTMATLSLARPSFSLVEDTTLEPEDAISSGDDEDDTDGAEDFVSENSNNKRAPYWTNTEKMEKRLHAVPAANTVKFRCPAGGNPMPTMRWLKNGKEFKQEHRIGGYKVRNQHWSLIMESVVPSDKGNYTCVVENEYGSINHTYHLDVVERSPHRPILQAGLPANASTVVGGDVEFVCKVYSDAQPHIQWIKHVEKNGSKYGPDGLPYLKVLKAAGVNTTDKEIEVLYIRNVTFEDAGEYTCLAGNSIGISFHSAWLTVLPAPGREKEITASPDYLEIAIYCIGVFLIACMVVTVILCRMKNTTKKPDFSSQPAVHKLTKRIPLRRQVSAESSSSMNSNTPLVRITTRLSSTADTPMLAGVSEYELPEDPKWEFPRDKLTLGKPLGEGCFGQVVMAEAVGIDKDKPKEAVTVAVKMLKDDATEKDLSDLVSEMEMMKMIGKHKNIINLLGACTQDGPLYVIVEYASKGNLREYLRARRPPGMEYSYDINRVPEEQMTFKDLVSCTYQLARGMEYLASQKCIHRDLAARNVLVTENNVMKIADFGLARDINNIDYYKKTTNGRLPVKWMAPEALFDRVYTHQSDVWSFGVLMWEIFTLGGSPYPGIPVEELFKLLKEGHRMDKPANCTNELYMMMRDCWHAVPSQRPTFKQLVEDLDRI

SEQ ID NO: 56516 - protein, 707 aa, Artificial Sequence
  derived and/or modified sequence
MVSWGRFICLVVVTMATLSLARPSFSLVEDTTLEPEDAISSGDDEDDTDGAEDFVSENSNNKRAPYWTNTEKMEKRLHAVPAANTVKFRCPAGGNPMPTMRWLKNGKEFKQEHRIGGYKVRNQHWSLIMESVVPSDKGNYTCVVENEYGSINHTYHLDVVERSPHRPILQAGLPANASTVVGGDVEFVCKVYSDAQPHIQWIKHVEKNGSKYGPDGLPYLKVLKAAGVNTTDKEIEVLYIRNVTFEDAGEYTCLAGNSIGISFHSAWLTVLPAPGREKEITASPDYLEIAIYCIGVFLIACMVVTVILCRMKNTTKKPDFSSQPAVHKLTKRIPLRRQVTVSAESSSSMNSNTPLVRITTRLSSTADTPMLAGVSEYELPEDPKWEFPRDKLTLGKPLGEGCFGQVVMAEAVGIDKDKPKEAVTVAVKMLKDDATEKDLSDLVSEMEMMKMIGKHKNIINLLGACTQDGPLYVIVEYASKGNLREYLRARRPPGMEYSYDINRVPEEQMTFKDLVSCTYQLARGMEYLASQKCIHRDLAARNVLVTENNVMKIADFGLARDINNIDYYKKTTNGRLPVKWMAPEALFDRVYTHQSDVWSFGVLMWEIFTLGGSPYPGIPVEELFKLLKEGHRMDKPANCTNELYMMMRDCWHAVPSQRPTFKQLVEDLDRILTLTTNEEEKKVSGAVDCHKPPCNPSHLPCVLAVDQ

SEQ ID NO: 56517 - DNA, 2593 bp, Artificial Sequence
  derived and/or modified sequence
cgagggagcgcgcgcggccgccacaaagctcgggcgccgcggggctgcatgcggcgtacctggcccggcgcggcgactgctctccgggctggcgggggccggccgcgagccccgggggccccgaggccgcagcttgcctgcgcgctctgagccttcgcaactcgcgagcaaagtttggtggaggcaacgccaagcctgagtcctttcttcctctcgttccccaaatccgagggcagcccgcgggcgtcatgcccgcgctcctccgcagcctggggtacgcgtgaagcccgggaggcttggcgccggcgaagacccaaggaccactcttctgcgtttggagttgctccccgcaaccccgggctcgtcgctttctccatcccgacccacgcggggcgcggggacaacacaggtcgcggaggagcgttgccattcaagtgactgcagcagcagcggcagcgcctcggttcctgagcccaccgcaggctgaaggcattgcgcgtagtccatgcccgtagaggaagtgtgcagatgggattaacgtccacatggagatatggaagaggaccggggattggtaccgtaaccatggtcagctggggtcgtttcatctgcctggtcgtggtcaccatggcaaccttgtccctggcccggccctccttcagtttagttgaggataccacattagagccagaagatgccatctcatccggagatgatgaggatgacaccgatggtgcggaagattttgtcagtgagaacagtaacaacaagagagcaccatactggaccaacacagaaaagatggaaaagcggctccatgctgtgcctgcggccaacactgtcaagtttcgctgcccagccggggggaacccaatgccaaccatgcggtggctgaaaaacgggaaggagtttaagcaggagcatcgcattggaggctacaaggtacgaaaccagcactggagcctcattatggaaagtgtggtcccatctgacaagggaaattatacctgtgtagtggagaatgaatacgggtccatcaatcacacgtaccacctggatgttgtggagcgatcgcctcaccggcccatcctccaagccggactgccggcaaatgcctccacagtggtcggaggagacgtagagtttgtctgcaaggtttacagtgatgcccagccccacatccagtggatcaagcacgtggaaaagaacggcagtaaatacgggcccgacgggctgccctacctcaaggttctcaaggccgccggtgttaacaccacggacaaagagattgaggttctctatattcggaatgtaacttttgaggacgctggggaatatacgtgcttggcgggtaattctattgggatatcctttcactctgcatggttgacagttctgccagcgcctggaagagaaaaggagattacagcttccccagactacctggagatagccatttactgcataggggtcttcttaatcgcctgtatggtggtaacagtcatcctgtgccgaatgaagaacacgaccaagaagccagacttcagcagccagccggctgtgcacaagctgaccaaacgtatccccctgcggagacaggtttcggctgagtccagctcctccatgaactccaacaccccgctggtgaggataacaacacgcctctcttcaacggcagacacccccatgctggcaggggtctccgagtatgaacttccagaggacccaaaatgggagtttccaagagataagctgacactgggcaagcccctgggagaaggttgctttgggcaagtggtcatggcggaagcagtgggaattgacaaagacaagcccaaggaggcggtcaccgtggccgtgaagatgttgaaagatgatgccacagagaaagacctttctgatctggtgtcagagatggagatgatgaagatgattgggaaacacaagaatatcataaatcttcttggagcctgcacacaggatgggcctctctatgtcatagttgagtatgcctctaaaggcaacctccgagaatacctccgagcccggaggccacccgggatggagtactcctatgacattaaccgtgttcctgaggagcagatgaccttcaaggacttggtgtcatgcacctaccagctggccagaggcatggagtacttggcttcccaaaaatgtattcatcgagatttagcagccagaaatgttttggtaacagaaaacaatgtgatgaaaatagcagactttggactcgccagagatatcaacaatatagactattacaaaaagaccaccaatgggcggcttccagtcaagtggatggctccagaagccctgtttgatagagtatacactcatcagagtgatgtctggtccttcggggtgttaatgtgggagatcttcactttagggggctcgccctacccagggattcccgtggaggaactttttaagctgctgaaggaaggacacagaatggataagccagccaactgcaccaacgaactgtacatgatgatgagggactgttggcatgcagtgccctcccagagaccaacgttcaagcagttggtagaagacttggatcgaattc

SEQ ID NO: 56518 - DNA, 3690 bp, Artificial Sequence
  derived and/or modified sequence
aatttgttgaggaatttccccctagccttgaccccttgacagctcccgctcctactcagtgctggggagaagtagggaggccttaagcgaagagatgggtctgcactttggaggagccggacactgttgactttcctgatgtgaaatctacccaggaacaaaacaccagtgactgcagcagcagcggcagcgcctcggttcctgagcccaccgcaggctgaaggcattgcgcgtagtccatgcccgtagaggaagtgtgcagatgggattaacgtccacatggagatatggaagaggaccggggattggtaccgtaaccatggtcagctggggtcgtttcatctgcctggtcgtggtcaccatggcaaccttgtccctggcccggccctccttcagtttagttgaggataccacattagagccagaagatgccatctcatccggagatgatgaggatgacaccgatggtgcggaagattttgtcagtgagaacagtaacaacaagagagcaccatactggaccaacacagaaaagatggaaaagcggctccatgctgtgcctgcggccaacactgtcaagtttcgctgcccagccggggggaacccaatgccaaccatgcggtggctgaaaaacgggaaggagtttaagcaggagcatcgcattggaggctacaaggtacgaaaccagcactggagcctcattatggaaagtgtggtcccatctgacaagggaaattatacctgtgtagtggagaatgaatacgggtccatcaatcacacgtaccacctggatgttgtggagcgatcgcctcaccggcccatcctccaagccggactgccggcaaatgcctccacagtggtcggaggagacgtagagtttgtctgcaaggtttacagtgatgcccagccccacatccagtggatcaagcacgtggaaaagaacggcagtaaatacgggcccgacgggctgccctacctcaaggttctcaaggccgccggtgttaacaccacggacaaagagattgaggttctctatattcggaatgtaacttttgaggacgctggggaatatacgtgcttggcgggtaattctattgggatatcctttcactctgcatggttgacagttctgccagcgcctggaagagaaaaggagattacagcttccccagactacctggagatagccatttactgcataggggtcttcttaatcgcctgtatggtggtaacagtcatcctgtgccgaatgaagaacacgaccaagaagccagacttcagcagccagccggctgtgcacaagctgaccaaacgtatccccctgcggagacaggtaacagtttcggctgagtccagctcctccatgaactccaacaccccgctggtgaggataacaacacgcctctcttcaacggcagacacccccatgctggcaggggtctccgagtatgaacttccagaggacccaaaatgggagtttccaagagataagctgacactgggcaagcccctgggagaaggttgctttgggcaagtggtcatggcggaagcagtgggaattgacaaagacaagcccaaggaggcggtcaccgtggccgtgaagatgttgaaagatgatgccacagagaaagacctttctgatctggtgtcagagatggagatgatgaagatgattgggaaacacaagaatatcataaatcttcttggagcctgcacacaggatgggcctctctatgtcatagttgagtatgcctctaaaggcaacctccgagaatacctccgagcccggaggccacccgggatggagtactcctatgacattaaccgtgttcctgaggagcagatgaccttcaaggacttggtgtcatgcacctaccagctggccagaggcatggagtacttggcttcccaaaaatgtattcatcgagatttagcagccagaaatgttttggtaacagaaaacaatgtgatgaaaatagcagactttggactcgccagagatatcaacaatatagactattacaaaaagaccaccaatgggcggcttccagtcaagtggatggctccagaagccctgtttgatagagtatacactcatcagagtgatgtctggtccttcggggtgttaatgtgggagatcttcactttagggggctcgccctacccagggattcccgtggaggaactttttaagctgctgaaggaaggacacagaatggataagccagccaactgcaccaacgaactgtacatgatgatgagggactgttggcatgcagtgccctcccagagaccaacgttcaagcagttggtagaagacttggatcgaattctcactctcacaaccaatgaggaggagaagaaggtttctggagcagtggactgccacaagccaccatgtaacccctctcacctgccgtgcgtactggctgtggaccagtaggactcaaggtggacgtgcgttctgccttccttgttaattttgtaataattggagaagatttatgtcagcacacacttacagagcacaaatgcagtatataggtgctggatgtatgtaaatatattcaaattatgtataaatatatattatatatttacaaggagttattttttgtattgattttaaatggatgtcccaatgcacctagaaaattggtctctctttttttaatagctatttgctaaatgctgttcttacacataatttcttaattttcaccgagcagaggtggaaaaatacttttgctttcagggaaaatggtataacgttaatttattaataaattggtaatatacaaaacaattaatcatttatagttttttttgtaatttaagtggcatttctatgcaggcagcacagcagactagttaatctattgcttggacttaactagttatcagatcctttgaaaagagaatatttacaatatatgactaatttggggaaaatgaagttttgatttatttgtgtttaaatgctgctgtcagacgattgttcttagacctcctaaatgccccatattaaaagaactcattcataggaaggtgtttcattttggtgtgcaaccctgtcattacgtcaacgcaacgtctaactggacttcccaagataaatggtaccagcgtcctcttaaaagatgccttaatccattccttgaggacagaccttagttgaaatgatagcagaatgtgcttctctctggcagctggccttctgcttctgagttgcacattaatcagattagcctgtattctcttcagtgaattttgataatggcttccagactctttggcgttggagacgcctgttaggatcttcaagtcccatcatagaaaattgaaacacagagttgttctgctgatagttttggggatacgtccatctttttaagggattgctttcatctaattctggcaggacctcaccaaaagatccagcctcatacctacatcagacaaaatatcgccgttgttccttctgtactaaagtattgtgttttgctttggaaacacccactcactttgcaatagccgtgcaagatgaatgcagattacactgatcttatgtgttacaaaattggagaaagtatttaataaaacctgttaatttttatactgacaataaaaatgtttctacagatattaatgttaacaagacaaaataaatgtcacgcaacttattttttt

SEQ ID NO: 56519 - DNA, 2010 bp, Artificial Sequence
  derived and/or modified sequence
atggtttcttggggtcggtttatttgcctggtagttgttactatggccaccctgagcctcgctcgtccatcattcagtcttgtggaagacacaaccctcgaacctgaagacgctatctctagcggagacgacgaggacgacaccgatggagcagaggacttcgtcagcgaaaactcaaacaataagcgcgccccttactggactaacaccgaaaagatggagaagagactacacgcagtgccggcggccaacaccgttaagtttcggtgcccagccggaggtaaccccatgcccacgatgcggtggttaaagaacggaaaggaatttaagcaagaacatcgcataggaggctataaggtgagaaatcagcactggagcctgattatggagagcgttgtacctagtgacaaaggcaactatacctgtgtggttgagaatgagtacgggagcatcaaccacacataccacctggacgtggtggaaaggtcgccacataggccaatcctgcaggctggcttgcccgctaacgctagcacggtggtagggggagacgttgaatttgtctgtaaggtgtattccgatgcccaaccacacatccagtggatcaaacatgtcgagaaaaacgggtctaaatacggtcctgatggactgccatacctgaaagtcctgaaggctgcaggtgttaatacaaccgacaaggagatcgaagtgttgtacatccggaacgtaaccttcgaggacgcgggagaatatacatgtttagccggaaactcaataggcattagtttccatagtgcttggctcaccgtactgcccgcccccggtcgggaaaaggaaatcacagccagtccagattaccttgagatagctatctattgcatcggagtattcctcatcgcctgcatggtagtcacagtgatcttgtgtaggatgaaaaatactactaagaagccggacttctcctcacagcctgccgtacataaactgaccaagcggatccctctgagaagacaggtaagcgccgagagctcttcaagcatgaattccaacaccccgttggtgagaatcaccacaagactgtcttccacagcagatactccaatgttagcgggcgtctccgaatacgagcttcccgaggaccccaagtgggagttcccccgggataagctgaccctaggaaagccgctgggtgagggctgctttggtcaggtcgttatggcagaagctgtgggaattgataaggataaaccaaaagaggctgtcactgtggctgtgaagatgctgaaggacgatgccactgagaaagacctcagtgacttggtgagtgagatggagatgatgaaaatgatcgggaagcacaaaaacatcatcaatcttctgggggcctgtacgcaggacggtcccctctacgtgatagtcgaatacgctagtaaaggaaacttgcgggagtacctcagagcacggcggcccccagggatggaatattcatacgacattaacagggtgcctgaagagcaaatgacattcaaagacctggttagctgcacctaccagctcgcccgcgggatggagtatctggcatcccagaagtgtattcatagagatctggcggcacgaaacgtcctcgtgacagaaaacaacgtaatgaaaatcgctgacttcggcctggcgagagatattaacaacatagactattacaagaagacaacaaatggccgtctcccagtaaaatggatggcacccgaggcactgtttgaccgggtgtacacacatcagtcagatgtgtggtcattcggagtgctgatgtgggagattttcaccctcggaggcagtccctaccctggcattcccgtggaagagctgttcaagcttctcaaagagggtcatcgtatggataaacccgcgaattgtacaaacgagctgtacatgatgatgcgagattgttggcacgccgtcccctcccagaggcctactttcaaacagcttgttgaagacttagatagaatatag

SEQ ID NO: 56520 - DNA, 2124 bp, Artificial Sequence
  derived and/or modified sequence
atggtatcttggggacggttcatctgcctcgtcgtggttacaatggcgaccctatccctcgctcgaccttccttctcccttgtggaagatacgaccttagagccggaggacgccatctcgtctggagacgacgaagatgacaccgacggagcagaggacttcgtgtctgagaatagcaacaacaagagggctccgtattggaccaatacggaaaagatggaaaaaaggctccacgcggtccccgccgcaaataccgtgaaatttaggtgccccgctggcggtaatccaatgcccactatgaggtggctgaaaaatggaaaggaatttaaacaggagcaccggatcggtggatataaggtgagaaaccagcactggagcctgatcatggagtcggtcgttccctctgataaaggtaattatacatgtgtggttgaaaacgaatacggcagtattaaccatacttatcaccttgatgtagttgaaaggtctccacaccggccaatattgcaagccggtttaccggccaacgcgtcaaccgtcgtcggtggtgacgtggagttcgtttgtaaggtctattccgacgcgcagcctcacatccagtggattaaacacgtcgagaaaaatggttcaaaatatggaccagatggactcccgtatcttaaagtcctgaaagccgccggagtaaacaccaccgacaaggagatagaggttctctacatccgcaatgtgacttttgaggacgcaggggagtatacatgtttagcgggtaacagcataggaatctcctttcactccgcatggctcactgtgttacctgcccctggaagagagaaggagatcactgccagtcctgactacttagagattgctatctactgtataggggtctttttgatcgcatgcatggtagtaactgtgatcttgtgtaggatgaaaaacactacgaaaaaaccagacttttccagtcagcctgccgtgcacaagctcaccaaaaggattccactgcgtcgccaggtgacagtgtcagctgaaagttcctcaagtatgaactcaaacacgccgcttgttaggatcacaacacggctgtctagtacagcggacacccctatgttagcaggcgtcagcgagtacgaattacccgaggaccccaagtgggaattccctagagataaactgaccctgggaaaacctctcggggaagggtgttttggacaggtggttatggcggaagctgtgggtattgacaaagataaaccaaaggaagctgttacggtcgcagtgaaaatgctaaaagacgacgcgactgagaaggatttgtctgatttagtgtccgaaatggaaatgatgaaaatgatcggaaaacacaaaaatattataaatctcctgggggcttgcacccaggacggaccactctatgtgatcgtagagtacgcttctaaaggtaatttacgtgagtatcttagagcgcgcaggccccctggtatggagtacagctacgacattaacagggtgccggaggaacagatgaccttcaaagatctggtgtcatgcacatatcaacttgcaagggggatggaatatctggcgtctcagaaatgtatacacagggaccttgccgctagaaacgtgctggtgacagaaaacaacgtcatgaaaatcgctgatttcggccttgctagagatataaataacatcgattactataagaaaactaccaacggacggcttcctgtgaaatggatggcacccgaggccctttttgaccgtgtctatacccaccaatctgatgtgtggagcttcggcgtgcttatgtgggagatcttcaccctgggcggttctccataccccggtatacccgtggaagagctctttaagctgctaaaggagggccaccggatggacaagcctgctaactgtacaaacgaactctacatgatgatgagggattgctggcacgccgtcccaagccagagacctacttttaaacagctggttgaagacctggatcgcattcttactctgaccaccaacgaagaagagaagaaggtgagtggggctgtcgattgccacaaaccaccctgcaacccatcccacctgccatgtgtgttggctgtggaccaatag

SEQ ID NO: 56521 - DNA, 2010 bp, Artificial Sequence
  derived and/or modified sequence
atggtgtcctggggccgcttcatctgcctggtggtggtgaccatggccaccctgagcctggcccggcccagcttcagcctggtggaggacaccaccctggagccagaagatgccatcagcagtggagatgatgaagatgacacagatggagctgaggactttgtgtctgagaacagcaacaacaagagggccccctactggaccaacacagagaagatggagaagaggctgcatgctgtgcctgctgccaacacagtgaagttccgctgcccagctgggggcaaccccatgcccaccatgcgctggctgaagaatggcaaggagttcaagcaggagcacagaattggaggctacaaggtgaggaaccagcactggagcctcatcatggagagcgtggtgcccagcgacaagggcaactacacctgtgtggtggagaatgaatatggcagcatcaaccacacctaccacctggatgtggtggagaggagcccccaccggcccatcctgcaggccggcctgcctgccaatgccagcacagtggtgggcggagatgtggagtttgtgtgcaaggtgtacagtgatgcccagccccacatccagtggatcaagcacgtggagaagaatggcagcaaatatggcccagatggcctgccctacctgaaggtgctgaaggccgccggcgtgaacaccacagacaaggagattgaggtgctgtacatcagaaatgtgacctttgaagatgctggggagtacacctgcctggccggcaacagcatcggcatctccttccacagcgcctggctgactgtgctgcctgcccctggccgggagaaggagatcacagccagcccagactacctggagatcgccatctactgcatcggggtcttcctgattgcctgcatggtggtgaccgtcatcctgtgcaggatgaagaacaccaccaagaagccagacttcagcagccagcctgctgtgcacaagctgaccaagaggatccccctgcggcggcaggtgtctgctgagagcagcagctccatgaacagcaacacccccctggtgcgcatcaccacccggctgagcagcacagctgacacccccatgctggccggcgtgtctgaatatgagctgcctgaggaccccaagtgggagttcccccgggacaagctgaccctgggcaagcccctgggggagggctgcttcggccaggtggtgatggccgaggccgtgggcatcgacaaggacaagcccaaggaggccgtgacagtggccgtgaagatgctgaaggatgatgccacagagaaggacctgagtgacctggtgtctgagatggagatgatgaagatgattggcaagcacaagaacatcatcaacctgctgggcgcctgcacccaggacggccccctgtatgtgattgtggagtatgccagcaagggcaacctgcgggagtacctgcgggcccggcggcccccaggcatggagtacagctatgacatcaacagagtgcctgaggagcagatgaccttcaaggacctggtgtcctgcacctaccagctggcccggggcatggagtacctggccagccagaagtgcatccaccgggacctggccgccagaaatgtgctggtgacagaaaataatgtgatgaagattgctgactttggcctggcccgggacatcaacaacatcgactactacaagaagaccaccaacggccgcctgcctgtgaagtggatggcccctgaggccctgtttgacagagtgtacacccaccagagtgatgtgtggagctttggagtgctgatgtgggagatcttcaccctgggcggcagcccctacccaggcatccctgtggaggagctgttcaagctgctgaaggagggccacaggatggacaagccagccaactgcaccaatgagctgtacatgatgatgagggactgctggcatgctgtgcccagccagaggcccaccttcaagcagctggtggaggacctggaccgcatctag

SEQ ID NO: 56522 - DNA, 2124 bp, Artificial Sequence
  derived and/or modified sequence
atggtgtcctggggccgcttcatctgcctggtggtggtgaccatggccaccctgagcctggcccggcccagcttcagcctggtggaggacaccaccctggagccagaagatgccatcagcagtggagatgatgaagatgacacagatggagctgaggactttgtgtctgagaacagcaacaacaagagggccccctactggaccaacacagagaagatggagaagaggctgcatgctgtgcctgctgccaacacagtgaagttccgctgcccagctgggggcaaccccatgcccaccatgcgctggctgaagaatggcaaggagttcaagcaggagcacagaattggaggctacaaggtgaggaaccagcactggagcctcatcatggagagcgtggtgcccagcgacaagggcaactacacctgtgtggtggagaatgaatatggcagcatcaaccacacctaccacctggatgtggtggagaggagcccccaccggcccatcctgcaggccggcctgcctgccaatgccagcacagtggtgggcggagatgtggagtttgtgtgcaaggtgtacagtgatgcccagccccacatccagtggatcaagcacgtggagaagaatggcagcaaatatggcccagatggcctgccctacctgaaggtgctgaaggccgccggcgtgaacaccacagacaaggagattgaggtgctgtacatcagaaatgtgacctttgaagatgctggggagtacacctgcctggccggcaacagcatcggcatctccttccacagcgcctggctgactgtgctgcctgcccctggccgggagaaggagatcacagccagcccagactacctggagatcgccatctactgcatcggggtcttcctgattgcctgcatggtggtgaccgtcatcctgtgcaggatgaagaacaccaccaagaagccagacttcagcagccagcctgctgtgcacaagctgaccaagaggatccccctgcggcggcaggtgacagtgtctgctgagagcagcagctccatgaacagcaacacccccctggtgcgcatcaccacccggctgagcagcacagctgacacccccatgctggccggcgtgtctgaatatgagctgcctgaggaccccaagtgggagttcccccgggacaagctgaccctgggcaagcccctgggggagggctgcttcggccaggtggtgatggccgaggccgtgggcatcgacaaggacaagcccaaggaggccgtgacagtggccgtgaagatgctgaaggatgatgccacagagaaggacctgagtgacctggtgtctgagatggagatgatgaagatgattggcaagcacaagaacatcatcaacctgctgggcgcctgcacccaggacggccccctgtatgtgattgtggagtatgccagcaagggcaacctgcgggagtacctgcgggcccggcggcccccaggcatggagtacagctatgacatcaacagagtgcctgaggagcagatgaccttcaaggacctggtgtcctgcacctaccagctggcccggggcatggagtacctggccagccagaagtgcatccaccgggacctggccgccagaaatgtgctggtgacagaaaataatgtgatgaagattgctgactttggcctggcccgggacatcaacaacatcgactactacaagaagaccaccaacggccgcctgcctgtgaagtggatggcccctgaggccctgtttgacagagtgtacacccaccagagtgatgtgtggagctttggagtgctgatgtgggagatcttcaccctgggcggcagcccctacccaggcatccctgtggaggagctgttcaagctgctgaaggagggccacaggatggacaagccagccaactgcaccaatgagctgtacatgatgatgagggactgctggcatgctgtgcccagccagaggcccaccttcaagcagctggtggaggacctggaccgcatcctgaccctgaccaccaatgaggaggagaagaaggtgtctggagctgtggactgccacaagccaccctgcaaccccagccacctgccctgtgtgctggccgtggaccagtag

SEQ ID NO: 56523 - DNA, 2010 bp, Artificial Sequence
  derived and/or modified sequence
atggtgagctggggccggttcatctgcctggtggtggtgaccatggccacacttagcctggctcgtccttcattcagcctggttgaggatacgactctggaaccagaggatgccatttcatcaggcgacgatgaggacgacacggatggagccgaggacttcgtgtcggagaactccaacaataaacgggcaccatactggaccaatacagagaagatggaaaagcgcctccacgcagtgcccgccgcaaataccgttaaatttcgctgccccgctggcggcaatcccatgccaacaatgaggtggttaaagaacgggaaggaatttaaacaagagcacagaatcggggggtacaaagttagaaatcagcattggtccctcatcatggaatccgtggtgccctccgataaaggcaactacacctgcgtggttgagaacgagtacggctccatcaatcacacatatcacctggatgtggtcgagcgcagtccgcaccgtcctatcttgcaggcaggtctccctgctaacgcgtccaccgtggtaggcggggatgtagaatttgtatgcaaagtctattcagacgctcagccacacattcagtggataaaacacgtagagaaaaacgggtcaaagtacggccctgacggactcccatacctgaaggtactgaaggctgctggcgtgaatacgacggacaaagaaattgaggtgctctatatcagaaatgttacattcgaggatgcgggagagtacacatgcctagcgggaaattccattggtatctcgttccactcagcatggttgaccgtcctgccagctcccggacgcgagaaggaaattactgcgagtccagactacctagagatagcaatatactgcattggggttttcctgattgcctgcatggtagtcaccgtaatcctttgccgcatgaaaaatactacaaaaaaaccagacttctcaagtcagccggcagtccacaaactgactaagagaattccgctccggcgccaagtctccgctgagtcatcttcttctatgaattctaacactccactggtcagaatcacaaccagattgtcctccacagctgacacccccatgctagctggggtgtccgagtatgaactgccagaggacccaaagtgggaatttccaagagacaagctcacccttggcaagcctcttggagaagggtgcttcggacaggtagtgatggcagaggctgtgggcatagacaaggacaagcctaaggaagccgtgacagttgctgttaagatgctgaaggatgatgccaccgagaaggacctctcggatctggtttccgagatggagatgatgaagatgattggcaagcataaaaacatcatcaatctgctcggagcttgtacgcaggacggccctctctatgtgatcgtagagtatgcatctaaaggcaacctgcgcgaataccttagagccagaagaccgcctggcatggagtacagctacgacattaacagagttccggaagagcagatgactttcaaagacctggtgagctgcacataccagttggccagaggcatggaatacctcgcatctcagaagtgcattcatcgcgacttggcggcaagaaatgttctagtaactgagaacaacgtcatgaagattgcagactttggccttgcgcgcgatattaacaatatcgattactataagaaaaccaccaacggccggctccccgtgaaatggatggcccctgaggctcttttcgatcgagtttacacccaccagtcagatgtatggtcctttggagtcctaatgtgggagattttcaccctgggcggatccccgtaccctggcatccccgtcgaggagctatttaaactactgaaagagggtcacaggatggataaaccagcaaactgcactaacgagctctatatgatgatgcgcgactgctggcatgcagtaccatcgcagcgcccgaccttcaaacagctcgtcgaggaccttgataggatttag

SEQ ID NO: 56524 - DNA, 2124 bp, Artificial Sequence
  derived and/or modified sequence
atggtgagctggggccggttcatctgcctggtggtggtgaccatggcaactttatccctggcccgccctagtttttcactagtagaggatacaactctagagcctgaggatgccatcagctcgggtgatgatgaggacgacacggacggggcagaagactttgtgagcgagaattccaacaacaaacgagctccttactggaccaataccgaaaaaatggaaaaacgtctacatgccgttccagccgctaataccgtaaagtttagatgtcctgccggggggaacccaatgccaacgatgcgatggctgaagaatggtaaggagttcaaacaggagcaccggatcggaggttataaggtgcgaaaccagcactggagtctgattatggagagcgtggttccttcagacaaaggcaattacacctgtgtggtcgaaaatgagtacggctctatcaatcacacatatcacctcgatgttgtagaaaggtcaccacacaggcccatactgcaggctggactgccggccaatgctagcaccgtggtgggcggcgacgtggagttcgtgtgcaaggtgtacagcgatgcacagccccacattcagtggattaaacacgtcgagaaaaatgggtccaagtacggacctgacgggcttccttatctcaaggtgttgaaggccgctggcgtgaacactacagacaaggagatcgaagttttatacatccggaatgtgacgttcgaggacgctggcgagtacacgtgcctagccggaaacagtatcgggatctcttttcacagcgcctggcttacagtactgcctgcccctggaagagaaaaggaaatcactgcatctccagactacttagaaatagccatttattgcatcggtgtattcctgatcgcatgtatggtagtcaccgtgatcctttgcagaatgaagaacaccaccaagaaaccagatttcagctctcagcccgctgtgcacaaattaaccaagcgcattcccttgagacgccaggtcacagtatctgcagagtcaagttcatctatgaacagtaataccccacttgtacgaataacaacacggctctcctcaactgcagacacacctatgcttgctggggttagcgagtacgagctccctgaggacccaaagtgggagttcccgcgggacaagctgacccttggaaaacctctaggagagggatgttttggtcaggtagtaatggccgaggcagtgggtattgacaaggataagccgaaggaggccgtcacagtggccgtgaagatgttgaaggatgatgccaccgagaaggacctctccgatctggtgtccgagatggaaatgatgaaaatgatcgggaaacacaaaaacattattaacctgctaggggcctgcacacaagacggccccctgtatgtaattgtggagtacgcgtcaaagggtaacttgagagagtacctccgcgctaggcgcccgccgggaatggagtactcgtacgatatcaaccgcgttccagaagaacagatgactttcaaggacctggtttcatgcacttatcagctggcaagggggatggaatacctagccagccagaaatgcattcacagagaccttgctgctcgtaatgtacttgtcacagaaaataacgtcatgaaaattgccgatttcggcttggccagagacattaacaacattgattattacaagaagacgaccaatgggcgcctccctgttaagtggatggcaccggaggccctcttcgatcgcgtctatacccatcagagtgatgtgtggagcttcggcgtcctcatgtgggagatcttcacactgggagggagcccctacccagggatccctgtggaagagctatttaaactgttgaaagagggccatcgcatggacaaacctgcaaattgtaccaatgagctctacatgatgatgcgcgactgttggcatgcagtcccatcccagcgtcctacattcaagcaactcgttgaggatctcgacaggattcttactctcacgacaaacgaagaggagaagaaggtgtcgggcgcagtggattgtcacaaacccccatgcaatccatctcatctcccctgtgtcttggcagtcgaccagtag

SEQ ID NO: 56525 - DNA, 2010 bp, Artificial Sequence
  derived and/or modified sequence
atggtaagctgggggaggtttatatgtctcgtggtagtgacaatggcaacgctgtcactcgcccgtccaagcttttcacttgtggaagacaccaccttagaaccagaggacgccatctcttctggggacgacgaagatgacacagacggcgcagaggacttcgtctccgaaaattccaacaacaaacgtgccccatattggactaacactgagaagatggaaaagcggcttcatgccgttccagccgctaacaccgtgaaattcaggtgcccagccggtgggaatccgatgcccactatgcggtggctgaagaatggtaaagaattcaagcaggagcataggattggtggatataaagttcgaaatcagcattggtctctcataatggaatctgtggtccccagtgacaaggggaactatacctgcgtggttgagaatgaatacggatcgatcaatcacacttatcacctggatgtggtggagcgttctcctcacaggcctatattgcaggccggtctgccggcaaatgcgtcgaccgtcgtcggcggtgatgtagaattcgtgtgtaaagtgtactctgatgcacagccccatatccagtggatcaagcacgtggagaaaaacggctctaagtacggaccagatgggctgccgtacctcaaagtgctgaaagccgctggagtgaacactacagacaaagagatcgaggttctctacatcagaaacgtgacttttgaagacgccggtgagtatacctgtcttgctggcaacagtataggaatatcctttcattcagcatggcttacagtgttgcccgctccaggcagggagaaggagattactgcgagtcctgactatcttgagatagcgatttactgcattggagtgtttctgatagcatgcatggtggtgaccgtcatcctgtgtaggatgaaaaacactaccaaaaaaccagatttttccagccagccagctgtacataaattgaccaagcgcatccctctgagaaggcaggtcagtgccgaatcatctagtagtatgaatagcaacacacccctggtaagaattaccacacgcctgtcctcaactgcagacacacccatgctcgccggtgtgagcgaatacgaactccctgaagacccgaaatgggagttcccacgtgataaacttactcttggcaaacctctgggcgagggatgttttggccaagtggtgatggcagaagccgttgggatcgacaaagataaaccgaaggaggccgtgaccgtggctgtgaagatgcttaaggatgatgccaccgagaaagatctgtccgatctggtttcggagatggaaatgatgaaaatgattgggaagcacaagaacatcatcaatctgttgggcgcatgcactcaagacggccctttatatgtgattgtcgagtacgccagtaaaggcaacctccgcgaatacctgcgcgctcggagacctccaggaatggagtactcatatgacatcaaccgggtgcctgaagagcagatgacttttaaggatctcgtaagctgtacatatcagctcgcccgaggaatggaataccttgcaagtcagaaatgtatccaccgagatctggctgctcgaaacgtgctggtcaccgaaaacaatgttatgaaaatcgctgactttggcctggcccgagatattaataacatagactactataagaagacgaccaacggaaggttacctgtgaaatggatggctcctgaggcacttttcgatagagtttatacccatcaaagtgacgtgtggtccttcggcgtcttgatgtgggaaatttttactctcggaggatcaccatatccaggcattccagtcgaagaactgtttaaactgctgaaggaaggccacaggatggataaacctgctaattgtaccaatgaactgtacatgatgatgcgcgattgctggcacgctgttccatctcagaggcccacctttaagcaactcgtggaagacctcgaccgcatctag

SEQ ID NO: 56526 - DNA, 2124 bp, Artificial Sequence
  derived and/or modified sequence
atggtgtcttggggccgattcatctgcctggtcgtggtcaccatggcgaccttgagtttggccagaccatccttctcactggtcgaggatacgactcttgaaccggaagatgccatttcatctggggacgacgaggatgacaccgatggcgcagaagatttcgtgtcagaaaactccaataataagagggccccttattggactaataccgaaaaaatggaaaaacgcctacatgcagtgccagccgcaaacacagtgaaatttaggtgcccagctggcggaaatccgatgcccacgatgcgttggcttaagaacgggaaggaattcaaacaagaacacagaatcgggggttacaaagtgaggaatcagcattggagcttgataatggagtccgtagtgcctagtgacaaggggaattacacttgtgtagtagagaacgaatacggctctattaaccacacctatcacctcgatgtagtggaaagaagtcctcatcggccaattctgcaggccggtttgcctgcaaatgccagtacagtcgtcggaggcgatgtggagttcgtgtgcaaagtgtactctgatgcacagccacatattcagtggattaagcacgtggaaaaaaatggcagcaagtatggccctgatggactgccctaccttaaggtgctgaaggccgctggggtgaacactacagataaggaaatcgaagtgctctacatcagaaacgtcacttttgaggacgccggagagtacacatgcctggccggaaactccatcggcatctctttccacagcgcttggcttaccgtgctccctgccccaggacgggagaaggagatcactgctagtcccgattatctagagatcgctatctactgcataggggtgttccttatcgcatgcatggttgtgacagtgatactgtgccgcatgaagaatactaccaaaaagccggatttcagtagccaaccggcagtgcacaaactgacaaagaggattccgctgagacggcaggtgacagtgtctgctgagtccagttcctctatgaatagtaatacacctcttgttagaatcactaccaggctgtccagtaccgccgatacccccatgttggccggagtttctgagtatgaactgcctgaggaccccaagtgggagtttccaagggacaagctgaccctaggcaaacccctcggtgagggctgctttggtcaggtcgtcatggcggaagctgtaggtatagataaagataagccgaaagaggctgtgaccgttgccgtgaaaatgttgaaagacgacgcgacggagaaggacctgagcgacttagtgtctgaaatggagatgatgaagatgatcggaaagcataaaaacattatcaatctgttgggagcttgtacccaggacggccctctgtacgttattgtggaatacgcaagcaaaggcaacttaagggaatacctgcgggctcggaggccgcctggaatggagtactcatacgatatcaaccgcgtgccagaggagcagatgacctttaaagacctcgtttcttgtacttaccagttggcacggggaatggagtacttagcaagtcagaaatgtatacacagagatctggccgcacggaatgtgcttgttactgagaacaatgtgatgaaaatagctgactttggtctggctcgagacatcaataacatcgactactataaaaagaccacgaatggacgactgcctgtgaaatggatggccccagaggcattgttcgacagagtctacacccatcaatccgacgtgtggtccttcggggtgctcatgtgggagatctttactcttggtggatccccatatccagggattccagtcgaggaactctttaaactcttaaaggagggccatagaatggacaagcctgcaaactgcacaaatgaactgtatatgatgatgagggattgctggcacgcagtgccttcacagcgtcccacatttaaacagctggtcgaggatctggataggattcttacactcactaccaacgaagaagaaaaaaaggtctcaggtgccgtggactgccataaacccccatgtaatccatcccacctgccgtgcgtgctcgctgtcgaccagtag

SEQ ID NO: 56527 - DNA, 2010 bp, Artificial Sequence
  derived and/or modified sequence
atggtgagctggggcagattcatctgcctggtggtggtgaccatggccaccctgagcctggccagacccagcttcagcctggtggaggacaccaccctggagcccgaggacgccatcagcagcggcgacgacgaggacgacaccgacggcgccgaggacttcgtgagcgagaacagcaacaacaagagagccccctactggaccaacaccgagaagatggagaagagactgcacgccgtgcccgccgccaacaccgtgaagttcagatgccccgccggcggcaaccccatgcccaccatgagatggctgaagaacggcaaggagttcaagcaggagcacagaatcggcggctacaaggtgagaaaccagcactggagcctgatcatggagagcgtggtgcccagcgacaagggcaactacacctgcgtggtggagaacgagtacggcagcatcaaccacacctaccacctggacgtggtggagagaagcccccacagacccatcctgcaggccggcctgcccgccaacgccagcaccgtggtgggcggcgacgtggagttcgtgtgcaaggtgtacagcgacgcccagccccacatccagtggatcaagcacgtggagaagaacggcagcaagtacggccccgacggcctgccctacctgaaggtgctgaaggccgccggcgtgaacaccaccgacaaggagatcgaggtgctgtacatcagaaacgtgaccttcgaggacgccggcgagtacacctgcctggccggcaacagcatcggcatcagcttccacagcgcctggctgaccgtgctgcccgcccccggcagagagaaggagatcaccgccagccccgactacctggagatcgccatctactgcatcggcgtgttcctgatcgcctgcatggtggtgaccgtgatcctgtgcagaatgaagaacaccaccaagaagcccgacttcagcagccagcccgccgtgcacaagctgaccaagagaatccccctgagaagacaggtgagcgccgagagcagcagcagcatgaacagcaacacccccctggtgagaatcaccaccagactgagcagcaccgccgacacccccatgctggccggcgtgagcgagtacgagctgcccgaggaccccaagtgggagttccccagagacaagctgaccctgggcaagcccctgggcgagggctgcttcggccaggtggtgatggccgaggccgtgggcatcgacaaggacaagcccaaggaggccgtgaccgtggccgtgaagatgctgaaggacgacgccaccgagaaggacctgagcgacctggtgagcgagatggagatgatgaagatgatcggcaagcacaagaacatcatcaacctgctgggcgcctgcacccaggacggccccctgtacgtgatcgtggagtacgccagcaagggcaacctgagagagtacctgagagccagaagaccccccggcatggagtacagctacgacatcaacagagtgcccgaggagcagatgaccttcaaggacctggtgagctgcacctaccagctggccagaggcatggagtacctggccagccagaagtgcatccacagagacctggccgccagaaacgtgctggtgaccgagaacaacgtgatgaagatcgccgacttcggcctggccagagacatcaacaacatcgactactacaagaagaccaccaacggcagactgcccgtgaagtggatggcccccgaggccctgttcgacagagtgtacacccaccagagcgacgtgtggagcttcggcgtgctgatgtgggagatcttcaccctgggcggcagcccctaccccggcatccccgtggaggagctgttcaagctgctgaaggagggccacagaatggacaagcccgccaactgcaccaacgagctgtacatgatgatgagagactgctggcacgccgtgcccagccagagacccaccttcaagcagctggtggaggacctggacagaatctag

SEQ ID NO: 56528 - DNA, 2124 bp, Artificial Sequence
  derived and/or modified sequence
atggtgagctggggcagattcatctgcctggtggtggtgaccatggccaccctgagcctggccagacccagcttcagcctggtggaggacaccaccctggagcccgaggacgccatcagcagcggcgacgacgaggacgacaccgacggcgccgaggacttcgtgagcgagaacagcaacaacaagagagccccctactggaccaacaccgagaagatggagaagagactgcacgccgtgcccgccgccaacaccgtgaagttcagatgccccgccggcggcaaccccatgcccaccatgagatggctgaagaacggcaaggagttcaagcaggagcacagaatcggcggctacaaggtgagaaaccagcactggagcctgatcatggagagcgtggtgcccagcgacaagggcaactacacctgcgtggtggagaacgagtacggcagcatcaaccacacctaccacctggacgtggtggagagaagcccccacagacccatcctgcaggccggcctgcccgccaacgccagcaccgtggtgggcggcgacgtggagttcgtgtgcaaggtgtacagcgacgcccagccccacatccagtggatcaagcacgtggagaagaacggcagcaagtacggccccgacggcctgccctacctgaaggtgctgaaggccgccggcgtgaacaccaccgacaaggagatcgaggtgctgtacatcagaaacgtgaccttcgaggacgccggcgagtacacctgcctggccggcaacagcatcggcatcagcttccacagcgcctggctgaccgtgctgcccgcccccggcagagagaaggagatcaccgccagccccgactacctggagatcgccatctactgcatcggcgtgttcctgatcgcctgcatggtggtgaccgtgatcctgtgcagaatgaagaacaccaccaagaagcccgacttcagcagccagcccgccgtgcacaagctgaccaagagaatccccctgagaagacaggtgaccgtgagcgccgagagcagcagcagcatgaacagcaacacccccctggtgagaatcaccaccagactgagcagcaccgccgacacccccatgctggccggcgtgagcgagtacgagctgcccgaggaccccaagtgggagttccccagagacaagctgaccctgggcaagcccctgggcgagggctgcttcggccaggtggtgatggccgaggccgtgggcatcgacaaggacaagcccaaggaggccgtgaccgtggccgtgaagatgctgaaggacgacgccaccgagaaggacctgagcgacctggtgagcgagatggagatgatgaagatgatcggcaagcacaagaacatcatcaacctgctgggcgcctgcacccaggacggccccctgtacgtgatcgtggagtacgccagcaagggcaacctgagagagtacctgagagccagaagaccccccggcatggagtacagctacgacatcaacagagtgcccgaggagcagatgaccttcaaggacctggtgagctgcacctaccagctggccagaggcatggagtacctggccagccagaagtgcatccacagagacctggccgccagaaacgtgctggtgaccgagaacaacgtgatgaagatcgccgacttcggcctggccagagacatcaacaacatcgactactacaagaagaccaccaacggcagactgcccgtgaagtggatggcccccgaggccctgttcgacagagtgtacacccaccagagcgacgtgtggagcttcggcgtgctgatgtgggagatcttcaccctgggcggcagcccctaccccggcatccccgtggaggagctgttcaagctgctgaaggagggccacagaatggacaagcccgccaactgcaccaacgagctgtacatgatgatgagagactgctggcacgccgtgcccagccagagacccaccttcaagcagctggtggaggacctggacagaatcctgaccctgaccaccaacgaggaggagaagaaggtgagcggcgccgtggactgccacaagcccccctgcaaccccagccacctgccctgcgtgctggccgtggaccagtag

SEQ ID NO: 56529 - protein, 705 aa, Artificial Sequence
  derived and/or modified sequence
MVSWGRFICLVVVTMATLSLARPSFSLVEDTTLEPEEPPTKYQISQPEVYVAAPGESLEVRCLLKDAAVISWTKDGVHLGPNNRTVLIGEYLQIKGATPRDSGLYACTASRTVDSETWYFMVNVTDAISSGDDEDDTDGAEDFVSENSNNKRAPYWTNTEKMEKRLHAVPAANTVKFRCPAGGNPMPTMRWLKNGKEFKQEHRIGGYKVRNQHWSLIMESVVPSDKGNYTCVVENEYGSINHTYHLDVVERSPHRPILQAGLPANASTVVGGDVEFVCKVYSDAQPHIQWIKHVEKNGSKYGPDGLPYLKVLKVSAESSSSMNSNTPLVRITTRLSSTADTPMLAGVSEYELPEDPKWEFPRDKLTLGKPLGEGCFGQVVMAEAVGIDKDKPKEAVTVAVKMLKDDATEKDLSDLVSEMEMMKMIGKHKNIINLLGACTQDGPLYVIVEYASKGNLREYLRARRPPGMEYSYDINRVPEEQMTFKDLVSCTYQLARGMEYLASQKCIHRDLAARNVLVTENNVMKIADFGLARDINNIDYYKKTTNGRLPVKWMAPEALFDRVYTHQSDVWSFGVLMWEIFTLGGSPYPGIPVEELFKLLKEGHRMDKPANCTNELYMMMRDCWHAVPSQRPTFKQLVEDLDRILTLTTNEEYLDLSQPLEQYSPSYPDTRSSCSSGDDSVFSPDPMPYEPCLPQYPHINGSVKT

SEQ ID NO: 56530 - DNA, 3244 bp, Artificial Sequence
  derived and/or modified sequence
ccggccgcgagccccgggggccccgaggccgcagcttgcctgcgcgctctgagccttcgcaactcgcgagcaaagtttggtggaggcaacgccaagcctgagtcctttcttcctctcgttccccaaatccgagggcagcccgcgggcgtcatgcccgcgctcctccgcagcctggggtacgcgtgaagcccgggaggcttggcgccggcgaagacccaaggaccactcttctgcgtttggagttgctccccgcaaccccgggctcgtcgctttctccatcccgacccacgcggggcgcggggacaacacaggtcgcggaggagcgttgccattcaagtgactgcagcagcagcggcagcgcctcggttcctgagcccaccgcaggctgaaggcattgcgcgtagtccatgcccgtagaggaagtgtgcagatgggattaacgtccacatggagatatggaagaggaccggggattggtaccgtaaccatggtcagctggggtcgtttcatctgcctggtcgtggtcaccatggcaaccttgtccctggcccggccctccttcagtttagttgaggataccacattagagccagaagagccaccaaccaaataccaaatctctcaaccagaagtgtacgtggctgcgccaggggagtcgctagaggtgcgctgcctgttgaaagatgccgccgtgatcagttggactaaggatggggtgcacttggggcccaacaataggacagtgcttattggggagtacttgcagataaagggcgccacgcctagagactccggcctctatgcttgtactgccagtaggactgtagacagtgaaacttggtacttcatggtgaatgtcacagatgccatctcatccggagatgatgaggatgacaccgatggtgcggaagattttgtcagtgagaacagtaacaacaagagagcaccatactggaccaacacagaaaagatggaaaagcggctccatgctgtgcctgcggccaacactgtcaagtttcgctgcccagccggggggaacccaatgccaaccatgcggtggctgaaaaacgggaaggagtttaagcaggagcatcgcattggaggctacaaggtacgaaaccagcactggagcctcattatggaaagtgtggtcccatctgacaagggaaattatacctgtgtagtggagaatgaatacgggtccatcaatcacacgtaccacctggatgttgtggagcgatcgcctcaccggcccatcctccaagccggactgccggcaaatgcctccacagtggtcggaggagacgtagagtttgtctgcaaggtttacagtgatgcccagccccacatccagtggatcaagcacgtggaaaagaacggcagtaaatacgggcccgacgggctgccctacctcaaggttctcaaggtttcggctgagtccagctcctccatgaactccaacaccccgctggtgaggataacaacacgcctctcttcaacggcagacacccccatgctggcaggggtctccgagtatgaacttccagaggacccaaaatgggagtttccaagagataagctgacactgggcaagcccctgggagaaggttgctttgggcaagtggtcatggcggaagcagtgggaattgacaaagacaagcccaaggaggcggtcaccgtggccgtgaagatgttgaaagatgatgccacagagaaagacctttctgatctggtgtcagagatggagatgatgaagatgattgggaaacacaagaatatcataaatcttcttggagcctgcacacaggatgggcctctctatgtcatagttgagtatgcctctaaaggcaacctccgagaatacctccgagcccggaggccacccgggatggagtactcctatgacattaaccgtgttcctgaggagcagatgaccttcaaggacttggtgtcatgcacctaccagctggccagaggcatggagtacttggcttcccaaaaatgtattcatcgagatttagcagccagaaatgttttggtaacagaaaacaatgtgatgaaaatagcagactttggactcgccagagatatcaacaatatagactattacaaaaagaccaccaatgggcggcttccagtcaagtggatggctccagaagccctgtttgatagagtatacactcatcagagtgatgtctggtccttcggggtgttaatgtgggagatcttcactttagggggctcgccctacccagggattcccgtggaggaactttttaagctgctgaaggaaggacacagaatggataagccagccaactgcaccaacgaactgtacatgatgatgagggactgttggcatgcagtgccctcccagagaccaacgttcaagcagttggtagaagacttggatcgaattctcactctcacaaccaatgaggaatacttggacctcagccaacctctcgaacagtattcacctagttaccctgacacaagaagttcttgttcttcaggagatgattctgttttttctccagaccccatgccttacgaaccatgccttcctcagtatccacacataaacggcagtgttaaaacatgaatgactgtgtctgcctgtccccaaacaggacagcactgggaacctagctacactgagcagggagaccatgcctcccagagcttgttgtctccacttgtatatatggatcagaggagtaaataattggaaaagtaatcagcatatgtgtaaagatttatacagttgaaaacttgtaatcttccccaggaggagaagaaggtttctggagcagtggactgccacaagccaccatgtaacccctctcacctgccgtgcgtactggctgtggaccagtaggactcaaggtggacgtgcgttctgccttccttgttaattttgtaataattggagaagatttatgtcagcacacacttacagagcacaaatgcagtatataggtgctggatgtatgtaaatatattcaaattatgtataaatatatattatatatttacaaggagttattttttgtattgattttaaatggatgtcccaatgcacctagaaaattggtctctctttttttaatagctatttgctaaatgctgttcttacacataatttcttaattttcaccgagcagaggtggaaaaatacttttgctttcagggaaaatggtataacgttaatttattaataaattggtaatatacaaaacaa

SEQ ID NO: 56531 - DNA, 765 bp, Artificial Sequence
  derived and/or modified sequence
atggtatcgtggggccgttttatctgcctcgtggtcgttacaatggcaacattatctttggctagaccttcctttagtctggttgaggacactacactggaacccgaggagccacccacaaaatatcagattagccagcccgaggtgtatgtagccgcgcccggagaatctctggaggtgcgttgtctgctcaaggatgccgctgtgatatcttggaccaaagacggcgtgcacttgggccctaacaaccggacagtgcttataggagagtatctgcagatcaaaggtgccacccctagagactccggcctgtatgcatgcacagcctctcggaccgtcgactcagaaacatggtattttatggttaacgtaacagacgcgataagctctggagacgacgaagacgacacagacggcgccgaagatttcgtttccgaaaactccaacaataagagagctccctactggacaaataccgaaaaaatggagaaacgtctacacgccgtcccggctgccaatacagtcaagttcaggtgccctgctggggggaatccaatgcccacaatgcgttggctgaagaatggaaaggagttcaagcaggaacaccgtataggcgggtacaaagttagaaaccaacattggtccttgataatggagtccgtggtgccctccgataagggtaattacacctgcgtggtcgagaatgagtacggttctatcaaccacacctatcacctggatgtggtggggtcacaaggcctttag

SEQ ID NO: 56532 - DNA, 2118 bp, Artificial Sequence
  derived and/or modified sequence
atggtttcttggggaaggttcatttgtctggtcgtggttacaatggctacactgtctttggcacgaccttccttctctctcgtggaggataccactctggagcctgaagagcctcctacaaagtatcagatttctcagcctgaggtctacgtggccgcccctggcgagtctctcgaggtcaggtgcctcctgaaggacgccgccgtgatctcatggactaaggatggtgttcacttaggccctaataacagaaccgtcttgatcggggagtacctgcaaatcaagggggccacaccccgcgactccggcctctacgcttgtacagcgtcgaggacagtcgacagcgaaacctggtacttcatggttaacgtcacggatgcaatatcgagcggcgatgatgaggatgataccgacggggcagaagactttgtgtctgaaaattccaacaacaaacgggccccttactggaccaacactgaaaaaatggaaaaacgtctacacgcagtgccggcggccaacactgtgaagttcaggtgccccgccggtgggaatcctatgcctacaatgagatggctaaaaaacggcaaggaattcaagcaggaacatcgtattggggggtataaggtaaggaaccagcattggagcctgatcatggaaagtgttgtgccatctgataaggggaactacacatgcgttgtggagaatgaatacggctccatcaaccatacataccacttggatgtagtggaacggagcccacatcggccaatcctgcaggcaggtttgcctgctaacgcgtctacagttgtgggtggcgatgtggaatttgtgtgcaaggtttatagcgacgcgcagcctcatatccagtggatcaagcatgtagagaagaatggtagtaagtatggaccagatggcctgccatacctcaaggtattgaaggttagtgccgagagctcgtcctccatgaacagtaatacacctcttgtgaggataacaaccaggctgagttctacagcagatactccaatgctcgcaggcgtgagcgagtacgagctgccggaggacccaaaatgggaattcccgcgcgacaagctgactctcgggaagccactgggggagggatgtttcggccaggtggtaatggccgaagccgtgggcatagataaggacaaaccaaaagaagctgtcactgttgccgtcaagatgcttaaggatgatgcaaccgagaaagacctgagcgacctcgtttctgaaatggaaatgatgaagatgatcgggaagcataagaatattatcaacctgctaggggcgtgcacccaggacggacccctttatgttatcgtcgaatacgcctcgaaggggaatctccgcgagtatctccgggcccgcagaccacccggcatggagtactcctatgatattaatcgggtacctgaagagcagatgactttcaaagacctcgtctcatgcacatatcagctggcacgaggtatggaatacttagcgagccagaaatgtatccatagagatctggcggcccggaacgtgcttgtcactgaaaacaatgtgatgaagatcgcagacttcggccttgccagggatatcaacaacatcgattactacaaaaagaccacaaatggaaggctaccagtaaagtggatggcacccgaagccttgtttgatagggtctatacccatcagtccgatgtctggagtttcggtgtcctgatgtgggaaatcttcacattaggcggcagcccctatccggggattcccgtggaagagctgtttaaattgttaaaggagggccatcgaatggataaacctgccaactgcacaaatgagctttatatgatgatgcgcgattgctggcatgcagtacctagccagaggccaactttcaaacagctggtggaagatttggatcgcatacttactcttaccactaatgaggagtacctggacctgtcacagccactggagcagtactcaccaagctatcccgatacccggagctcatgctcaagcggcgacgacagcgtcttctccccggatcctatgccttacgagccttgtctgccccagtatccgcatatcaacggctctgtgaagacctag

SEQ ID NO: 56533 - DNA, 765 bp, Artificial Sequence
  derived and/or modified sequence
atggtgtcctggggccgcttcatctgcctggtggtggtgaccatggccaccctgagcctggcccggcccagcttcagcctggtggaggacaccaccctggagcctgaggagccccccaccaagtaccagatcagccagcctgaggtgtatgtggccgcccctggagagagcctggaggtgcgctgcctgctgaaggatgctgctgtgatctcctggaccaaggatggagtgcacctgggccccaacaacagaacagtgctgattggagagtacctgcagatcaagggggccaccccccgggacagcggcctgtatgcctgcacagccagcaggacagtggacagcgagacctggtacttcatggtgaatgtgacagatgccatcagcagtggagatgatgaagatgacacagatggagcagaagattttgtgtctgagaacagcaacaacaagagggccccctactggaccaacacagagaagatggagaagaggctgcatgctgtgcctgctgccaacacagtgaagttccgctgcccagctgggggcaaccccatgcccaccatgcgctggctgaagaatggcaaggagttcaagcaggagcaccgcatcggcggctacaaggtgaggaaccagcactggagcctcatcatggagagcgtggtgcccagcgacaagggcaactacacctgtgtggtggagaatgaatatggcagcatcaaccacacctaccacctggatgtggtgggcagccagggcctgtag

SEQ ID NO: 56534 - DNA, 2118 bp, Artificial Sequence
  derived and/or modified sequence
atggtgtcctggggccgcttcatctgcctggtggtggtgaccatggccaccctgagcctggcccggcccagcttcagcctggtggaggacaccaccctggagcctgaggagccccccaccaagtaccagatcagccagcctgaggtgtatgtggccgcccctggagagagcctggaggtgcgctgcctgctgaaggatgctgctgtgatctcctggaccaaggatggagtgcacctgggccccaacaacagaacagtgctgattggagagtacctgcagatcaagggggccaccccccgggacagcggcctgtatgcctgcacagccagcaggacagtggacagcgagacctggtacttcatggtgaatgtgacagatgccatcagcagtggagatgatgaagatgacacagatggagcagaagattttgtgtctgagaacagcaacaacaagagggccccctactggaccaacacagagaagatggagaagaggctgcatgctgtgcctgctgccaacacagtgaagttccgctgcccagctgggggcaaccccatgcccaccatgcgctggctgaagaatggcaaggagttcaagcaggagcaccgcatcggcggctacaaggtgaggaaccagcactggagcctcatcatggagagcgtggtgcccagcgacaagggcaactacacctgtgtggtggagaatgaatatggcagcatcaaccacacctaccacctggatgtggtggagaggagcccccaccggcccatcctgcaggccggcctgcctgccaatgccagcacagtggtgggcggagatgtggagtttgtgtgcaaggtgtacagtgatgcccagccccacatccagtggatcaagcacgtggagaagaatggcagcaaatatggcccagatggcctgccctacctgaaggtgctgaaggtgtctgctgagagcagcagctccatgaacagcaacacccccctggtgcgcatcaccacccggctgagcagcacagctgacacccccatgctggccggcgtgtctgaatatgagctgcctgaggaccccaagtgggagttcccccgggacaagctgaccctgggcaagcccctgggggagggctgcttcggccaggtggtgatggccgaggccgtgggcatcgacaaggacaagcccaaggaggccgtgacagtggccgtgaagatgctgaaggatgatgccacagagaaggacctgagtgacctggtgtctgagatggagatgatgaagatgattggcaagcacaagaacatcatcaacctgctgggcgcctgcacccaggacggccccctgtatgtgattgtggagtatgccagcaaaggaaacctgcgggagtacctgcgggcccggcggcccccaggcatggagtacagctatgacatcaacagagtgcctgaggagcagatgaccttcaaggacctggtgtcctgcacctaccagctggcccggggcatggagtacctggccagccagaagtgcatccaccgggacctggccgccagaaatgtgctggtgacagagaacaacgtgatgaagattgctgactttggcctggcccgggacatcaacaacatcgactactacaagaagaccaccaacggccgcctgcctgtgaagtggatggcccctgaggccctgtttgacagagtgtacacccaccagagtgatgtgtggagctttggagtgctgatgtgggagatcttcaccctgggcggcagcccctacccaggcatccctgtggaggagctgttcaagctgctgaaggagggccacaggatggacaagccagccaactgcaccaatgagctgtacatgatgatgagggactgctggcatgctgtgcccagccagaggcccaccttcaagcagctggtggaggacctggaccgcatcctgaccctgaccaccaatgaggagtacctggacctgagccagcccctggagcagtacagccccagctacccagacaccaggagcagctgcagcagtggagatgacagcgtcttctccccagaccccatgccctatgagccctgcctgccccagtacccccacatcaatggatctgtgaagacctag

SEQ ID NO: 56535 - DNA, 765 bp, Artificial Sequence
  derived and/or modified sequence
atggtgagctggggccggttcatctgcctggtggtggtgaccatggctaccctctctctggctcgaccttcctttagcctggttgaagataccactctcgagccagaggagcccccgacgaaatatcaaatctctcagcccgaggtttatgtcgcagcccccggagagtccctcgaggttaggtgcctgttaaaagatgctgctgtaataagttggacgaaggacggcgtgcaccttggccccaacaataggaccgtgctgatcggtgagtacctgcagatcaaaggtgccacacctagagattctggtctgtacgcatgcacggcatccagaacagtggattcagagacttggtatttcatggttaacgttaccgacgccatatcaagcggggacgatgaggacgataccgatggggcggaggatttcgtcagtgaaaacagcaataataagcgagcaccgtattggaccaacactgaaaaaatggaaaaaagacttcacgcggtgccagccgcgaacaccgtgaagttcagatgccctgccggaggtaatcctatgccaactatgaggtggctgaagaatggcaaagagtttaagcaggagcaccgtatcggcgggtacaaggtccggaaccagcattggagtttaataatggaatctgtggtccccagcgacaagggcaattatacctgtgtagtggagaatgagtacgggtctattaaccacacctatcatctggatgttgtgggaagccaagggctctag

SEQ ID NO: 56536 - DNA, 2118 bp, Artificial Sequence
  derived and/or modified sequence
atggtgagctggggccggttcatctgcctggtggtggtgaccatggccactctatccctcgcacgcccaagtttcagtctcgtggaagacaccaccctggagccagaggaacccccaactaagtaccagataagccagcctgaggtctacgtcgccgctcccggggaaagcctggaagttcgatgtctgttaaaagacgctgccgtgatatcctggacaaaggacggagtccatctgggccccaacaataggaccgtgctcattggcgagtacctccagatcaagggcgcgacaccaagagattccggtctgtatgcctgtacagctagccgtaccgttgatagcgagacgtggtatttcatggtgaacgtaaccgacgcgatcagcagtggggatgacgaagacgacaccgacggcgccgaggattttgtaagcgaaaacagcaacaataaacgggcaccctattggaccaatactgagaagatggagaaaagactgcatgctgtccctgccgctaataccgtgaaattccggtgtccagccggcggcaatcccatgcccaccatgaggtggctgaagaacggtaaagagttcaaacaggagcaccggatcggcggctacaaagtacgcaatcagcattggagtctcataatggaatccgtggtgcccagtgataaggggaactacacctgcgtggtggagaatgagtacgggtctataaatcacacttaccacctagacgtggtcgagcggtcccctcaccggcccattctccaggccggcttacctgccaacgcaagcaccgtggttggaggcgacgtggagtttgtttgcaaggtgtattcagatgcccaaccacacatccaatggattaagcatgtcgagaagaacggcagcaagtacggccccgacggactcccatatttaaaagtgcttaaggtgtccgcagaatcttcctcatctatgaatagcaacacccctcttgtaaggattactacaagactgagctctaccgccgacacccccatgcttgccggggtcagcgagtacgaactgcccgaagacccaaagtgggaattccctagagacaagctcacacttggcaagccactgggagaaggttgtttcggtcaggtggtgatggctgaagcggtaggcattgacaaagacaagcccaaggaggctgtaacagtggccgtgaagatgttgaaggacgacgcgacggagaaggatctctcagacctggtgtcagagatggaaatgatgaagatgatcggcaagcacaagaatataatcaatctcctaggagcctgcactcaggacggccctttgtatgtaatagtggaatatgcttccaaaggcaacttgagggagtaccttcgcgcaaggaggccgcccggcatggagtatagctacgatatcaaccgagttcccgaggagcagatgacgtttaaggatttggttagttgcacttatcaactcgcaagaggaatggagtatcttgcgtcacagaagtgcatccacagagacctggctgctagaaatgtcctggtaaccgaaaataacgtaatgaagatcgctgactttgggctggccagagatataaacaatattgactactacaagaaaactacgaacggacggctgccagtcaagtggatggcccccgaggccctattcgaccgtgtgtatacgcaccaatctgacgtttggtccttcggtgtgctcatgtgggagatattcacacttggcggaagcccctatcctggcataccagtcgaggagcttttcaagttgctgaaagaaggtcaccggatggacaaaccagccaattgcactaatgagctctacatgatgatgagagactgctggcacgccgtgccatctcaaaggcctacttttaagcaactggttgaagacttggacagaatcttaaccttgaccaccaacgaagaatatctggatctgtctcagcccctcgagcagtactcaccctcttacccagacactcgatcttcttgttctagcggcgacgattcagtgtttagtcctgatcctatgccctatgaaccatgcctgccccagtatcctcacataaatggatcagtaaaaacctag

SEQ ID NO: 56537 - DNA, 765 bp, Artificial Sequence
  derived and/or modified sequence
atggtgagctgggggcgatttatttgcctggtggtcgtgacaatggccacactcagccttgccagaccgtctttctctctggtggaggacaccaccctcgaaccagaagaaccccctactaagtaccagatatctcagcccgaggtgtatgtggcggctcccggtgaaagcctcgaagtcagatgtctactgaaggacgccgctgtgatttcttggacaaaggatggtgtccatctgggacctaataatcggaccgtgttaatcggggagtacctccagatcaagggggctacaccccgtgactctggactctacgcctgcactgcaagtcgcaccgttgactctgaaacatggtattttatggtcaatgtaaccgacgccatttcatccggcgatgacgaggatgacaccgatggggcagaagacttcgtgtcagaaaatagtaataataagagagcgccatattggactaacactgagaaaatggagaagcgcctgcacgccgtcccagctgcaaatacagtaaaatttaggtgccccgcagggggaaaccccatgccaacgatgcgctggttaaagaatggaaaggaattcaaacaggagcacagaattggagggtataaagtgagaaatcagcattggtcactgatcatggagagtgtggtgcccagtgacaaggggaactatacttgcgtcgtggaaaacgaatacggcagcattaatcacacctaccaccttgacgtggtcggaagccaaggactctag

SEQ ID NO: 56538 - DNA, 2118 bp, Artificial Sequence
  derived and/or modified sequence
atggtcagctggggaaggttcatttgcctggtcgtggtgacgatggcgacactgagcctggcaaggcccagcttttctctggtggaagatacaacactggagcctgaggagccacctactaaatatcaaatttctcagcctgaggtatacgttgccgctcctggcgagagcctcgaggtacgctgcttactgaaagatgctgctgtgatctcctggactaaagacggagtacacctgggtcctaacaatcgtactgtgcttatcggcgaatacctgcaaatcaaaggagctacacctcgggattccgggctctatgcttgcactgcgagcagaaccgtggattccgagacatggtacttcatggtcaatgtaaccgacgctatttcatcaggggatgacgaggacgacaccgatggggctgaggatttcgtctcagagaattccaacaataagcgagcgccttactggactaataccgagaagatggaaaaacggctgcacgcagtgccagctgccaatactgtgaaatttcgatgcccagcagggggaaaccctatgccaacaatgcgttggctgaagaacggaaaggagttcaagcaggagcatcgcattgggggttacaaggttcggaatcaacactggtcattaataatggaaagcgtggtgccctccgacaaagggaactatacctgcgtagtggaaaatgagtacgggtccatcaaccacacttatcacctggacgttgtcgaaaggtcccctcaccgcccaatcttgcaagcgggattgcctgcaaacgcttccaccgtggttggcggagacgtagagtttgtctgtaaggtctattcagacgcccagccacatattcagtggatcaagcatgtggaaaagaatggtagcaaatacggtcctgacggactgccctacctgaaagtgctgaaagtgagcgccgagagttcttcaagcatgaactctaatacacctctggtgcggataacgacccgcctgtcctcgaccgctgatacacccatgcttgccggtgtgtctgagtacgaactgcccgaagaccctaaatgggagttccccagggacaaactgacgctggggaaaccattgggcgaggggtgtttcggtcaagtggtgatggcggaggccgtcgggattgataaagacaaaccaaaggaagcagtcaccgtcgcggtgaaaatgcttaaggacgatgcgacagagaaggacctgtctgatcttgtctcagagatggagatgatgaagatgattgggaaacacaaaaatatcattaacttgctgggggcttgcacccaggacggtcctctgtacgtcatcgttgaatacgcatctaaaggaaacttaagagagtacctgagggcccgaaggccccctggcatggaatatagttacgatatcaatagggtgcccgaggaacagatgacttttaaagacctcgttagctgcacctatcagctggctagggggatggagtacctcgcctctcagaagtgtattcatcgagacctggccgcacggaacgtgcttgtcacagagaataacgtaatgaaaattgctgacttcggtctggccagagatattaacaatatagactattacaagaagacaacaaatggcagactgccggtcaaatggatggcaccagaggcgttgttcgacagggtttatacacaccagagtgacgtctggtcgtttggggtcctgatgtgggagatctttacactcggcggatcaccttatcctggtatacctgtagaagagttgttcaaactgctgaaagagggacatcggatggacaagccggcaaattgtactaacgagctctatatgatgatgagagattgctggcacgccgtgccgtctcagaggcctacgttcaagcagctggtggaagacctggatcgcattttaacgctgacaaccaacgaggaatatctcgatctgagccagcctcttgagcagtattctccctcctaccccgatacaaggagttcgtgttcttccggagacgacagcgtgttttcccccgaccctatgccatacgagccatgcctcccacagtacccccacatcaacggttccgtgaaaacctag

SEQ ID NO: 56539 - DNA, 765 bp, Artificial Sequence
  derived and/or modified sequence
atggtgagctggggcagattcatctgcctggtggtggtgaccatggccaccctgagcctggccagacccagcttcagcctggtggaggacaccaccctggagcccgaggagccccccaccaagtaccagatcagccagcccgaggtgtacgtggccgcccccggcgagagcctggaggtgagatgcctgctgaaggacgccgccgtgatcagctggaccaaggacggcgtgcacctgggccccaacaacagaaccgtgctgatcggcgagtacctgcagatcaagggcgccacccccagagacagcggcctgtacgcctgcaccgccagcagaaccgtggacagcgagacctggtacttcatggtgaacgtgaccgacgccatcagcagcggcgacgacgaggacgacaccgacggcgccgaggacttcgtgagcgagaacagcaacaacaagagagccccctactggaccaacaccgagaagatggagaagagactgcacgccgtgcccgccgccaacaccgtgaagttcagatgccccgccggcggcaaccccatgcccaccatgagatggctgaagaacggcaaggagttcaagcaggagcacagaatcggcggctacaaggtgagaaaccagcactggagcctgatcatggagagcgtggtgcccagcgacaagggcaactacacctgcgtggtggagaacgagtacggcagcatcaaccacacctaccacctggacgtggtgggcagccagggcctgtag

SEQ ID NO: 56540 - DNA, 2118 bp, Artificial Sequence
  derived and/or modified sequence
atggtgagctggggcagattcatctgcctggtggtggtgaccatggccaccctgagcctggccagacccagcttcagcctggtggaggacaccaccctggagcccgaggagccccccaccaagtaccagatcagccagcccgaggtgtacgtggccgcccccggcgagagcctggaggtgagatgcctgctgaaggacgccgccgtgatcagctggaccaaggacggcgtgcacctgggccccaacaacagaaccgtgctgatcggcgagtacctgcagatcaagggcgccacccccagagacagcggcctgtacgcctgcaccgccagcagaaccgtggacagcgagacctggtacttcatggtgaacgtgaccgacgccatcagcagcggcgacgacgaggacgacaccgacggcgccgaggacttcgtgagcgagaacagcaacaacaagagagccccctactggaccaacaccgagaagatggagaagagactgcacgccgtgcccgccgccaacaccgtgaagttcagatgccccgccggcggcaaccccatgcccaccatgagatggctgaagaacggcaaggagttcaagcaggagcacagaatcggcggctacaaggtgagaaaccagcactggagcctgatcatggagagcgtggtgcccagcgacaagggcaactacacctgcgtggtggagaacgagtacggcagcatcaaccacacctaccacctggacgtggtggagagaagcccccacagacccatcctgcaggccggcctgcccgccaacgccagcaccgtggtgggcggcgacgtggagttcgtgtgcaaggtgtacagcgacgcccagccccacatccagtggatcaagcacgtggagaagaacggcagcaagtacggccccgacggcctgccctacctgaaggtgctgaaggtgagcgccgagagcagcagcagcatgaacagcaacacccccctggtgagaatcaccaccagactgagcagcaccgccgacacccccatgctggccggcgtgagcgagtacgagctgcccgaggaccccaagtgggagttccccagagacaagctgaccctgggcaagcccctgggcgagggctgcttcggccaggtggtgatggccgaggccgtgggcatcgacaaggacaagcccaaggaggccgtgaccgtggccgtgaagatgctgaaggacgacgccaccgagaaggacctgagcgacctggtgagcgagatggagatgatgaagatgatcggcaagcacaagaacatcatcaacctgctgggcgcctgcacccaggacggccccctgtacgtgatcgtggagtacgccagcaagggcaacctgagagagtacctgagagccagaagaccccccggcatggagtacagctacgacatcaacagagtgcccgaggagcagatgaccttcaaggacctggtgagctgcacctaccagctggccagaggcatggagtacctggccagccagaagtgcatccacagagacctggccgccagaaacgtgctggtgaccgagaacaacgtgatgaagatcgccgacttcggcctggccagagacatcaacaacatcgactactacaagaagaccaccaacggcagactgcccgtgaagtggatggcccccgaggccctgttcgacagagtgtacacccaccagagcgacgtgtggagcttcggcgtgctgatgtgggagatcttcaccctgggcggcagcccctaccccggcatccccgtggaggagctgttcaagctgctgaaggagggccacagaatggacaagcccgccaactgcaccaacgagctgtacatgatgatgagagactgctggcacgccgtgcccagccagagacccaccttcaagcagctggtggaggacctggacagaatcctgaccctgaccaccaacgaggagtacctggacctgagccagcccctggagcagtacagccccagctaccccgacaccagaagcagctgcagcagcggcgacgacagcgtgttcagccccgaccccatgccctacgagccctgcctgccccagtacccccacatcaacggcagcgtgaagacctag

SEQ ID NO: 56541 - protein, 704 aa, Artificial Sequence
  derived and/or modified sequence
MVSWGRFICLVVVTMATLSLARPSFSLVEDTTLEPEGAPYWTNTEKMEKRLHAVPAANTVKFRCPAGGNPMPTMRWLKNGKEFKQEHRIGGYKVRNQHWSLIMESVVPSDKGNYTCVVENEYGSINHTYHLDVVERSPHRPILQAGLPANASTVVGGDVEFVCKVYSDAQPHIQWIKHVEKNGSKYGPDGLPYLKVLKAAGVNTTDKEIEVLYIRNVTFEDAGEYTCLAGNSIGISFHSAWLTVLPAPGREKEITASPDYLEIAIYCIGVFLIACMVVTVILCRMKNTTKKPDFSSQPAVHKLTKRIPLRRQVSAESSSSMNSNTPLVRITTRLSSTADTPMLAGVSEYELPEDPKWEFPRDKLTLGKPLGEGCFGQVVMAEAVGIDKDKPKEAVTVAVKMLKDDATEKDLSDLVSEMEMMKMIGKHKNIINLLGACTQDGPLYVIVEYASKGNLREYLRARRPPGMEYSYDINRVPEEQMTFKDLVSCTYQLARGMEYLASQKCIHRDLAARNVLVTENNVMKIADFGLARDINNIDYYKKTTNGRLPVKWMAPEALFDRVYTHQSDVWSFGVLMWEIFTLGGSPYPGIPVEELFKLLKEGHRMDKPANCTNELYMMMRDCWHAVPSQRPTFKQLVEDLDRILTLTTNEEYLDLSQPLEQYSPSYPDTRSSCSSGDDSVFSPDPMPYEPCLPQYPHINGSVKT

SEQ ID NO: 56542 - DNA, 3547 bp, Artificial Sequence
  derived and/or modified sequence
ggcggcggctggaggagagcgcggtggagagccgagcgggcgggcggcgggtgcggagcgggcgagggagcgcgcgcggccgccacaaagctcgggcgccgcggggctgcatgcggcgtacctggcccggcgcggcgactgctctccgggctggcgggggccggccgcgagccccgggggccccgaggccgcagcttgcctgcgcgctctgagccttcgcaactcgcgagcaaagtttggtggaggcaacgccaagcctgagtcctttcttcctctcgttccccaaatccgagggcagcccgcgggcgtcatgcccgcgctcctccgcagcctggggtacgcgtgaagcccgggaggcttggcgccggcgaagacccaaggaccactcttctgcgtttggagttgctccccgcaaccccgggctcgtcgctttctccatcccgacccacgcggggcgcggggacaacacaggtcgcggaggagcgttgccattcaagtgactgcagcagcagcggcagcgcctcggttcctgagcccaccgcaggctgaaggcattgcgcgtagtccatgcccgtagaggaagtgtgcagatgggattaacgtccacatggagatatggaagaggaccggggattggtaccgtaaccatggtcagctggggtcgtttcatctgcctggtcgtggtcaccatggcaaccttgtccctggcccggccctccttcagtttagttgaggataccacattagagccagaaggagcaccatactggaccaacacagaaaagatggaaaagcggctccatgctgtgcctgcggccaacactgtcaagtttcgctgcccagccggggggaacccaatgccaaccatgcggtggctgaaaaacgggaaggagtttaagcaggagcatcgcattggaggctacaaggtacgaaaccagcactggagcctcattatggaaagtgtggtcccatctgacaagggaaattatacctgtgtagtggagaatgaatacgggtccatcaatcacacgtaccacctggatgttgtggagcgatcgcctcaccggcccatcctccaagccggactgccggcaaatgcctccacagtggtcggaggagacgtagagtttgtctgcaaggtttacagtgatgcccagccccacatccagtggatcaagcacgtggaaaagaacggcagtaaatacgggcccgacgggctgccctacctcaaggttctcaaggccgccggtgttaacaccacggacaaagagattgaggttctctatattcggaatgtaacttttgaggacgctggggaatatacgtgcttggcgggtaattctattgggatatcctttcactctgcatggttgacagttctgccagcgcctggaagagaaaaggagattacagcttccccagactacctggagatagccatttactgcataggggtcttcttaatcgcctgtatggtggtaacagtcatcctgtgccgaatgaagaacacgaccaagaagccagacttcagcagccagccggctgtgcacaagctgaccaaacgtatccccctgcggagacaggtttcggctgagtccagctcctccatgaactccaacaccccgctggtgaggataacaacacgcctctcttcaacggcagacacccccatgctggcaggggtctccgagtatgaacttccagaggacccaaaatgggagtttccaagagataagctgacactgggcaagcccctgggagaaggttgctttgggcaagtggtcatggcggaagcagtgggaattgacaaagacaagcccaaggaggcggtcaccgtggccgtgaagatgttgaaagatgatgccacagagaaagacctttctgatctggtgtcagagatggagatgatgaagatgattgggaaacacaagaatatcataaatcttcttggagcctgcacacaggatgggcctctctatgtcatagttgagtatgcctctaaaggcaacctccgagaatacctccgagcccggaggccacccgggatggagtactcctatgacattaaccgtgttcctgaggagcagatgaccttcaaggacttggtgtcatgcacctaccagctggccagaggcatggagtacttggcttcccaaaaatgtattcatcgagatttagcagccagaaatgttttggtaacagaaaacaatgtgatgaaaatagcagactttggactcgccagagatatcaacaatatagactattacaaaaagaccaccaatgggcggcttccagtcaagtggatggctccagaagccctgtttgatagagtatacactcatcagagtgatgtctggtccttcggggtgttaatgtgggagatcttcactttagggggctcgccctacccagggattcccgtggaggaactttttaagctgctgaaggaaggacacagaatggataagccagccaactgcaccaacgaactgtacatgatgatgagggactgttggcatgcagtgccctcccagagaccaacgttcaagcagttggtagaagacttggatcgaattctcactctcacaaccaatgaggaatacttggacctcagccaacctctcgaacagtattcacctagttaccctgacacaagaagttcttgttcttcaggagatgattctgttttttctccagaccccatgccttacgaaccatgccttcctcagtatccacacataaacggcagtgttaaaacatgaatgactgtgtctgcctgtccccaaacaggacagcactgggaacctagctacactgagcagggagaccatgcctcccagagcttgttgtctccacttgtatatatggatcagaggagtaaataattggaaaagtaatcagcatatgtgtaaagatttatacagttgaaaacttgtaatcttccccaggaggagaagaaggtttctggagcagtggactgccacaagccaccatgtaacccctctcacctgccgtgcgtactggctgtggaccagtaggactcaaggtggacgtgcgttctgccttccttgttaattttgtaataattggagaagatttatgtcagcacacacttacagagcacaaatgcagtatataggtgctggatgtatgtaaatatattcaaattatgtataaatatatattatatatttacaaggagttattttttgtattgattttaaatggatgtcccaatgcacctagaaaattggtctctctttttttaatagctatttgctaaatgctgttcttacacataatttcttaattttcaccgagcagaggtggaaaaatacttttgctttcagggaaaatggtataacgttaatttattaataaattggtaatatacaaaacaattaatcatttatagttttttttgtaatttaagtggcatttctatgcaggcagcacagcagactagttaatctattgcttggacttaactagttatcagatcctttgaaaagagaatatttacaatatatgactaatttggggaaaa

SEQ ID NO: 56543 - DNA, 2115 bp, Artificial Sequence
  derived and/or modified sequence
atggttagctggggacgcttcatttgcctagtggtagtgactatggccactttgagtctggctcgaccatctttcagtctggtagaggacacaacactggagcccgaaggcgctccgtactggacaaacacagaaaaaatggagaaaagactgcacgccgtgccagccgcaaacactgtgaagtttaggtgtcccgcaggaggtaacccgatgccaaccatgcggtggctgaaaaacggaaaagagttcaagcaagagcacagaatcggcggctataaggttcgtaaccagcattggagccttatcatggaatccgtcgtgccgtcggacaagggtaactacacctgcgtggtagagaatgagtatgggtccatcaaccatacctaccatctcgacgtggtggaaagatctccccatcgcccgatcctgcaggccggtctcccagctaatgcttctaccgtggttggaggtgatgtggagttcgtctgcaaggtgtacagcgatgcgcagccacatattcagtggattaaacatgtcgagaagaacggtagtaagtacggtcctgatgggctgccctacctaaaggtgctcaaagctgccggggtcaacacaaccgacaaagagattgaggtgctgtacatccgcaacgtaacctttgaggacgcaggcgagtacacctgcctagccggtaattcaatcggaatttctttccatagtgcttggctgactgtcctcccggcccccggccgcgagaaggagataacggcctcacctgattatctggagatcgctatctactgtatcggagtcttcctgatcgcttgcatggtggttaccgtgattttgtgtagaatgaaaaacacaacgaagaaaccagatttttcaagtcagccagccgtgcataagctgaccaaaagaattccactccgcaggcaggtgagcgccgaaagctcaagctctatgaactctaacactccacttgtgagaattacaacccggctttccagtacagctgacactccgatgctcgctggggttagtgagtacgagctccctgaggaccccaaatgggagttcccccgggacaaactgactcttgggaagcctttgggggagggttgtttcggtcaagtggtcatggcagaggccgtcggaattgacaaggacaagcccaaagaggcagtcacagttgccgtaaaaatgctgaaggatgacgcgactgaaaaggatctgtcggacctagtgagtgagatggaaatgatgaaaatgatcggcaagcacaaaaacattattaatctgttaggggcctgcacacaggatggaccactgtatgtcattgtcgagtacgcctccaagggcaatttgcgagaatatttacgagccagacgcccacccggcatggaatattcatacgacattaaccgggtccccgaggaacagatgacttttaaagacctggtaagctgcacataccagcttgcccggggcatggagtatcttgcgagccagaagtgtatccatcgcgatttggccgctcgtaatgtgttggttaccgaaaataatgtgatgaagatcgctgattttggattggctcgggatatcaataacatcgactattacaaaaagacaacgaatggacgtctgcccgtaaagtggatggcaccagaagccctttttgatagagtctacactcaccagtcggatgtgtggagttttggcgtccttatgtgggagatatttaccttgggaggcagtccttaccctggcatcccagtggaggagctgtttaaattgttgaaagaggggcaccgcatggataaacctgctaactgcactaatgaactgtacatgatgatgagagactgttggcacgcagtgccctctcagaggccaacatttaagcagctcgtggaagacttggacaggatactgaccctcaccactaatgaggagtacctcgatctttctcagcctctggagcagtacagtcctagttatcccgacactcgtagcagctgttcaagcggcgacgacagtgtattcagccctgaccccatgccatacgagccctgtttgccccagtaccctcatattaacggcagtgtgaagacgtag

SEQ ID NO: 56544 - DNA, 2115 bp, Artificial Sequence
  derived and/or modified sequence
atggtgtcctggggccgcttcatctgcctggtggtggtgaccatggccaccctgagcctggcccggcccagcttcagcctggtggaggacaccaccctggagcctgagggcgccccctactggaccaacacagagaagatggagaagaggctgcatgctgtgcctgctgccaacacagtgaagttccgctgcccagctgggggcaaccccatgcccaccatgcgctggctgaagaatggcaaggagttcaagcaggagcacagaattggaggctacaaggtgaggaaccagcactggagcctcatcatggagagcgtggtgcccagcgacaagggcaactacacctgtgtggtggagaatgaatatggcagcatcaaccacacctaccacctggatgtggtggagaggagcccccaccggcccatcctgcaggccggcctgcctgccaatgccagcacagtggtgggcggagatgtggagtttgtgtgcaaggtgtacagtgatgcccagccccacatccagtggatcaagcacgtggagaagaatggcagcaaatatggcccagatggcctgccctacctgaaggtgctgaaggccgccggcgtgaacaccacagacaaggagattgaggtgctgtacatcagaaatgtgacctttgaagatgctggggagtacacctgcctggccggcaacagcatcggcatctccttccacagcgcctggctgactgtgctgcctgcccctggccgggagaaggagatcacagccagcccagactacctggagatcgccatctactgcatcggggtcttcctgattgcctgcatggtggtgaccgtcatcctgtgcaggatgaagaacaccaccaagaagccagacttcagcagccagcctgctgtgcacaagctgaccaagaggatccccctgcggcggcaggtgtctgctgagagcagcagctccatgaacagcaacacccccctggtgcgcatcaccacccggctgagcagcacagctgacacccccatgctggccggcgtgtctgaatatgagctgcctgaggaccccaagtgggagttcccccgggacaagctgaccctgggcaagcccctgggggagggctgcttcggccaggtggtgatggccgaggccgtgggcatcgacaaggacaagcccaaggaggccgtgacagtggccgtgaagatgctgaaggatgatgccacagagaaggacctgagtgacctggtgtctgagatggagatgatgaagatgattggcaagcacaagaacatcatcaacctgctgggcgcctgcacccaggacggccccctgtatgtgattgtggagtatgccagcaagggcaacctgcgggagtacctgcgggcccggcggcccccaggcatggagtacagctatgacatcaacagagtgcctgaggagcagatgaccttcaaggacctggtgtcctgcacctaccagctggcccggggcatggagtacctggccagccagaagtgcatccaccgggacctggccgccagaaatgtgctggtgacagaaaataatgtgatgaagattgctgactttggcctggcccgggacatcaacaacatcgactactacaagaagaccaccaacggccgcctgcctgtgaagtggatggcccctgaggccctgtttgacagagtgtacacccaccagagtgatgtgtggagctttggagtgctgatgtgggagatcttcaccctgggcggcagcccctacccaggcatccctgtggaggagctgttcaagctgctgaaggagggccacaggatggacaagccagccaactgcaccaatgagctgtacatgatgatgagggactgctggcatgctgtgcccagccagaggcccaccttcaagcagctggtggaggacctggaccgcatcctgaccctgaccaccaatgaggagtacctggacctgagccagcccctggagcagtacagccccagctacccagacaccaggagcagctgcagcagtggagatgattctgtgttctccccagaccccatgccctatgagccctgcctgccccagtacccccacatcaatggatctgtgaagacctag

SEQ ID NO: 56545 - DNA, 2115 bp, Artificial Sequence
  derived and/or modified sequence
atggtgagctggggccggttcatctgcctggtggtggtgaccatggccaccctgtctctggcccgcccatcattttcgctagtagaggatacgacgcttgagccagaaggggctccctactggaccaacactgaaaagatggaaaaacgcctgcacgcagtcccggccgccaatacagtgaagttccggtgccctgccggcgggaatcctatgccgactatgaggtggctgaaaaatggaaaagagtttaagcaggagcacaggattggtggctacaaggtgagaaaccaacattggagcctcatcatggaaagtgtagttccttcggacaaaggcaactatacatgtgtggtggaaaacgagtacggaagcattaatcacacttatcacctcgatgtagtagaaagatccccccacagacccatcttgcaggccggcctccctgccaacgcgagcaccgtggtgggaggtgatgttgagtttgtgtgtaaggtgtattctgatgctcagccacatattcaatggatcaagcacgtggaaaagaatggcagcaaatatgggcctgacgggctgccgtacttgaaagtgctgaaggccgctggagttaataccaccgacaaagagattgaagtcctgtacatccgtaacgttaccttcgaggacgctggggaatacacctgtctcgccggtaattcaatcggcataagttttcattctgcatggcttacagtgctgcccgctccagggagagagaaggagatcaccgcaagcccagactacttagagattgcgatttattgtataggggtcttccttatcgcttgtatggtggtaacggtgatcctctgccggatgaagaataccactaagaagcctgacttctcaagtcagccagccgtgcataaacttacaaaacgaatccccctgcggcgtcaggtctctgctgaatcatccagcagcatgaactctaacacacctcttgtgcgcatcacaacaagattgtctagcactgccgataccccaatgctagcaggagtcagcgagtatgagttacctgaggatccaaaatgggaattcccacgggacaagctcaccttaggaaaacctctaggtgagggctgctttggacaagtggttatggcagaggccgtcggtattgacaaagacaaaccaaaggaagcggtaactgtcgccgtgaagatgctgaaggacgatgcaaccgagaaggacctgtctgacttagtgtccgagatggaaatgatgaaaatgattggcaaacataagaacataattaatctgctgggcgcatgtactcaagacggaccactctatgtcattgtcgaatatgcctcaaaggggaatctaagggagtatctgagagccagaagaccccccggcatggaatatagttacgacattaatcgcgttccagaggagcagatgaccttcaaagaccttgtctcctgtacctaccagctggcccgaggtatggaatacctggcatcgcaaaagtgcatccatcgcgacctggctgcccggaatgttcttgtcacggagaacaatgttatgaaaatagcagatttcggcctggcccgggatattaataatattgattactataaaaaaacaacgaatgggcgtctgcctgtgaaatggatggcccccgaggctctttttgatagggtgtatacacaccagtcagatgtgtggagtttcggagtcctgatgtgggaaatttttacgctcgggggatctccgtaccccggcattcccgtggaggaactgtttaaattgctcaaggaaggacatcgtatggacaagcctgccaattgcaccaacgagttatacatgatgatgagggattgttggcacgccgttccgtcccaacgccctactttcaaacagttggtcgaggatcttgacaggatccttactttgactactaatgaggagtatctcgacctctcccagcccctggaacagtatagcccaagttacccagatacacggagcagctgttcaagtggcgacgattcagtgttttcccccgacccaatgccatatgagccctgccttccacagtacccacatatcaatggaagcgtgaagacctag

SEQ ID NO: 56546 - DNA, 2115 bp, Artificial Sequence
  derived and/or modified sequence
atggtgtcctggggcagattcatctgcttagtggttgtgaccatggccacccttagcctggccaggccctcattttccttggtggaggacaccacgctcgagcccgaaggggcaccatattggaccaacaccgagaagatggagaaaaggctccacgccgtccctgccgcaaacaccgtgaaatttcgatgccctgccggagggaacccaatgccgacaatgaggtggctgaagaacggcaaagaatttaaacaggaacaccgtattggcggttataaagttaggaaccagcactggagtctgatcatggaaagtgtggtccccagcgataaaggtaattatacctgtgtggtggaaaatgaatatgggagcatcaaccatacctaccatctggatgtggtcgagagatctccccatagaccaattcttcaggcaggcctgccagccaacgcaagcacagtggtggggggagatgtggagtttgtctgtaaggtctacagcgacgctcagccccacatccagtggataaaacacgtcgagaaaaacgggagtaaatacggccctgatggtctcccctacctaaaagtgctgaaggcagccggagtgaacaccaccgataaggagatagaagtgttgtatatccgcaacgtgacatttgaagacgctggcgagtatacatgcctagctggtaatagtatcggcatatccttccattctgcctggctaactgttctccccgctccaggaagagaaaaggaaattacggcgtcaccggattacttggaaatcgctatttactgcatcggcgtgtttctgatcgcctgcatggttgtgactgtgatcttgtgccgcatgaagaacaccacaaagaagcctgacttcagcagtcagccagcagtacacaagttgaccaagagaattcctctgaggcgccaggtttccgctgaaagctccagcagcatgaattctaacaccccactggtaaggattaccacacgactgtcatcaacagccgatacccctatgctggccggtgtgtctgagtatgagctcccggaggatcccaaatgggaatttccacgcgacaaacttacactcggtaagccccttggtgaaggttgcttcggccaggtggttatggctgaagccgtaggcattgacaaggataagccaaaggaggccgtaaccgtggcagtcaaaatgctaaaggacgacgccactgaaaaagacttaagtgaccttgtgagcgaaatggagatgatgaagatgatagggaagcacaagaatataatcaatttacttggtgcctgtactcaggatggaccgctgtacgtcatcgtggaatatgcttctaagggtaatctcagggagtacttaagggctcgtcgtccgcctgggatggaatacagttacgatatcaaccgggtgcccgaggagcagatgacattcaaggatctggtgtcctgtacctatcaactcgctaggggcatggaatacctggcctctcagaagtgtatccaccgggacttagccgcaagaaacgtgcttgtcaccgaaaataacgtcatgaagatcgccgacttcggccttgcaagagatatcaacaatatcgactattataaaaagaccactaatggcaggcttcccgtgaaatggatggctccagaggcattgttcgaccgggtatacacccaccaaagcgacgtgtggtctttcggtgttcttatgtgggaaatattcacccttgggggaagtccctaccccggtattcccgttgaggaactcttcaaactacttaaggagggacataggatggataaacctgccaattgtactaacgaactgtacatgatgatgagagattgttggcatgcagtcccgtctcaacgccctaccttcaaacagttagtggaagacctcgatagaattcttacgctgaccactaacgaggaatatctggacctcagtcagccacttgagcagtattccccctcttacccagacactcgctccagctgcagttccggagacgactccgtattctcaccagatcccatgccatacgagccttgtttgccacaatatcctcacatcaacggctctgtcaaaacatag

SEQ ID NO: 56547 - DNA, 2115 bp, Artificial Sequence
  derived and/or modified sequence
atggtgagctggggcagattcatctgcctggtggtggtgaccatggccaccctgagcctggccagacccagcttcagcctggtggaggacaccaccctggagcccgagggcgccccctactggaccaacaccgagaagatggagaagagactgcacgccgtgcccgccgccaacaccgtgaagttcagatgccccgccggcggcaaccccatgcccaccatgagatggctgaagaacggcaaggagttcaagcaggagcacagaatcggcggctacaaggtgagaaaccagcactggagcctgatcatggagagcgtggtgcccagcgacaagggcaactacacctgcgtggtggagaacgagtacggcagcatcaaccacacctaccacctggacgtggtggagagaagcccccacagacccatcctgcaggccggcctgcccgccaacgccagcaccgtggtgggcggcgacgtggagttcgtgtgcaaggtgtacagcgacgcccagccccacatccagtggatcaagcacgtggagaagaacggcagcaagtacggccccgacggcctgccctacctgaaggtgctgaaggccgccggcgtgaacaccaccgacaaggagatcgaggtgctgtacatcagaaacgtgaccttcgaggacgccggcgagtacacctgcctggccggcaacagcatcggcatcagcttccacagcgcctggctgaccgtgctgcccgcccccggcagagagaaggagatcaccgccagccccgactacctggagatcgccatctactgcatcggcgtgttcctgatcgcctgcatggtggtgaccgtgatcctgtgcagaatgaagaacaccaccaagaagcccgacttcagcagccagcccgccgtgcacaagctgaccaagagaatccccctgagaagacaggtgagcgccgagagcagcagcagcatgaacagcaacacccccctggtgagaatcaccaccagactgagcagcaccgccgacacccccatgctggccggcgtgagcgagtacgagctgcccgaggaccccaagtgggagttccccagagacaagctgaccctgggcaagcccctgggcgagggctgcttcggccaggtggtgatggccgaggccgtgggcatcgacaaggacaagcccaaggaggccgtgaccgtggccgtgaagatgctgaaggacgacgccaccgagaaggacctgagcgacctggtgagcgagatggagatgatgaagatgatcggcaagcacaagaacatcatcaacctgctgggcgcctgcacccaggacggccccctgtacgtgatcgtggagtacgccagcaagggcaacctgagagagtacctgagagccagaagaccccccggcatggagtacagctacgacatcaacagagtgcccgaggagcagatgaccttcaaggacctggtgagctgcacctaccagctggccagaggcatggagtacctggccagccagaagtgcatccacagagacctggccgccagaaacgtgctggtgaccgagaacaacgtgatgaagatcgccgacttcggcctggccagagacatcaacaacatcgactactacaagaagaccaccaacggcagactgcccgtgaagtggatggcccccgaggccctgttcgacagagtgtacacccaccagagcgacgtgtggagcttcggcgtgctgatgtgggagatcttcaccctgggcggcagcccctaccccggcatccccgtggaggagctgttcaagctgctgaaggagggccacagaatggacaagcccgccaactgcaccaacgagctgtacatgatgatgagagactgctggcacgccgtgcccagccagagacccaccttcaagcagctggtggaggacctggacagaatcctgaccctgaccaccaacgaggagtacctggacctgagccagcccctggagcagtacagccccagctaccccgacaccagaagcagctgcagcagcggcgacgacagcgtgttcagccccgaccccatgccctacgagccctgcctgccccagtacccccacatcaacggcagcgtgaagacctag

SEQ ID NO: 56548 - protein, 680 aa, Artificial Sequence
  derived and/or modified sequence
MVSWGRFICLVVVTMATLSLARPSFSLVEDTTLEPEDAISSGDDEDDTDGAEDFVSENSNNKRAPYWTNTEKMEKRLHAVPAANTVKFRCPAGGNPMPTMRWLKNGKEFKQEHRIGGYKVRNQHWSLIMESVVPSDKGNYTCVVENEYGSINHTYHLDVVERSPHRPILQAGLPANASTVVGGDVEFVCKVYSDAQPHIQWIKHVEKNGSKYGPDGLPYLKVLKHSGINSSNAEVLALFNVTEADAGEYICKVSNYIGQANQSAWLTVLPKQQAPGREKEITASPDYLEIAIYCIGVFLIACMVVTVILCRMKNTTKKPDFSSQPAVHKLTKRIPLRRQVTVSAESSSSMNSNTPLVRITTRLSSTADTPMLAGVSEYELPEDPKWEFPRDKLTLGKPLGEGCFGQVVMAEAVGIDKDKPKEAVTVAVKMLKDDATEKDLSDLVSEMEMMKMIGKHKNIINLLGACTQDGPLYVIVEYASKGNLREYLRARRPPGMEYSYDINRVPEEQMTFKDLVSCTYQLARGMEYLASQKCIHRDLAARNVLVTENNVMKIADFGLARDINNIDYYKKTTNGRLPVKWMAPEALFDRVYTHQSDVWSFGVLMWEIFTLGGSPYPGIPVEELFKLLKEGHRMDKPANCTNELYMMMRDCWHAVPSQRPTFKQLVEDLDRILTLTTNEI

SEQ ID NO: 56549 - DNA, 2043 bp, Artificial Sequence
  derived and/or modified sequence
atggtgagttggggccgatttatatgcctcgtggtagtcacaatggctaccctgagtttggcaagaccatctttcagcctggtggaggataccacactggaacccgaggatgctatatcatctggtgacgacgaggatgataccgacggtgctgaagatttcgtctcggaaaatagtaataacaaacgcgccccttattggacaaatactgagaagatggaaaagcgcctccacgcagtccctgctgctaacacagtgaaattccgatgtcctgcaggggggaatcccatgccgaccatgaggtggctgaaaaatggtaaggaattcaaacaagagcaccgcatcggcgggtacaaggtgcgcaaccaacactggagccttataatggagagtgtagtccccagtgacaagggcaattatacctgcgtagtggaaaatgagtacggcagcattaaccacacttatcacctggatgtcgtggagcggtccccgcaccgccctattctgcaagctggacttcctgccaatgcttctaccgtggtggggggtgacgttgagtttgtatgtaaggtgtactccgatgcacagccccacatacaatggatcaaacacgtggaaaaaaacggtagcaagtatggaccagacggactaccttacctcaaggtcctgaagcacagtggcattaattcttccaacgctgaagttcttgccctgttcaacgtgaccgaggcagacgcaggcgaatatatatgcaaagtatcgaactatattggccaagccaatcagagcgcttggttgaccgtgctccccaagcagcaggcacctggacgagaaaaggaaatcacggcctctcccgattatctcgaaatagctatttactgtatcggtgtctttcttattgcttgcatggtggtgactgtgatcctgtgcaggatgaaaaacaccactaaaaaaccagacttttctagtcaacctgcagttcataagttgacaaagcggatccctctaagaaggcaagtcaccgtctccgccgagagtagctcttccatgaatagtaatactcccctggtccgcatcactaccaggctgagttccacggctgacactccaatgttagcgggagtaagtgaatacgagctgccggaggaccccaaatgggagttcccaagagacaaactgactttaggcaagccactaggtgagggctgtttcggccaggtcgttatggctgaggccgtggggatcgataaagacaagcccaaagaagcggttactgtcgctgtcaagatgctgaaggatgatgctactgaaaaagacttgtcagatctggtttcagagatggagatgatgaagatgatcggaaaacacaaaaatatcataaatttgttgggcgcctgtactcaggatggtccattgtatgtgattgttgagtacgccagtaagggtaacctgagggaatacctgagggccagacgtcctcccggcatggagtacagctatgatatcaaccgcgtgccagaggagcagatgacctttaaagacctagtttcttgcacgtaccagctcgccagagggatggagtatcttgcgtcccaaaaatgtatccatcgggatcttgccgcacgaaacgtgttggtcactgaaaataacgtgatgaagattgccgattttgggctggcgcgtgacatcaacaacatcgattattacaagaagacaaccaatgggagactccccgttaagtggatggccccagaggccctgttcgaccgggtgtatactcaccagagtgatgtctggagttttggcgttctgatgtgggagatcttcacactcggtggcagcccttatccgggaatcccagtggaggaactgtttaagctgttgaaagagggccatagaatggacaagccggcgaactgtaccaacgagctgtatatgatgatgcgggactgctggcacgctgtgccctctcaacgccctacttttaaacagctggttgaagacctcgaccggattctgacattgaccacgaacgagatctag

SEQ ID NO: 56550 - DNA, 2043 bp, Artificial Sequence
  derived and/or modified sequence
atggtgtcctggggccgcttcatctgcctggtggtggtgaccatggccaccctgagcctggcccggcccagcttcagcctggtggaggacaccaccctggagccagaagatgccatcagcagtggagatgatgaagatgacacagatggagctgaggactttgtgtctgagaacagcaacaacaagagggccccctactggaccaacacagagaagatggagaagaggctgcatgctgtgcctgctgccaacacagtgaagttccgctgcccagctgggggcaaccccatgcccaccatgcgctggctgaagaatggcaaggagttcaagcaggagcacagaattggaggctacaaggtgaggaaccagcactggagcctcatcatggagagcgtggtgcccagcgacaagggcaactacacctgtgtggtggagaatgaatatggcagcatcaaccacacctaccacctggatgtggtggagaggagcccccaccggcccatcctgcaggccggcctgcctgccaatgccagcacagtggtgggcggagatgtggagtttgtgtgcaaggtgtacagtgatgcccagccccacatccagtggatcaagcacgtggagaagaatggcagcaaatatggcccagatggcctgccctacctgaaggtgctgaagcacagcggcatcaacagcagcaatgctgaggtgctggccctcttcaacgtgacagaagcagatgctggggagtacatctgcaaggtgagcaactacatcggccaggccaaccagagcgcctggctgactgtgctgcccaagcagcaggcccctggccgggagaaggagatcacagccagcccagactacctggagatcgccatctactgcattggagtcttcctgattgcctgcatggtggtgaccgtcatcctgtgcaggatgaagaacaccaccaagaagccagacttcagcagccagcctgctgtgcacaagctgaccaagaggatccccctgcggcggcaggtgacagtgtctgctgagagcagcagctccatgaacagcaacacccccctggtgcgcatcaccacccggctgagcagcacagctgacacccccatgctggccggcgtgtctgaatatgagctgcctgaggaccccaagtgggagttcccccgggacaagctgaccctgggcaagcccctgggggagggctgcttcggccaggtggtgatggccgaggccgtgggcatcgacaaggacaagcccaaggaggccgtgacagtggccgtgaagatgctgaaggatgatgccacagagaaggacctgagtgacctggtgtctgagatggagatgatgaagatgattggcaagcacaagaacatcatcaacctgctgggcgcctgcacccaggacggccccctgtatgtgattgtggagtatgccagcaaaggaaacctgcgggagtacctgcgggcccggcggcccccaggcatggagtacagctatgacatcaacagagtgcctgaggagcagatgaccttcaaggacctggtgtcctgcacctaccagctggcccggggcatggagtacctggccagccagaagtgcatccaccgggacctggccgccagaaatgtgctggtgacagagaacaacgtgatgaagattgctgactttggcctggcccgggacatcaacaacatcgactactacaagaagaccaccaacggccgcctgcctgtgaagtggatggcccctgaggccctgtttgacagagtgtacacccaccagagtgatgtgtggagctttggagtgctgatgtgggagatcttcaccctgggcggcagcccctacccaggcatccctgtggaggagctgttcaagctgctgaaggagggccacaggatggacaagccagccaactgcaccaatgagctgtacatgatgatgagggactgctggcatgctgtgcccagccagaggcccaccttcaagcagctggtggaggacctggaccgcatcctgaccctgaccaccaatgagatctag

SEQ ID NO: 56551 - DNA, 2043 bp, Artificial Sequence
  derived and/or modified sequence
atggtgagctggggccggttcatctgcctggtggtggtgaccatggccacgcttagcttggctcgaccttcatttagcctggttgaggacacaactctagagcctgaagacgccatcagttcaggcgatgatgaagacgacaccgatggagccgaagacttcgtgtccgaaaattccaacaacaagagggccccttattggaccaacaccgaaaaaatggagaaacgattacacgctgtgccagctgcaaatacggttaagttccgatgccccgccggcggaaaccctatgcccacaatgcgatggctaaaaaacggaaaggaattcaaacaggagcatcggatcggcggctataaagtgcgcaaccagcattggtctctaattatggagtcagtggtgccctctgacaaaggtaactacacttgtgtggtcgagaatgaatatggctcaattaaccatacataccacctggacgtagtggagagatccccacatcgtcctatcctccaggctgggctgccagctaatgcatccacagtcgttggtggtgacgtggaattcgtttgcaaggtgtacagcgatgctcaacctcacattcagtggatcaaacacgtagaaaagaatggcagcaagtatggaccagacgggcttccctacctcaaagtgctgaaacattccggaataaattcttctaacgctgaggtgctagctctgtttaacgtaactgaggccgacgccggagagtatatttgtaaagttagcaattacattggccaagccaatcagtcggcatggctgaccgttctgcccaaacagcaggccccaggccgagagaaggaaatcaccgcatcacccgattatctggaaatcgcaatatactgcatcggcgtcttcctcattgcatgcatggtcgttaccgtcatcctgtgtcggatgaaaaataccaccaagaagcccgatttttccagccagcccgccgtgcataagctcacaaaacgcatccccctccgacggcaggtgacagtgtccgctgagtcttctagttcaatgaattccaacactccgcttgtgcgtattaccactaggttgagttcgacagcggatactccaatgctggcaggcgtctcggagtatgagttacctgaagatcctaaatgggagtttccccgtgacaaactgacccttggaaaaccactgggggaggggtgcttcggccaggtggttatggctgaggctgtggggattgacaaagataaacctaaggaggctgtcaccgtcgcggtgaagatgcttaaagacgacgctactgaaaaggatctctctgatttggtgagtgagatggagatgatgaagatgatcggaaagcataagaacattatcaatctcctcggtgcctgcacccaggatggaccactctatgtgatcgtcgagtatgcctcaaagggtaaccttcgggagtatctgcgcgcgaggcgcccccccggcatggagtattcatatgatattaacagagtccccgaggagcagatgaccttcaaagacctagtcagctgcacctaccagctggccaggggcatggagtatttagcatctcagaagtgcatacatcgagacctcgctgcgcggaacgtccttgtgactgaaaataatgttatgaaaatcgcagacttcggactcgcacgcgacatcaacaatatcgactattataaaaagacgaccaatggacggcttcctgtcaagtggatggctcccgaagctttgttcgacagggtgtacactcatcagtcagacgtctggtcttttggtgtcctgatgtgggagatttttactcttggcgggtcaccataccccggaattcctgtcgaggagctgtttaagttacttaaggaaggccacaggatggataagcctgcaaactgcactaacgaactgtacatgatgatgcgcgattgctggcacgcagtgccatcccagcggccgactttcaaacagctggtggaagatctggaccgtatactcacactaactacaaacgaaatttag

SEQ ID NO: 56552 - DNA, 2043 bp, Artificial Sequence
  derived and/or modified sequence
atggtttcgtgggggaggtttatctgtctagtggttgttacgatggctacacttagtttggcgcgaccttctttctccctagtcgaggacacaacgctggaaccggaggatgcaataagcagtggtgacgacgaggacgacacagacggagcggaggacttcgtcagtgaaaattccaataataagcgggcaccttattggactaacaccgaaaaaatggaaaagcggctgcacgccgttcccgctgccaacactgtcaagttccgctgtcctgccggaggtaatccaatgcctactatgcggtggcttaagaatggcaaggagttcaagcaggagcatcggattgggggttacaaggtaagaaaccagcattggtccctcataatggagagcgtggtcccctcagacaaaggcaattacacatgtgtggtcgagaacgagtacggttctattaaccacacttaccacttggacgtggtggagcgcagcccacaccggccaattttacaagctggactacccgctaatgccagtactgtcgtgggcggtgacgtggagttcgtgtgtaaggtgtacagcgatgcccagcctcatatccagtggatcaagcacgttgagaagaatgggagtaagtacggcccagacgggttgccttatttgaaggtcttaaagcactctggaataaactcgtccaatgctgaagtgttagctctgttcaacgtcaccgaagccgatgccggagaatatatttgcaaggtctctaactacatcggtcaggcgaatcagtctgcgtggcttacagtccttccaaagcaacaggcccctggtcgtgagaaggagattaccgcctcaccagactatctggagatcgctatctactgtatcggcgtctttctgatcgcctgcatggtagtgactgtcatcctgtgtaggatgaagaacactaccaagaagcctgacttcagctcacagcctgccgtgcacaagttgactaaacggatacccctgcgaaggcaggttactgtaagtgccgaatcctcttcatctatgaactccaatacacccctcgtccgtattaccacacggctcagctccactgccgatacacccatgctggccggagtctccgagtacgagctgccagaggatcccaagtgggaattccccagggacaaattgaccctgggcaaacccctgggagaaggatgcttcggccaggtggtaatggcagaggccgtcggtatcgacaaggataagccaaaggaggcagtgactgtagcagtgaagatgctgaaagacgatgctacagaaaaagatctgtctgaccttgtgagcgaaatggagatgatgaaaatgatcgggaagcataagaacataattaaccttctgggagcctgtacacaggatggcccactctatgtgatcgtcgagtatgcttctaaggggaatctaagggaatacctgcgtgctcgaaggcctcctggtatggagtactcttacgacatcaaccgtgttccagaagaacagatgacctttaaagacctggtctcctgtacttaccagctggcccgaggtatggagtacttggcctcccagaagtgcatccaccgggatctggctgccagaaatgtactggttaccgaaaacaacgtgatgaaaattgcagattttggactggcccgagacataaacaacatcgactactataaaaagacaacgaacggacgcctccctgtgaaatggatggcaccagaggctctcttcgaccgcgtgtacacccatcaatcagatgtgtggtcattcggagtccttatgtgggagattttcactttgggcggatctccatacccgggaattcctgtcgaggaactgttcaagttgctgaaagagggccatagaatggataagcctgcaaattgcaccaatgaactctatatgatgatgcgggactgctggcacgctgtgccgtctcagagaccgactttcaaacagctcgtcgaggacctcgatcgcatcctcaccctcaccacaaacgaaatctag

SEQ ID NO: 56553 - DNA, 2043 bp, Artificial Sequence
  derived and/or modified sequence
atggtgagctggggcagattcatctgcctggtggtggtgaccatggccaccctgagcctggccagacccagcttcagcctggtggaggacaccaccctggagcccgaggacgccatcagcagcggcgacgacgaggacgacaccgacggcgccgaggacttcgtgagcgagaacagcaacaacaagagagccccctactggaccaacaccgagaagatggagaagagactgcacgccgtgcccgccgccaacaccgtgaagttcagatgccccgccggcggcaaccccatgcccaccatgagatggctgaagaacggcaaggagttcaagcaggagcacagaatcggcggctacaaggtgagaaaccagcactggagcctgatcatggagagcgtggtgcccagcgacaagggcaactacacctgcgtggtggagaacgagtacggcagcatcaaccacacctaccacctggacgtggtggagagaagcccccacagacccatcctgcaggccggcctgcccgccaacgccagcaccgtggtgggcggcgacgtggagttcgtgtgcaaggtgtacagcgacgcccagccccacatccagtggatcaagcacgtggagaagaacggcagcaagtacggccccgacggcctgccctacctgaaggtgctgaagcacagcggcatcaacagcagcaacgccgaggtgctggccctgttcaacgtgaccgaggccgacgccggcgagtacatctgcaaggtgagcaactacatcggccaggccaaccagagcgcctggctgaccgtgctgcccaagcagcaggcccccggcagagagaaggagatcaccgccagccccgactacctggagatcgccatctactgcatcggcgtgttcctgatcgcctgcatggtggtgaccgtgatcctgtgcagaatgaagaacaccaccaagaagcccgacttcagcagccagcccgccgtgcacaagctgaccaagagaatccccctgagaagacaggtgaccgtgagcgccgagagcagcagcagcatgaacagcaacacccccctggtgagaatcaccaccagactgagcagcaccgccgacacccccatgctggccggcgtgagcgagtacgagctgcccgaggaccccaagtgggagttccccagagacaagctgaccctgggcaagcccctgggcgagggctgcttcggccaggtggtgatggccgaggccgtgggcatcgacaaggacaagcccaaggaggccgtgaccgtggccgtgaagatgctgaaggacgacgccaccgagaaggacctgagcgacctggtgagcgagatggagatgatgaagatgatcggcaagcacaagaacatcatcaacctgctgggcgcctgcacccaggacggccccctgtacgtgatcgtggagtacgccagcaagggcaacctgagagagtacctgagagccagaagaccccccggcatggagtacagctacgacatcaacagagtgcccgaggagcagatgaccttcaaggacctggtgagctgcacctaccagctggccagaggcatggagtacctggccagccagaagtgcatccacagagacctggccgccagaaacgtgctggtgaccgagaacaacgtgatgaagatcgccgacttcggcctggccagagacatcaacaacatcgactactacaagaagaccaccaacggcagactgcccgtgaagtggatggcccccgaggccctgttcgacagagtgtacacccaccagagcgacgtgtggagcttcggcgtgctgatgtgggagatcttcaccctgggcggcagcccctaccccggcatccccgtggaggagctgttcaagctgctgaaggagggccacagaatggacaagcccgccaactgcaccaacgagctgtacatgatgatgagagactgctggcacgccgtgcccagccagagacccaccttcaagcagctggtggaggacctggacagaatcctgaccctgaccaccaacgagatctag

SEQ ID NO: 56554 - protein, 135 aa, Artificial Sequence
  derived and/or modified sequence
MGKSCKVVVCGQASVGKTSILEQLLYGNHVVGSEMIETQEDIYVGSIETDRGVREQVTIVVLGNKCDLQEQRRVDPDVAQHWAKSEKVKLWEVSVADRRSLLEPFVYLASKMTQPQSKSAFPLSRKNKGSGSLDG

SEQ ID NO: 56555 - DNA, 408 bp, Artificial Sequence
  derived and/or modified sequence
atgggcaagagctgcaaggtggtggtgtgcggccaggccagcgtgggcaagaccagcatcctggagcagctgctgtacggcaaccacgtggtgggcagcgagatgatcgagacccaggaggacatctacgtgggcagcatcgagaccgacagaggcgtgagagagcaggtgaccatcgtggtgctgggcaacaagtgcgacctgcaggagcagagaagagtggaccccgacgtggcccagcactgggccaagagcgagaaggtgaagctgtgggaggtgagcgtggccgacagaagaagcctgctggagcccttcgtgtacctggccagcaagatgacccagccccagagcaagagcgccttccccctgagcagaaagaacaagggcagcggcagcctggacggctag

SEQ ID NO: 56556 - DNA, 408 bp, Artificial Sequence
  derived and/or modified sequence
atgggtaagagttgcaaggtcgtggtctgtggccaggcttcagtcgggaaaaccagtattctggaacagttactgtacgggaaccacgtggtcggcagtgagatgatagagactcaagaggatatttacgtcggatccattgagaccgacagaggggtcagggagcaggtgacaattgttgtccttggaaataagtgtgaccttcaggagcaacgccgggttgatccagacgtggcccagcactgggccaagtccgagaaggtcaagctgtgggaggtgagcgtggctgaccgtcggtccttgctggagccctttgtgtatctggcctcaaagatgactcagccacaatctaaatctgcattccccctgtctaggaagaataaaggttccggcagcttggacgggtag

SEQ ID NO: 56557 - DNA, 408 bp, Artificial Sequence
  derived and/or modified sequence
atgggcaagagctgcaaggtggtggtgtgtggccaggcctctgtgggcaagaccagcatcctggagcagctgctgtatggcaaccacgtggtgggcagcgagatgattgagacccaggaggacatctacgtgggcagcattgaaacagaccggggcgtgcgggagcaggtgaccatcgtggtgctgggcaacaagtgtgacctgcaggagcagaggagagtggaccctgatgtggcccagcactgggccaagtctgagaaggtgaagctgtgggaggtgtctgtggccgaccggcgcagcctgctggagccctttgtgtacctggccagcaagatgacccagccccagagcaagagcgccttccccctgagcaggaagaacaagggcagcggcagcctggatggatag

SEQ ID NO: 56558 - DNA, 408 bp, Artificial Sequence
  derived and/or modified sequence
atgggcaagagctgcaaggtggtggtgtgcggccaggccagcgtgggcaaaacttccatccttgagcagttgctctatgggaatcacgtggtgggctcggaaatgatagagacccaggaggacatctacgtaggctccatagaaaccgatcgcggcgtgcgggaacaggtgaccattgtagtactcggcaataaatgtgatctccaagaacagcgcagagtagacccggacgtagcccagcactgggccaaatcggagaaagtaaaactatgggaggtctccgtggcggatcggcgttctctgctggagccctttgtgtaccttgcctccaaaatgactcagccacagagcaagagcgcttttccactctcaagaaaaaacaaaggatccgggtcacttgatggatag

SEQ ID NO: 56559 - DNA, 408 bp, Artificial Sequence
  derived and/or modified sequence
atgggaaaatcctgtaaagtcgtcgtttgtggacaggcatctgtgggtaaaactagcatcctagaacagctattgtatggcaaccacgtggtcgggtctgaaatgattgagactcaggaggacatatacgtcggtagtatagagaccgaccgaggagtccgagagcaagtcaccatcgtagtcttgggcaataagtgcgacctccaggagcagcgaagagtcgacccagatgtggcacagcactgggccaagtctgagaaggtgaagctctgggaagtgagcgtggctgacaggcgctccctcctcgagcccttcgtctacttagccagtaagatgacccagccacaatcaaaatcagctttcccactgagtcgaaagaacaaaggatccggctcactggacgggtag

SEQ ID NO: 56560 - DNA, 727 bp, Artificial Sequence
  derived and/or modified sequence
cgactctggaggaagactggagcctttgcggcggcgctgcccctcccctggtccccgcgagctcggagggcccggctggtgctgcgggggccccgggaggttgaaaactaagcatggggaagagctgcaaggtggtcgtgtgtggccaggcgtctgtgggcaaaacttcaatcctggagcagcttctgtatgggaaccatgtagtgggttcggagatgatcgagacgcaggaggacatctacgtgggctccattgagacagaccggggggtgcgagagcaggtcaccatcgtggtccttggcaacaagtgtgacttacaggagcagcggcgtgtagacccagatgtggctcagcactgggccaagtcagagaaggtgaagctgtgggaggtgtcagtggcggaccggcgctccctcctggagccctttgtctacttggccagcaagatgacgcaaccccagagcaagtctgccttccccctcagccggaagaacaagggcagcggctccttggatggctgaagagctgccgttcctctttcacgatcccagccccatttcagtgtctggggctctggtagatgtgttgagggcaaagtagaggacaagctgtctttcccagtcagccagggagctccccgccaggccacgccccagccactttgctccctctcacctctgggaagtgcaaatactcttggttgacatccccttcctcagccctccca

SEQ ID NO: 56561 - protein, 97 aa, Artificial Sequence
  derived and/or modified sequence
MGKSCKVVVCGQASVGKTSILEQLLYGNHVVGSEMIETQEDIYVGSIETDRGVREQIAESLFSVWSCSRRRLTNPRTRRRSPSWSLATSVTYRSSGV

SEQ ID NO: 56562 - DNA, 294 bp, Artificial Sequence
  derived and/or modified sequence
atgggcaagagctgcaaggtggtggtgtgcggccaggccagcgtgggcaagaccagcatcctggagcagctgctgtacggcaaccacgtggtgggcagcgagatgatcgagacccaggaggacatctacgtgggcagcatcgagaccgacagaggcgtgagagagcagatcgccgagagcctgttcagcgtgtggagctgcagcagaagaagactgaccaaccccagaaccagaagaagaagccccagctggagcctggccaccagcgtgacctacagaagcagcggcgtgtag

SEQ ID NO: 56563 - DNA, 294 bp, Artificial Sequence
  derived and/or modified sequence
atggggaaatcatgtaaggtggtcgtatgtgggcaggcgtccgtcgggaagacaagcattctggaacaattgctgtacggaaaccacgtagttggctccgaaatgatcgagacccaagaggacatctatgtcgggtcaattgaaaccgataggggcgtgagggaacagatcgccgaatctcttttcagcgtgtggagttgctcacggaggagattgacaaatcccagaactagacggcggtctccaagctggagtctcgctacttccgttacctaccgttcatccggggtctag

SEQ ID NO: 56564 - DNA, 294 bp, Artificial Sequence
  derived and/or modified sequence
atggggaaaagttgcaaagtggtcgtctgtggtcaagctagtgttggaaaaacctctattttggagcagcttctgtacggtaaccatgtcgtgggctccgagatgatcgaaacgcaggaggacatatacgttggaagcatcgaaacggacagaggggtaagggaacaaatagccgagtcactgttctctgtttggtcttgcagtagacggcggcttacgaatccaaggacaaggaggaggtcccctagctggtccttggctaccagcgtcacctatagaagcagtggtgtatag

SEQ ID NO: 56565 - DNA, 294 bp, Artificial Sequence
  derived and/or modified sequence
atgggcaagagctgcaaggtggtggtgtgtggccaggcctctgtgggcaagaccagcatcctggagcagctgctgtatggcaaccacgtggtgggcagcgagatgattgagacccaggaggacatctacgtgggcagcattgaaacagaccggggcgtgcgggagcagattgctgagagcctcttctctgtgtggagctgcagcagaagaaggctgaccaaccccaggaccaggagaagaagccccagctggagcctggccacctctgtgacctaccgcagcagtggagtgtag

SEQ ID NO: 56566 - DNA, 294 bp, Artificial Sequence
  derived and/or modified sequence
atgggcaagagctgcaaggtggtggtgtgcggccaggccagcgtgggtaaaactagcatcctggaacagctcctgtatggcaaccatgtcgtcggctctgagatgatcgaaacacaggaagatatttacgttggcagtattgagacagatagaggcgtcagagaacagatagcagagtctctcttcagcgtctggtcttgttcccgtagaaggctaactaacccccgcacccggagaaggtctccgtcctggtcactcgccaccagcgtgacatacagaagcagcggagtttag

SEQ ID NO: 56567 - DNA, 294 bp, Artificial Sequence
  derived and/or modified sequence
atgggcaagagctgcaaggtggtggtgtgcggccaggccagcgtgggaaaaacttccatcctggaacagttgctttatggcaatcatgtagtgggctctgagatgatcgagacgcaagaagatatatatgtggggagcattgaaacggatcggggagtcagagagcagatagccgaatccctctttagtgtgtggagttgctctagacggagactgacgaatccccgcacaaggcgcaggtccccaagctggtccctggctacttccgtgacctatcgctcctcgggagtctag

SEQ ID NO: 56568 - DNA, 294 bp, Artificial Sequence
  derived and/or modified sequence
atgggcaaaagctgcaaagtggtggtctgtgggcaggcaagcgtgggaaaaacctcaatactggagcagctgctctacggtaatcatgttgtgggttcagagatgatcgagacccaggaggacatatacgtgggctccatcgagaccgatcgtggcgttcgtgagcaaatcgctgaatctttgttctccgtatggtcatgttctagaagacggcttacaaacccaagaactcgccgacggtccccgtcatggtctctcgccacatctgttacataccgatcctctggtgtgtag

SEQ ID NO: 56569 - DNA, 294 bp, Artificial Sequence
  derived and/or modified sequence
atgggtaagtcctgcaaggttgtggtgtgcgggcaggcatccgtggggaaaacctctattttggaacaactgctatatggaaaccatgtggttgggtcagaaatgatcgagacacaggaggacatttacgttggctcaatagaaaccgaccgcggagtgcgggaacagattgctgagagtctgttttccgtgtggagttgctctcgcaggcgcctgactaatccacgaactagacgtcgctcccccagctggagcctcgccacctctgtaacttaccgctcatctggcgtgtag

SEQ ID NO: 56570 - protein, 203 aa, Artificial Sequence
  derived and/or modified sequence
MALASVLERPLPVNQRGFFGLGGRADLLDLGPGSLSDGLSLAAPGWGVPEEPGIEMLHGTTTLAFKFRHGVIVAADSRATAGAYIASQTVKKVIEINPYLLGTMAGGAADCSFWERLLARQCRIYELRNKERISVAAASKLLANMVYQYKGMGLSMGTMICGWDKRGPVSEVLCLKPKSFGMYLFCGCAERIGNMARPLLRGQ

SEQ ID NO: 56571 - DNA, 612 bp, Artificial Sequence
  derived and/or modified sequence
atggctctcgccagcgtgctggagcgcccattgcccgtaaatcagcgcgggtttttcggcctaggtggcagagccgaccttctagatctggggccaggcagtctttcagacggactatctttggcagcacctggatggggtgtgccagaagagcccggtatcgaaatgctgcatggaactaccactctggcctttaagtttcgtcacggggtaattgtagcggccgattctagagcgacggctggtgcatacatagcttcccagaccgttaagaaagtcatcgagattaacccgtacctattgggtacaatggcgggaggggctgcagattgtagcttttgggagcgccttttggccagacagtgtagaatctacgaactgaggaacaaggagcgcatttcagtggccgccgcgagcaaacttctggcgaatatggtgtatcagtacaagggaatgggcctctctatgggaactatgatctgcggatgggacaagagaggccctgtgtcagaagttctctgtctgaagcctaaatcattcggcatgtacctgttttgtgggtgtgccgaacgaatcggcaacatggctaggcctttactcagagggcagtag

SEQ ID NO: 56572 - DNA, 612 bp, Artificial Sequence
  derived and/or modified sequence
atggccctggcctctgtgctggagcggcccctgcctgtgaaccagaggggcttcttcggcctgggcggccgggctgacctgctggacctgggccctggcagcctgagtgatggcctgagcctggccgcccctggctggggcgtgcctgaggagcccggcatcgagatgctgcacggcaccaccaccctggccttcaagttcagacatggagtcatcgtggccgctgacagccgggccacagctggggcctacatcgccagccagacagtgaagaaggtgattgagatcaacccctacctgctgggcaccatggccggcggcgctgctgactgcagcttctgggagcggctgctggcccggcagtgccgcatctatgagctgaggaacaaggagcgcatctctgtggccgccgccagcaagctgctggccaacatggtgtaccagtacaagggcatgggcctgtccatgggcaccatgatctgtggctgggacaagaggggccctgtgtctgaggtgctgtgcctgaagcccaagagctttggcatgtacctgttctgtggctgtgccgagcgcatcggcaacatggcccggcccctgctgcggggccagtag

SEQ ID NO: 56573 - DNA, 612 bp, Artificial Sequence
  derived and/or modified sequence
atggccctggccagcgtgctggagcggcccctgcccgtgaaccagcgagggtttttcgggctgggaggtagagctgatttgctcgacttgggccctggctctctgtcggacggcctctcactggctgcccccggctggggcgtccccgaggagccgggtatcgagatgctgcacgggaccacaactctcgcctttaaatttagacatggtgttatcgtggctgcggactctagggcaactgccggagcctacattgccagccagacggtgaagaaggtcatcgaaatcaatccatatctactgggaacaatggccggtggtgccgcggactgcagcttctgggagcgactgctagctcgccaatgccgcatctacgagttgcggaataaggaacgtatttccgtggctgctgctagtaagctgctggcgaatatggtgtatcaatacaaaggaatgggcctgtctatgggcacaatgatctgcggctgggataagcgcgggcccgtgtcagaggtactttgccttaagcccaagtcgttcggaatgtatctattctgcggttgcgctgagaggatcggaaacatggcacggccactgcttaggggccagtag

SEQ ID NO: 56574 - DNA, 612 bp, Artificial Sequence
  derived and/or modified sequence
atggccctggcgtcagtgctcgagagacccctccccgtcaatcagcgcggattcttcggccttggagggagagctgatttgttggatctgggcccaggatctctgagtgatggactgtccctggcagctcctggctggggagtgcctgaggagccaggaatcgagatgttgcacggcacaacaaccttggcattcaaatttcgacacggagttattgtcgctgccgactcaagagcaactgccggagcatatatcgctagtcagaccgtaaaaaaggtcatcgagataaatccataccttctcgggaccatggccggtggagctgccgattgctctttttgggaacggcttctcgcgaggcagtgccgcatttacgaacttcgtaacaaggagcgaatctccgtggccgctgcctcaaaactgttagccaacatggtataccagtataaagggatggggctgtctatgggaaccatgatatgcggatgggataagcggggacccgtgtctgaggtcctctgcttaaaacccaagtccttcggcatgtacctcttctgcggatgcgctgagagaattggcaacatggcaaggcctttgttaagggggcagtag

SEQ ID NO: 56575 - DNA, 612 bp, Artificial Sequence
  derived and/or modified sequence
atggccctggccagcgtgctggagagacccctgcccgtgaaccagagaggcttcttcggcctgggcggcagagccgacctgctggacctgggccccggcagcctgagcgacggcctgagcctggccgcccccggctggggcgtgcccgaggagcccggcatcgagatgctgcacggcaccaccaccctggccttcaagttcagacacggcgtgatcgtggccgccgacagcagagccaccgccggcgcctacatcgccagccagaccgtgaagaaggtgatcgagatcaacccctacctgctgggcaccatggccggcggcgccgccgactgcagcttctgggagagactgctggccagacagtgcagaatctacgagctgagaaacaaggagagaatcagcgtggccgccgccagcaagctgctggccaacatggtgtaccagtacaagggcatgggcctgagcatgggcaccatgatctgcggctgggacaagagaggccccgtgagcgaggtgctgtgcctgaagcccaagagcttcggcatgtacctgttctgcggctgcgccgagagaatcggcaacatggccagacccctgctgagaggccagtag

SEQ ID NO: 56576 - DNA, 426 bp, Artificial Sequence
  derived and/or modified sequence
atgagcagccccccccacagcggccagaccgtgcaccccccctgctcttctaagctccgaatggaccccactccagcctggcctgcatcctgtgaggcgttgatgggccccagctcttctgccggacccgcaaggctgcgtctgcctcccagaaggcactcaagcctgccgccacggagggcatcgtttctaatcgtaagtcgggccagtaaaagttgggaatgtgccggccccgtgcctgccctgcccggcggcgtggtggcagtccctacctcacagcaggaccctcagtgtaggggctctcaagtcgctcatagacgctgtctgagccgcgccatattgcagtctggaccccagtgtcagagctgcctttctatttgggtgactagtgcccggagccgcgtgcaagcaagcagcaggtcatag

SEQ ID NO: 56577 - protein, 114 aa, Artificial Sequence
  derived and/or modified sequence
MERGAGAKLLPLLLLLRATGFTCAQTDGRNGYTAVIEVTSGGPWGDWAWPEMCPDGFFASGFSLKVEPPQGIPGDDTALNGIRLHCARGNVLGNTHVVESQSGRWGAGVEDPLG

SEQ ID NO: 56578 - DNA, 345 bp, Artificial Sequence
  derived and/or modified sequence
atggagaggggcgctggagcaaagctgcttccactcctgctgttactcagagccactggattcacatgtgctcaaacggacggacgaaatgggtacaccgcggtgatcgaggttacatcgggtggaccttggggggactgggcctggcctgaaatgtgccccgatgggttttttgcaagtggcttttccctgaaagtcgagccaccacagggcatacccggagacgataccgcactgaacgggattcggttgcactgcgctcggggaaacgtgctgggtaatacccatgttgtggagtctcagtctgggcgttggggagctggagtcgaagatcccttggggtag

SEQ ID NO: 56579 - DNA, 345 bp, Artificial Sequence
  derived and/or modified sequence
atggagagaggtgccggcgccaaacttctcccactactgcttctgctgcgggcaacaggattcacttgcgcccaaacagatggacgtaacggttatacggctgtgatcgaagtgacctccggaggcccatggggcgattgggcatggcctgagatgtgcccagacggttttttcgcaagtggttttagtctgaaagtagagcctcctcaggggattccgggagacgatactgccctgaacggcatcaggctgcactgcgcaagggggaatgtgctgggaaacactcacgtggttgagagtcagtcaggcagatggggggctggtgtggaagatcctttgggctag

SEQ ID NO: 56580 - DNA, 345 bp, Artificial Sequence
  derived and/or modified sequence
atggagcgcggcgctggcgcaaagctactgcccctgctcctcctcttaagagcgaccggtttcacttgcgcccagacagacggtagaaacggttacaccgcagtcatagaagtgacgagtggcggtccttggggtgactgggcctggccagaaatgtgccccgatggattctttgcttcgggcttttccctgaaagtcgaaccaccacaaggaatacctggcgatgacacagcattaaatggcatcagactacactgtgcacgcggaaatgtcttaggcaatacgcacgtggtggaatcacaatcagggagatggggtgcaggcgtggaagatccgctcggttag

SEQ ID NO: 56581 - DNA, 345 bp, Artificial Sequence
  derived and/or modified sequence
atggagagaggcgccggcgccaagctgctgcccctgctgctgctgctgagagccaccggcttcacctgcgcccagaccgacggcagaaacggctacaccgccgtgatcgaggtgaccagcggcggcccctggggcgactgggcctggcccgagatgtgccccgacggcttcttcgccagcggcttcagcctgaaggtggagcccccccagggcatccccggcgacgacaccgccctgaacggcatcagactgcactgcgccagaggcaacgtgctgggcaacacccacgtggtggagagccagagcggcagatggggcgccggcgtggaggaccccctgggctag

SEQ ID NO: 56582 - DNA, 345 bp, Artificial Sequence
  derived and/or modified sequence
atggaaagaggggcaggggctaagctgctgccactactcctgctgcttcgtgctaccgggttcacatgtgcgcagacggacggccggaacggctataccgctgtcatcgaggtcacctcaggtgggccgtggggcgactgggcttggccagagatgtgtccagacggtttctttgcttctggattttcgctgaaggtggagcctcctcaagggatccctggcgacgatacagccctcaatgggatccggttacactgtgcccgaggcaacgtgctggggaatactcatgtggtggaaagtcagtcaggaaggtggggcgctggcgtcgaagatcccctcggttag

SEQ ID NO: 56583 - DNA, 345 bp, Artificial Sequence
  derived and/or modified sequence
atggagagaggagctggggccaagctgctgcccctgctgctgctgctgcgggccaccggcttcacctgtgcccagacagatggaagaaatggctacacagctgtgattgaggtgaccagcggcggcccctggggagactgggcctggccagagatgtgcccagatggcttctttgccagcggcttcagcctgaaggtggagcccccccagggcatccctggagatgacacagccctgaatggcatccggctgcactgtgcccggggaaatgtgctgggcaacacccacgtggtggagagccagagcggccgctggggcgccggcgtggaggaccccctgggctag

SEQ ID NO: 56584 - DNA, 345 bp, Artificial Sequence
  derived and/or modified sequence
atggagcggggcgccggcgccaagctgctgcccctgctgctgctgttgagagctacaggatttacctgcgcccaaacagacggccggaatggatatactgctgtaattgaggtgacatctggggggccctggggggactgggcgtggcctgagatgtgtcccgatggattttttgccagcggcttctcactgaaggtggagccaccccagggcatcccaggggacgatacggccctgaatggcattaggttgcattgcgcccgcggcaacgtgcttggcaacacgcatgttgtggagagccagtccggacgatggggagcgggagtggaagaccctttaggatag

SEQ ID NO: 56585 - RNA, 345 nt, Artificial Sequence
  derived and/or modified sequence
auggagagaggugccggcgccaaacuucucccacuacugcuucugcugcgggcaacaggauucacuugcgcccaaacagauggacguaacgguuauacggcugugaucgaagugaccuccggaggcccauggggcgauugggcauggccugagaugugcccagacgguuuuuucgcaagugguuuuagucugaaaguagagccuccucaggggauuccgggagacgauacugcccugaacggcaucaggcugcacugcgcaagggggaaugugcugggaaacacucacgugguugagagucagucaggcagauggggggcugguguggaagauccuuugggcuag

SEQ ID NO: 56586 - RNA, 345 nt, Artificial Sequence
  derived and/or modified sequence
auggagcgcggcgcuggcgcaaagcuacugccccugcuccuccucuuaagagcgaccgguuucacuugcgcccagacagacgguagaaacgguuacaccgcagucauagaagugacgaguggcgguccuuggggugacugggccuggccagaaaugugccccgauggauucuuugcuucgggcuuuucccugaaagucgaaccaccacaaggaauaccuggcgaugacacagcauuaaauggcaucagacuacacugugcacgcggaaaugucuuaggcaauacgcacgugguggaaucacaaucagggagauggggugcaggcguggaagauccgcucgguuag

SEQ ID NO: 56587 - protein, 102 aa, Artificial Sequence
  derived and/or modified sequence
MERGAGAKLLPLLLLLRATGFTCAQTDGRNGYTAVIEVTSGGPWGDWAWPEMCPDGFFASGFSLKVEPPQGIPGDDTALNGIRLHCARGNVLGNTHVLGRME

SEQ ID NO: 56588 - DNA, 309 bp, Artificial Sequence
  derived and/or modified sequence
atggagcggggagccggagcaaaattgcttcctttgctgctgcttttacgcgctaccggctttacatgtgctcagacagacggtcgcaacggttatacagccgtcattgaagtaacttcgggcggtccctggggggactgggcgtggcctgagatgtgtcccgacggtttcttcgcttccgggttttctctgaaagtcgaaccaccacagggtatccccggtgacgataccgcactgaacggtattaggctgcactgcgcaagaggtaatgtgcttggaaacacacatgtgctcggtagaatggagtag

SEQ ID NO: 56589 - DNA, 309 bp, Artificial Sequence
  derived and/or modified sequence
atggaaaggggggcaggcgcaaagctcttaccactgctcctcctgcttcgggcaaccgggtttacgtgcgctcagacagacggcagaaatggatacactgcggtgatcgaagtcacttcaggaggaccttggggggactgggcttggccagagatgtgccccgacgggttctttgcaagtgggttttctttgaaagtggagcctccgcagggaataccaggcgatgatacagctttaaatggaatacggttgcactgcgctcgcggaaacgtgcttggtaacactcacgtgctaggccgtatggagtag

SEQ ID NO: 56590 - DNA, 309 bp, Artificial Sequence
  derived and/or modified sequence
atggagcgaggtgctggcgccaaactgctgccactcctgctactattgcgagccaccggatttacctgcgcccagaccgacggccgtaatggatacacagcagttattgaggtgacctcaggaggcccctggggcgattgggcctggcctgagatgtgtccagacgggttcttcgcttccggattctcactcaaagttgagccaccacagggaatcccgggagacgatactgcactcaatggcataagactccactgtgcccgtggtaatgttcttggaaatactcatgttctgggcagaatggaatag

SEQ ID NO: 56591 - DNA, 309 bp, Artificial Sequence
  derived and/or modified sequence
atggagagaggcgccggcgccaagctgctgcccctgctgctgctgctgagagccaccggcttcacctgcgcccagaccgacggcagaaacggctacaccgccgtgatcgaggtgaccagcggcggcccctggggcgactgggcctggcccgagatgtgccccgacggcttcttcgccagcggcttcagcctgaaggtggagcccccccagggcatccccggcgacgacaccgccctgaacggcatcagactgcactgcgccagaggcaacgtgctgggcaacacccacgtgctgggcagaatggagtag

SEQ ID NO: 56592 - DNA, 309 bp, Artificial Sequence
  derived and/or modified sequence
atggaacggggagcaggcgccaaactgttacctttgcttctgttattgagagcaacgggattcacatgcgcacagaccgacggccgcaacggctataccgccgtcatagaggtcacaagcggtggcccctggggggactgggcctggcccgaaatgtgccccgatggctttttcgcatccgggtttagcttaaaagtggagcccccacaaggaattcctggggacgatacggctctgaatggaatcaggctgcactgcgcaaggggcaacgtcctaggcaatacccatgtgctcgggagaatggagtag

SEQ ID NO: 56593 - DNA, 309 bp, Artificial Sequence
  derived and/or modified sequence
atggagagaggagctggggccaagctgctgcccctgctgctgctgctgcgggccaccggcttcacctgtgcccagacagatggaagaaatggctacacagctgtgattgaggtgaccagcggcggcccctggggagactgggcctggccagagatgtgcccagatggcttctttgccagcggcttcagcctgaaggtggagcccccccagggcatccctggagatgacacagccctgaatggcatccggctgcactgtgcccggggaaatgtgctgggcaacacccacgtgctgggccgcatggagtag

SEQ ID NO: 56594 - DNA, 309 bp, Artificial Sequence
  derived and/or modified sequence
atggagcggggcgccggcgccaagctgctgcccctgctgctgctgctccgcgccacagggtttacttgcgcgcagacggatggccggaatggctataccgcagtcatcgaggtgacaagcgggggcccctggggagattgggcctggcctgaaatgtgcccggacggcttcttcgcctccggcttcagcttgaaggttgagcctccgcagggtatccccggcgatgacaccgcgctgaatggcattaggctgcattgtgcccggggtaatgtcctaggcaatacccatgttctaggccgcatggagtag

SEQ ID NO: 56595 - RNA, 309 nt, Artificial Sequence
  derived and/or modified sequence
auggaaaggggggcaggcgcaaagcucuuaccacugcuccuccugcuucgggcaaccggguuuacgugcgcucagacagacggcagaaauggauacacugcggugaucgaagucacuucaggaggaccuuggggggacugggcuuggccagagaugugccccgacggguucuuugcaaguggguuuucuuugaaaguggagccuccgcagggaauaccaggcgaugauacagcuuuaaauggaauacgguugcacugcgcucgcggaaacgugcuugguaacacucacgugcuaggccguauggaguag

SEQ ID NO: 56596 - RNA, 309 nt, Artificial Sequence
  derived and/or modified sequence
auggagcgaggugcuggcgccaaacugcugccacuccugcuacuauugcgagccaccggauuuaccugcgcccagaccgacggccguaauggauacacagcaguuauugaggugaccucaggaggccccuggggcgauugggccuggccugagauguguccagacggguucuucgcuuccggauucucacucaaaguugagccaccacagggaaucccgggagacgauacugcacucaauggcauaagacuccacugugcccgugguaauguucuuggaaauacucauguucugggcagaauggaauag

SEQ ID NO: 56597 - protein, 70 aa, Artificial Sequence
  derived and/or modified sequence
MERGAGAKLLPLLLLLRATGFTCAQTDGRNGYTAVIEVTSGGPWGDWAWPEMCPDGFFASGFSLKLGRME

SEQ ID NO: 56598 - DNA, 213 bp, Artificial Sequence
  derived and/or modified sequence
atggagagaggagctggcgcaaagcttctcccgcttttgctgctcctaagagccacaggtttcacttgtgcacagacagatggtagaaatgggtatacagctgttatcgaggtgaccagcgggggaccttggggggattgggcctggcccgagatgtgtcccgatggattctttgcctctggcttcagccttaaactgggcaggatggagtag

SEQ ID NO: 56599 - DNA, 213 bp, Artificial Sequence
  derived and/or modified sequence
atggaacggggtgcgggagccaaactgctgcctttgttactcctgctgcgagctacaggttttacatgcgcgcagaccgatggacggaatggatataccgcagtcatcgaagttacatccggtggaccttggggggactgggcgtggcccgaaatgtgtccggacgggtttttcgccagcgggtttagcttaaagctggggaggatggaatag

SEQ ID NO: 56600 - DNA, 213 bp, Artificial Sequence
  derived and/or modified sequence
atggagagaggcgccggcgccaagctgctgcccctgctgctgctgctgagagccaccggcttcacctgcgcccagaccgacggcagaaacggctacaccgccgtgatcgaggtgaccagcggcggcccctggggcgactgggcctggcccgagatgtgccccgacggcttcttcgccagcggcttcagcctgaagctgggcagaatggagtag

SEQ ID NO: 56601 - DNA, 213 bp, Artificial Sequence
  derived and/or modified sequence
atggaacgtggggctggagccaaactcctgcctctgctgctcctattgcgagccaccggctttacatgcgcccagacagacggtcgaaatggctatacagccgtcatcgaggtgacctccggcgggccctggggtgactgggcctggcctgagatgtgcccggacggtttctttgctagcggtttcagcctaaaactcgggaggatggagtag

SEQ ID NO: 56602 - DNA, 213 bp, Artificial Sequence
  derived and/or modified sequence
atggagagaggagctggggccaagctgctgcccctgctgctgctgctgcgggccaccggcttcacctgtgcccagacagatggaagaaatggctacacagctgtgattgaggtgaccagcggcggcccctggggagactgggcctggccagagatgtgcccagatggcttctttgccagcggcttcagcctgaagctgggccgcatggagtag

SEQ ID NO: 56603 - DNA, 213 bp, Artificial Sequence
  derived and/or modified sequence
atggagcggggcgccggcgccaagctgctgcccctgctgctgctgctgagggcaacaggtttcacatgtgcccagactgatgggcgcaatgggtacaccgcggttattgaagtgacttctggaggaccatggggggattgggcttggcctgagatgtgcccagacggctttttcgcttccgggttctcgctcaaattaggtcgcatggaatag

SEQ ID NO: 56604 - RNA, 213 nt, Artificial Sequence
  derived and/or modified sequence
auggaacggggugcgggagccaaacugcugccuuuguuacuccugcugcgagcuacagguuuuacaugcgcgcagaccgauggacggaauggauauaccgcagucaucgaaguuacauccgguggaccuuggggggacugggcguggcccgaaauguguccggacggguuuuucgccagcggguuuagcuuaaagcuggggaggauggaauag

SEQ ID NO: 56605 - protein, 251 aa, Artificial Sequence
  derived and/or modified sequence
MNILAPVRRDRVLAELPQCLRKEAALHGHKDFHPRVTCACQEHRTGTVGFKISKVIVVGDLSVGKTCLINRFCKDTFDKNYKATIGVDFEMERFEVLGIPFSLQLWDTAGQERFKCIASTYYRGAQAIIIVFNLNDVASLEHTKQWLADALKENDPSSVLLFLTPAQYALMEKDALQVAQEMKAEYWAVSSLTGENVREFFFRVAALTFEANVLAELEKSGARRIGDVVRINSDDSNLYLTASKKKPTCCP

SEQ ID NO: 56606 - DNA, 756 bp, Artificial Sequence
  derived and/or modified sequence
atgaacattctcgcccccgtgagacgcgaccgagtgctggccgagctgccacaatgtctcagaaaggaggcagccctccatggccataaggacttccaccctcgggtcacctgtgcctgtcaagagcacagaaccggcactgtcgggtttaagatttcaaaggttatcgttgtgggggacttatcagttggaaaaacctgtctgatcaatcgcttttgtaaggacacatttgacaaaaattacaaggcgacgattggcgtggactttgagatggaaagatttgaagtactcggaataccattttctttgcagctttgggatacggccggccaggaacgctttaagtgcattgcttccacctactatcgaggagcccaagccatcattatcgtttttaatctgaacgatgtagcaagccttgaacataccaagcagtggcttgcagatgcccttaaggaaaacgatccatcctccgtactgctgtttctcacgcccgcccagtacgcccttatggaaaaagacgccctgcaggtggcccaggagatgaaagcagaatattgggccgtctcctccttgaccggagagaatgtccgtgaattctttttccgagttgccgctctgactttcgaagcgaatgtgcttgctgaacttgaaaaaagtggggcacgaagaattggagacgtggtgcgtatcaatagtgacgactctaacctgtatctcactgcttccaagaagaagcctacgtgttgcccttag

SEQ ID NO: 56607 - DNA, 756 bp, Artificial Sequence
  derived and/or modified sequence
atgaacatcctggcccctgtgcggcgggacagagtgctggccgagctgccccagtgcctgaggaaggaggccgccctgcacggccacaaggacttccacccccgggtgacctgtgcctgccaggagcacaggactggaacagtgggcttcaagatcagcaaggtgattgtggtgggggacctgtctgtgggcaagacctgcctgatcaaccgcttctgcaaggacacctttgacaagaactacaaggccaccatcggcgtggactttgagatggagagatttgaggtgctgggcatccccttcagcctgcagctgtgggacacagctggccaggagcgcttcaagtgcatcgccagcacctactacagaggagcccaggccatcatcatcgtgttcaacctgaatgatgtggccagcctggagcacaccaagcagtggctggctgatgccctgaaggaaaatgaccccagctctgtgctgctcttcctgaccccagcccagtatgccctgatggagaaggatgccctgcaggtggcccaggagatgaaggccgagtactgggccgtgagcagcctgactggagaaaatgtgcgggagttcttcttccgggtggccgccctgacctttgaggccaacgtgctggccgagctggagaagagcggggccaggagaattggagatgtggtgcgcatcaacagtgatgacagcaacctgtacctgacagccagcaagaagaagcccacctgctgcccctag

SEQ ID NO: 56608 - DNA, 756 bp, Artificial Sequence
  derived and/or modified sequence
atgaacatcctggcccccgtgcggcgggaccgggtgctggccgagttgccccaatgcctccggaaagaggccgccttgcatggtcacaaggactttcaccctagggtgacttgcgcttgtcaggaacaccgaactgggacagtcggattcaagatctctaaagttatcgtggtgggcgatctgtctgtgggcaaaacatgcctgatcaaccggttttgcaaggataccttcgacaaaaattataaagccaccatcggagtggacttcgaaatggaacggttcgaggtcctgggtatccccttttccttacagttgtgggataccgcaggccaagagcgttttaagtgcatcgcaagcacctattataggggcgcccaggccattatcatcgtgtttaaccttaacgacgtagcctccctagaacatactaaacagtggttggccgacgcccttaaggaaaacgacccctcatcagtgttattattcttaacccctgcccagtatgccctgatggagaaggatgccctgcaggtcgcacaggagatgaaagcagagtactgggccgtgagctcgctgaccggagaaaacgtccgggagttctttttcagggtggcagctctgacgtttgaggccaatgtacttgctgagctggaaaaatctggtgcccgtcggatcggcgacgtcgttcggataaactcggacgattcgaacctgtacttgaccgcttcaaagaagaagcctacgtgctgcccctag

SEQ ID NO: 56609 - DNA, 756 bp, Artificial Sequence
  derived and/or modified sequence
atgaacatcttagcaccagtccgcagagaccgcgtgctggccgagctaccacagtgcctgcggaaggaagccgcattacacgggcacaaggatttccatccacgggttacatgtgcatgtcaggagcacagaacgggaaccgtgggcttcaagatcagcaaggttatcgtcgtgggtgacctgtccgtcggcaaaacctgccttatcaaccggttttgtaaagataccttcgataaaaactacaaggccaccatcggtgtagacttcgagatggagcgattcgaagttctgggaattccattctctctgcagctctgggataccgcgggacaagagcgattcaagtgcatagcaagtacttactatcggggtgcgcaggcaattattattgtctttaaccttaatgacgtcgcctcactcgaacataccaagcaatggctggccgacgcacttaaggagaacgacccaagtagtgtgttgctgtttctgacgcctgcacaatacgcattaatggagaaggatgcccttcaagtggctcaggaaatgaaggctgagtactgggcagtttcctcgttgaccggagaaaacgtccgcgaattttttttcagagtggctgcactgactttcgaagccaatgtgctcgcagagctggagaaaagtggagctaggcgaattggagacgtcgtcaggatcaatagcgacgacagcaatctatatctgacggcctctaaaaaaaagcctacatgctgtccctag

SEQ ID NO: 56610 - DNA, 756 bp, Artificial Sequence
  derived and/or modified sequence
atgaacatcctggcccccgtgagaagagacagagtgctggccgagctgccccagtgcctgagaaaggaggccgccctgcacggccacaaggacttccaccccagagtgacctgcgcctgccaggagcacagaaccggcaccgtgggcttcaagatcagcaaggtgatcgtggtgggcgacctgagcgtgggcaagacctgcctgatcaacagattctgcaaggacaccttcgacaagaactacaaggccaccatcggcgtggacttcgagatggagagattcgaggtgctgggcatccccttcagcctgcagctgtgggacaccgccggccaggagagattcaagtgcatcgccagcacctactacagaggcgcccaggccatcatcatcgtgttcaacctgaacgacgtggccagcctggagcacaccaagcagtggctggccgacgccctgaaggagaacgaccccagcagcgtgctgctgttcctgacccccgcccagtacgccctgatggagaaggacgccctgcaggtggcccaggagatgaaggccgagtactgggccgtgagcagcctgaccggcgagaacgtgagagagttcttcttcagagtggccgccctgaccttcgaggccaacgtgctggccgagctggagaagagcggcgccagaagaatcggcgacgtggtgagaatcaacagcgacgacagcaacctgtacctgaccgccagcaagaagaagcccacctgctgcccctag

SEQ ID NO: 56611 - protein, 316 aa, Artificial Sequence
  derived and/or modified sequence
MSHLPGLELRREAPPLLGPLLSPFPLPAGSWHRQMLRSSLRFPITNSAGAPCKAAGRMNILAPVRRDRVLAELPQCLRKEAALHGHKDFHPRVTCACQEHRTGTVGFKISKVIVVGDLSVGKTCLINRFCKDTFDKNYKATIGVDFEMERFEVLGIPFSLQLWDTAGQERFKCIASTYYRGAQAIIIVFNLNDVASLEHTKQWLADALKENDPSSVLLFLVGSKKDLSTPAQYALMEKDALQVAQEMKAEYWAVSSLTGENVREFFFRVAALTFEANVLAELEKSGARRIGDVVRINSDDSNLYLTASKKKPTCCP

SEQ ID NO: 56612 - DNA, 951 bp, Artificial Sequence
  derived and/or modified sequence
atgagccacttgccaggcttagagcttcggcgggaggctccccccttgttaggacctcttttgtctccttttccgctgccagctggatcgtggcacagacaaatgttgcgttcttctctcaggtttccaataactaactctgctggcgcaccttgtaaggctgcaggtcgcatgaatattttagcgcctgtcagaagggatcgggtgctggccgagttaccacagtgcctcaggaaggaagccgcgctgcacgggcataaagactttcatccaagggtgacttgcgcttgtcaagaacaccgaactggcaccgtaggctttaaaatttctaaggtgatcgtggtaggggatctgagcgtgggcaaaacttgcctgattaatcggttttgtaaggatactttcgataagaattacaaagcgacaattggagtggattttgaaatggagagattcgaagtactcgggatcccttttagtctccagctgtgggacaccgcaggacaagagcgcttcaaatgtattgcttctacttactacagaggagctcaggcaattatcattgttttcaatctgaatgacgtggcaagcctcgaacacaccaagcaatggctggccgatgcacttaaggaaaacgatccttccagtgtcctgctctttcttgtcggctcgaaaaaagaccttagcacacccgcacagtacgctctgatggagaaggatgcgctgcaggttgctcaagaaatgaaggccgagtattgggcagtctcttcactgaccggcgaaaacgtcagagagttctttttcagggtggccgcattgacatttgaagccaacgtgcttgcggaactcgaaaagagtggtgctcggcggattggtgacgtcgtacggatcaactcagatgattctaatttatacctgaccgcaagcaaaaaaaagcctacctgctgtccatag

SEQ ID NO: 56613 - DNA, 951 bp, Artificial Sequence
  derived and/or modified sequence
atgagccacctgcccggcctggagctgcggcgggaggccccacccctgctgggccccctgctgagccccttccccctgcctgctggctcctggcaccggcagatgctgcggagcagcctgcgcttccccatcaccaacagcgctggggccccctgcaaggctgctggccgcatgaacatcctggcccctgtgagaagagacagagtgctggccgagctgccccagtgcctgaggaaggaggccgccctgcacggccacaaggacttccacccccgggtgacctgtgcctgccaggagcacaggacaggcaccgtgggcttcaagatcagcaaggtgattgtggtgggggacctgtctgtgggcaagacctgcctgatcaaccgcttctgcaaggacacctttgacaagaactacaaggccaccatcggcgtggactttgagatggagagatttgaggtgctgggcatccccttcagcctgcagctgtgggacacagctggccaggagcgcttcaagtgcatcgccagcacctactacagaggagcccaggccatcatcatcgtgttcaacctgaatgatgtggccagcctggagcacaccaagcagtggctggctgatgccctgaaggaaaatgaccccagctctgtgctgctcttcctggtgggcagcaagaaggacctgagcaccccagcccagtatgccctgatggagaaggatgccctgcaggtggcccaggagatgaaggccgagtactgggccgtgagcagcctgaccggggagaatgtgcgggagttcttcttccgggtggccgccctgacctttgaggccaacgtgctggccgagctggagaagagcggggccaggagaattggagatgtggtgcgcatcaacagtgatgacagcaacctgtacctgacagccagcaagaagaagcccacctgctgcccctag

SEQ ID NO: 56614 - DNA, 951 bp, Artificial Sequence
  derived and/or modified sequence
atgagccacctgcccggcctggagctgcggcgggaggccccccccctcctcggccccctgctctccccctttcctcttcccgcagggtcctggcaccgtcagatgctgcgcagctcactgcgctttcccatcaccaattcagcaggtgccccttgtaaggcagcaggacggatgaacatacttgccccagtgcggagggatagggttttagctgagttgcctcaatgtcttcggaaggaagccgctttacatggccacaaagactttcaccccagggttacctgtgcttgccaggagcataggacaggcacggtgggctttaaaatatccaaggtcattgtcgtgggagacctctcagttggtaagacctgcctgatcaaccgcttttgtaaagacacattcgataagaattataaggcaaccattggggtggatttcgagatggaacgcttcgaagtcctggggatccccttttcccttcagctgtgggatacggctggacaggagcgctttaagtgcatcgccagcacctattataggggggctcaagcaatcatcatagtgttcaatcttaacgacgttgcctccttggaacatacaaagcagtggttggcggatgccttgaaggagaacgatcccagctcagtgctgctgttcctggtgggcagcaaaaaagacctcagtacgcctgctcagtatgccctgatggagaaggatgccttgcaggtggcccaggagatgaaagccgaatactgggccgtatccagtctaactggcgagaacgtccgagagttctttttcagagtcgcggcgctgacattcgaagctaacgtcctggccgagctagaaaaatctggggctaggcgtattggcgacgtcgttcggatcaacagtgatgacagtaacctgtatctgaccgcctcaaaaaagaaacccacatgctgtccctag

SEQ ID NO: 56615 - DNA, 951 bp, Artificial Sequence
  derived and/or modified sequence
atgtctcacctgcccggactagagcttagacgggaggcaccacctctcctggggcctctcctgtcccctttcccactgcccgctggaagttggcatagacaaatgctgaggtcctcacttaggtttccaatcactaatagcgccggagccccttgtaaggcagccggaagaatgaatatcctggctcccgtgagacgggatcgcgtgctggccgagctacctcagtgccttcggaaggaagcggctctgcacggccacaaggactttcatccacgcgtcacttgcgcgtgtcaggagcaccgcacagggactgtgggcttcaagattagcaaagtgattgtggttggagacttgagcgtgggcaagacgtgtcttatcaaccgattttgtaaggacaccttcgacaaaaattataaggccacgatcggtgtggacttcgaaatggagagatttgaagttctggggattcctttttccctccagctgtgggacaccgctgggcaggaaaggttcaaatgtattgcttctacctactatcgcggtgcccaggcaataatcattgtcttcaacttaaacgatgttgcttcccttgaacacactaaacagtggcttgctgatgcactgaaggagaacgacccttcctccgtgctcctattcttggtcgggagcaagaaggacctgtcaacgccggctcaatacgccctgatggaaaaggacgccctgcaggtcgcccaagagatgaaagctgagtattgggcggtctcctctttgaccggtgagaatgtgagagaatttttctttagggtcgcagccctgactttcgaggctaatgtgctggcagagttggagaagtccggtgccaggcgaatcggagatgtggtgaggattaacagcgatgactcaaacttatacctcactgcaagcaaaaaaaagcccacttgctgcccatag

SEQ ID NO: 56616 - DNA, 1293 bp, Artificial Sequence
  derived and/or modified sequence
ggttcctggcatcgccagatgctgcgcagcagtctccgattccccatcaccaattcggctggcgtctccgagaccgcggactcccgtagggtccccgtggccccgagttgtagtcgggacaccccggccgcgggtgatcgtcgggtctccacgcgcccgggtcgctgacgcggatccggcctcggcgccttctcagggcgccctgcaaggccgcaggcaggatgaacattctggcacccgtgcggagggatcgcgtcctggcggagctgccccagtgcctgaggaaggaggccgctttgcacgggcacaaagacttccacccccgcgtcacctgcgcctgccaggagcaccggacaggcaccgtggggttctgcaaagacacctttgataagaattacaaggccaccattggagtggacttcgagatggaacgatttgaggtgctgggcattcccttcagtttgcagctttgggataccgctgggcaggagaggttcaaatgcattgcatcaacctactatagaggagctcaagccatcatcattgtcttcaacctgaatgatgtggcatctctggaacataccaagcagtggctggccgatgccctgaaggagaatgacccttccagtgtgcttctcttccttgtaggttccaagaaggatctgagtacccctgctcagtatgcgctgatggagaaagacgccctccaggtggcccaggagatgaaggctgagtactgggcagtctcatctctcactggtgagaatgtccgagaattcttcttccgtgtggcagcactgacctttgaggccaatgtgctggctgagctggagaaatcgggggctcgacgcattggggatgttgtccgcatcaacagtgatgacagcaacctctacctaactgccagcaagaagaagcccacatgttgcccatgagggctgaggagactgttcagagactgcccagccctagggcactgtgccaccctcattcctccagagcttgacccctggacatttgcactgactttatccagaccaaagagctgcctcttggtggcagtattcccacagaggggtagctgggatcatgctagtcacttcctgcccccaggcaccgtgccaaagactggatgccccctactcctcaggggactgtccagggcgcccagtggtagtgagggagagtgtctctgttcttttgctcagcctgctgggccctttgtgtttgaggatgcttaatgattccagcctctcactgtgccttatgcattaaaatttctttgttacgagc

SEQ ID NO: 56617 - DNA, 1592 bp, Artificial Sequence
  derived and/or modified sequence
cagccttgaaggaaaagacgccagacttcagacgtctctctcctcggtgggcacctcattctaaccctggcacccccttcgcacgcttcccctccaccatcctcacccccgacctcccagggcagaagggcgagagggggcagactctatgagtcacctcccaggcctggagttgaggagggaagcgccgcctctccttgggccccttctctccccctttcccctccctgctggttcctggcatcgccagatgctgcgcagcagtctccgattccccatcaccaattcggctggcgtctccgagaccgcggactcccgtagggtccccgtggccccgagttgtagtcgggacaccccggccgcgggtgatcgtcgggtctccacgcgcccgggtcgctgacgcggatccggcctcggcgccttctcagggcgccctgcaaggccgcaggcaggatgaacattctggcacccgtgcggagggatcgcgtcctggcggagctgccccagtgcctgaggaaggaggccgctttgcacgggcacaaagacttccacccccgcgtcacctgcgcctgccaggagcaccggacaggcaccgtgggatttaagatctccaaggtcattgtggtgggggacctgtcggtggggaagacttgcctcattaataggttctgcaaagacacctttgataagaattacaaggccaccattggagtggacttcgagatggaacgatttgaggtgctgggcattcccttcagtttgcagctttgggataccgctgggcaggagaggttcaaatgcattgcatcaacctactatagaggagctcaagccatcatcattgtcttcaacctgaatgatgtggcatctctggaacataccaagcagtggctggccgatgccctgaaggagaatgacccttccagtgtgcttctcttccttgtaggttccaagaaggatctgagtacccctgctcagtatgcgctgatggagaaagacgccctccaggtggcccaggagatgaaggctgagtactgggcagtctcatctctcactggtgagaatgtccgagaattcttcttccgtgtggcagcactgacctttgaggccaatgtgctggctgagctggagaaatcgggggctcgacgcattggggatgttgtccgcatcaacagtgatgacagcaacctctacctaactgccagcaagaagaagcccacatgttgcccatgagggctgaggagactgttcagagactgcccagccctagggcactgtgccaccctcattcctccagagcttgacccctggacatttgcactgactttatccagaccaaagagctgcctcttggtggcagtattcccacagaggggtagctgggatcatgctagtcacttcctgcccccaggcaccgtgccaaagactggatgccccctactcctcaggggactgtccagggcgcccagtggtagtgagggagagtgtctctgttcttttgctcagcctgctgggccctttgtgtttgaggatgcttaatgattccagcctctcactgtgccttatgcattaaaatttctttgttacgagca

SEQ ID NO: 56618 - DNA, 1060 bp, Artificial Sequence
  derived and/or modified sequence
ctccttgggccccttctctccccctttcccctccctgctggttcctggcatcgccagatgctgcgcagcagtctccgattccccatcaccaattcggctggggtctgcgcgggcccggcccccaccagacgggactccccgcccccaattggcggccgaagagtctcctcgccccagagtcatcttcgggacgcccagggcccgggtgattttgggctcgccgcggccccgggtgattgtttcatctccgtggcccgcggtggtcgtagcgtctccgagaccgcggactcccgtagggtccccgtggccccgagttgtagtcgggacaccccggccgcgggtgatcgtcgggtctccacgcgcccgggtcgctgacgcggatccggcctcggcgccttctcagggcgccctgcaaggccgcaggcaggatgaacattctggcacccgtgcggagggatcgcgtcctggcggagctgccccagtgcctgaggaaggaggccgctttgcacgggcacaaagacttccacccccgcgtcacctgcgcctgccaggagcaccggacaggcaccgtgggatttaagatctccaaggtcattgtggtgggggacctgtcggtggggaagacttgcctcattaataggttctgcaaagacacctttgataagaattacaaggccaccattggagtggacttcgagatggaacgatttgaggtgctgggcattcccttcagtttgcagctttgggataccgctgggcaggagaggttcaaatgcattgcatcaacctactatagaggagctcaagccatcatcattgtcttcaacctgaatgatgtggcatctctggaacataccaagcagtggctggccgatgccctgaaggagaatgacccttccagtgtgcttctcttccttgtaggttccaagaaggatctgagtacccctgctcagtatgcgctgatggagaaagacgccctccaggtggcccaggagatgaaggctgagtactgggcagtctcatctctcactggtgagaatgtccgagaattcttcttccg

SEQ ID NO: 56619 - DNA, 1736 bp, Artificial Sequence
  derived and/or modified sequence
tccaggaatttccggggatcgtgttacagcgttggcggagcccgagcggagtgggactcgaggccctgtagccggactgggcccctcgccccctcctccagcggcctgcgggccttggcagcgccgcccctgcccacactgaccccgtgtggcggggccgctccgcgcccccgggccgctctgtaatggtagggcagcctcagccccgagatgacgtcgggtctccgcggccccgggttattgtaggaaccatccggccccgcgtaatcgtaggaactatccggccccgcgtaatcgtagggtctgcgcgggcccggcccccaccagacgggactccccgcccccaattggcggccgaagagtctcctcgccccagagtcatcttcgggacgcccagggcccgggtgattttgggctcgccgcggccccgggtgattgtttcatctccgtggcccgcggtggtcgtagcgtctccgagaccgcggactcccgtagggtccccgtggccccgagttgtagtcgggacaccccggccgcgggtgatcgtcgggtctccacgcgcccgggtcgctgacgcggatccggcctcggcgccttctcagggcgccctgcaaggccgcaggcaggatgaacattctggcacccgtgcggagggatcgcgtcctggcggagctgccccagtgcctgaggaaggaggccgctttgcacgggcacaaagacttccacccccgcgtcacctgcgcctgccaggagcaccggacaggcaccgtgggatttaagatctccaaggtcattgtggtgggggacctgtcggtggggaagacttgcctcattaataggttctgcaaagacacctttgataagaattacaaggccaccattggagtggacttcgagatggaacgatttgaggtgctgggcattcccttcagtttgcagctttgggataccgctgggcaggagaggttcaaatgcattgcatcaacctactatagaggagctcaagccatcatcattgtcttcaacctgaatgatgtggcatctctggaacataccaagcagtggctggccgatgccctgaaggagaatgacccttccagtgtgcttctcttccttgtaggttccaagaaggatctgagtacccctgctcagtatgcgctgatggagaaagacgccctccaggtggcccaggagatgaaggctgagtactgggcagtctcatctctcactggtgagaatgtccgagaattcttcttccgtgtggcagcactgacctttgaggccaatgtgctggctgagctggagaaatcgggggctcgacgcattggggatgttgtccgcatcaacagtgatgacagcaacctctacctaactgccagcaagaagaagcccacatgttgcccatgagggctgaggagactgttcagagactgcccagccctagggcactgtgccaccctcattcctccagagcttgacccctggacatttgcactgactttatccagaccaaagagctgcctcttggtggcagtattcccacagaggggtagctgggatcatgctagtcacttcctgcccccaggcaccgtgccaaagactggatgccccctactcctcaggggactgtccagggcgcccagtggtagtgagggagagtgtctctgttcttttgctcagcctgctgggccctttgtgtttgaggatgcttaatgattccagcctctcactgtgcc

SEQ ID NO: 56620 - DNA, 717 bp, Artificial Sequence
  derived and/or modified sequence
cacaatctacacagcagccttgaaggaaaagacgccagacttcagacgtctctctcctcgggcgccctgcaaggccgcaggcaggatgaacattctggcacccgtgcggagggatcgcgtcctggcggagctgccccagtgcctgaggaaggaggccgctttgcacgggcacaaagacttccacccccgcgtcacctgcgcctgccaggagcaccggacaggcaccgtgggatttaagatctccaaggtcattgtggtgggggacctgtcggtggggaagacttgcctcattaataggttctgcaaagacacctttgataagaattacaaggccaccattggagtggacttcgagatggaacgatttgaggtgctgggcattcccttcagtttgcagctttgggataccgctgggcaggagaggttcaaatgcattgcatcaacctactatagaggagctcaagccatcatcattgtcttcaacctgaatgatgtggcatctctggaacataccaagcagtggctggccgatgccctgaaggagaatgacccttccagtgtgcttctcttccttgtaggttccaagaaggatctgagtacccctgctcagtatgcgctgatggagaaagacgccctccaggtggcccaggagatgaaggctgagtactgggcagtctcatctctcactggtgagaatgtccgagaattcttcttccg

SEQ ID NO: 56621 - DNA, 1314 bp, Artificial Sequence
  derived and/or modified sequence
tatgagtcacctcccaggcctggagttgaggagggaagcgccgcctctccttgggccccttctctccccctttcccctccctgctggttcctggcatcgccagatgctgcgcagcagtctccgattccccatcaccaattcggctggggcgccctgcaaggccgcaggcaggatgaacattctggcacccgtgcggagggatcgcgtcctggcggagctgccccagtgcctgaggaaggaggccgctttgcacgggcacaaagacttccacccccgcgtcacctgcgcctgccaggagcaccggacaggcaccgtgggatttaagatctccaaggtcattgtggtgggggacctgtcggtggggaagacttgcctcattaataggttctgcaaagacacctttgataagaattacaaggccaccattggagtggacttcgagatggaacgatttgaggtgctgggcattcccttcagtttgcagctttgggataccgctgggcaggagaggttcaaatgcattgcatcaacctactatagaggagctcaagccatcatcattgtcttcaacctgaatgatgtggcatctctggaacataccaagcagtggctggccgatgccctgaaggagaatgacccttccagtgtgcttctcttccttgtaggttccaagaaggatctgagtacccctgctcagtatgcgctgatggagaaagacgccctccaggtggcccaggagatgaaggctgagtactgggcagtctcatctctcactggtgagaatgtccgagaattcttcttccgtgtggcagcactgacctttgaggccaatgtgctggctgagctggagaaatcgggggctcgacgcattggggatgttgtccgcatcaacagtgatgacagcaacctctacctaactgccagcaagaagaagcccacatgttgcccatgagggctgaggagactgttcagagactgcccagccctagggcactgtgccaccctcattcctccagagcttgacccctggacatttgcactgactttatccagaccaaagagctgcctcttggtggcagtattcccacagaggggtagctgggatcatgctagtcacttcctgcccccaggcaccgtgccaaagactggatgccccctactcctcaggggactgtccagggcgcccagtggtagtgagggagagtgtctctgttcttttgctcagcctgctgggccctttgtgtttgaggatgcttaatgattccagcctctcactgtgccttatgcattaaaatttctttgttacgagcactt

SEQ ID NO: 56622 - DNA, 951 bp, Artificial Sequence
  derived and/or modified sequence
atgagccacctgcccggcctggagctgagaagagaggccccccccctgctgggccccctgctgagccccttccccctgcccgccggcagctggcacagacagatgctgagaagcagcctgagattccccatcaccaacagcgccggcgccccctgcaaggccgccggcagaatgaacatcctggcccccgtgagaagagacagagtgctggccgagctgccccagtgcctgagaaaggaggccgccctgcacggccacaaggacttccaccccagagtgacctgcgcctgccaggagcacagaaccggcaccgtgggcttcaagatcagcaaggtgatcgtggtgggcgacctgagcgtgggcaagacctgcctgatcaacagattctgcaaggacaccttcgacaagaactacaaggccaccatcggcgtggacttcgagatggagagattcgaggtgctgggcatccccttcagcctgcagctgtgggacaccgccggccaggagagattcaagtgcatcgccagcacctactacagaggcgcccaggccatcatcatcgtgttcaacctgaacgacgtggccagcctggagcacaccaagcagtggctggccgacgccctgaaggagaacgaccccagcagcgtgctgctgttcctggtgggcagcaagaaggacctgagcacccccgcccagtacgccctgatggagaaggacgccctgcaggtggcccaggagatgaaggccgagtactgggccgtgagcagcctgaccggcgagaacgtgagagagttcttcttcagagtggccgccctgaccttcgaggccaacgtgctggccgagctggagaagagcggcgccagaagaatcggcgacgtggtgagaatcaacagcgacgacagcaacctgtacctgaccgccagcaagaagaagcccacctgctgcccctag

SEQ ID NO: 56623 - protein, 172 aa, Artificial Sequence
  derived and/or modified sequence
MSSKKAKTKTTKKRPQRATSNVFAMFDQSQIQEFKEAFNMIDQNRDGFIDKEDLHDMLASLGKNPTDAYLDAMMNEAPGPINFTMFLTMFGEKLNGTDPEDVIRNAFACFDEEATGTIQEDYLRELLTTMGDRFTDEEVDELYREAPIDKKGNFNYIEFTRILKHGAKDKDD

SEQ ID NO: 56624 - DNA, 519 bp, Artificial Sequence
  derived and/or modified sequence
atgagcagtaaaaaagcaaaaactaagaccacgaaaaagcgcccacagcgcgcaacatcaaacgtgtttgcaatgttcgaccagagccaaatccaagagttcaaagaggcctttaacatgatcgatcagaaccgagatgggttcatcgacaaggaggatttgcatgacatgttggcttcactgggtaaaaatcctaccgatgcatacctggacgccatgatgaacgaagccccaggacccatcaatttcacgatgttcctcaccatgttcggggaaaagctgaatggcacagatcctgaagacgtcatccggaacgcatttgcttgcttcgatgaagaggcgacggggacaattcaggaagactacttacgggagctgctcactactatgggagatcggtttacggacgaggaagtggatgaactgtacagagaggctcctatcgacaaaaaggggaatttcaactacattgaatttactaggatcttgaaacatggtgctaaagacaaggatgattag

SEQ ID NO: 56625 - DNA, 519 bp, Artificial Sequence
  derived and/or modified sequence
atgtcatccaagaaggcaaaaacaaaaactaccaagaagaggcctcagagagctacatctaacgtgtttgccatgtttgaccagtcacagatccaggaattcaaagaagctttcaatatgatcgatcagaaccgggacggatttatcgacaaagaggatcttcacgacatgctggcctctcttggaaaaaaccctacagatgcttacctggatgcaatgatgaacgaagctcctggtccaatcaattttaccatgtttttgaccatgtttggggaaaaactgaacggaacagatccagaagatgttatccgtaatgcgttcgcttgttttgatgaggaagcaacaggaaccatccaggaagactacctgcgcgaactgctgacaacaatgggcgatagatttaccgacgaggaggtggatgagctctacagagaagctcctattgacaaaaaggggaatttcaactacattgaattcaccaggatcctgaagcacggcgccaaggacaaggatgattag

SEQ ID NO: 56626 - DNA, 519 bp, Artificial Sequence
  derived and/or modified sequence
atgtcctctaaaaaggccaagactaagactaccaaaaagagacctcagcgggccacttccaatgtatttgctatgtttgatcaatcccagatccaagagtttaaggaggcctttaacatgatcgatcagaatcgagacggattcatcgacaaagaggacctgcacgacatgttagcctcccttgggaaaaaccctacagacgcctaccttgacgcaatgatgaacgaagctcccggtcccattaactttacaatgttcctcacaatgttcggcgaaaaactaaacggaacagatcccgaggatgtgatacggaacgcattcgcatgcttcgacgaggaagccaccggcacaattcaggaggattatcttagggagctgctgaccacaatgggtgacaggttcacagacgaagaagttgacgaactctaccgagaagcccccatcgataaaaaagggaactttaattatatcgagtttacaaggatcctgaagcatggtgccaaagataaagatgattag

SEQ ID NO: 56627 - DNA, 519 bp, Artificial Sequence
  derived and/or modified sequence
atgtcatccaaaaaagctaaaacaaaaaccacaaagaaacgcccgcaaagagctacttcgaatgtcttcgctatgttcgatcagagccagatccaggagttcaaagaggcgttcaacatgatagaccagaatcgggatggctttatagataaggaagacctccatgatatgcttgccagcctgggcaagaaccctaccgatgcttacctggatgctatgatgaacgaggccccagggccaataaacttcactatgtttcttacaatgttcggtgaaaaactcaacggcacagatcccgaagatgtgattcggaacgccttcgcttgctttgacgaggaggccaccggaacaatacaggaggactacttgcgggagctgcttacaacaatgggcgaccggtttactgatgaagaagtagacgaactgtaccgggaagcacctatcgacaagaaaggtaattttaactacattgagttcactcgtattctcaagcatggagccaaggataaagacgactag

SEQ ID NO: 56628 - DNA, 519 bp, Artificial Sequence
  derived and/or modified sequence
atgtcctccaaaaaggctaaaactaaaactaccaagaaaagaccacagcgcgcaacttcgaatgttttcgcaatgttcgatcaaagtcagatacaggaattcaaggaggcatttaatatgattgaccagaacagggatggttttattgataaggaggacctacatgatatgctcgccagccttggtaagaatcctacggatgcctatctcgatgcgatgatgaatgaggcccctgggccaatcaatttcaccatgttcttaacaatgtttggtgagaagcttaacggaacagacccggaggacgtgattagaaacgcattcgcctgcttcgacgaagaagccaccggtacaattcaggaggactatctgagggaacttctcaccacaatgggagaccggtttacggatgaagaagttgacgagttgtatagggaggctcccattgacaaaaaaggaaatttcaactatattgaatttacaaggatcctcaaacatggagccaaagacaaagatgactag

SEQ ID NO: 56629 - DNA, 519 bp, Artificial Sequence
  derived and/or modified sequence
atgagcagcaagaaggccaagaccaagaccaccaagaagaggccccagagggccaccagcaatgtgtttgccatgtttgaccagagccagatccaggagttcaaggaggccttcaacatgattgaccagaacagagatggcttcatcgacaaggaggacctgcatgacatgctggccagcctgggcaagaaccccacagatgcctacctggatgccatgatgaatgaggcccctggccccatcaacttcaccatgttcctgaccatgtttggagagaagctgaatggaacagatcctgaagatgtgatcagaaatgcctttgcctgctttgatgaggaggccaccggcaccatccaggaggactacctgcgggagctgctgaccaccatgggagaccgcttcacagatgaggaggtggatgagctgtaccgggaggcccccatcgacaagaagggcaacttcaactacatcgagttcacccgcatcctgaagcatggagccaaggacaaggatgactag

SEQ ID NO: 56630 - DNA, 1249 bp, Artificial Sequence
  derived and/or modified sequence
ggcgggaggagggttggtggcgaggccctggcccggacgtccaggggccgggaggctgcaggcgatggagccggtatggggagacgccctgctggagaagtggccgggtcccggccgtgcgtgggccggccctgcgccacctgggtgacctcagacacctgggccttggacggcccggctgcccggcggccaacgcctgccctcccggcgccgcggcgggtcctggcggtggattggggccgacccgggcgtgttcgtgtggagcacctgccctgtgcccaacactatcctagatgctttggagggtggaggagcctcctgttgcacggtcttgcctaaggtgaagcctccaaggaagccattagcataattaaacaaccaccatgtcgagcaaaaaggcaaagaccaagaccaccaagaagcgccctcagcgtgcaacatccaatgtgtttgccatgtttgaccagtcacagattcaggagttcaaagaggccttcaacatgattgatcagaacagagatggcttcatcgacaaggaagatttgcatgatatgcttgcttctctagggaagaatcccactgatgcataccttgatgccatgatgaatgaggccccagggcccatcaatttcaccatgttcctgaccatgtttggtgagaagttaaatggcacagatcctgaagatgtcatcagaaacgcctttgcttgctttgatgaagaagcaacaggcaccattcaggaagattacctaagagagctgctgacaaccatgggggatcggtttacagatgaggaagtggatgagctgtacagagaagcacctattgacaaaaaggggaatttcaattacatcgagttcacacgcatcctgaaacatggagccaaagacaaagatgactgaaagaactttagctaaaatcttccagttacattgtcttactctcttttacttctcagacacttcccccaccctcatagaacctgttgcatgcaacttagtttcacagctttgcctcttctttttgatgtatttattccagacctttctgccacttagcacttgtataatcagactggaaatggggatgagggtgtaaattgtattgaaaaagatcgcgaataaaaatcaacaaatgtgaaagcccagaaaaatatattcgtatttctggttttgctggatttttacatttttatataataaaaatgttattttgaaataaagattatgctgactcaaatgcaatgtaa

SEQ ID NO: 56631 - DNA, 1210 bp, Artificial Sequence
  derived and/or modified sequence
cgcagcgcaggccgcgatatcgcagcggatcggagcaggccggaggggcaattaagaccccggccgtgtgcgtccggcctcagcagccccgccgctcggcggacacgcagaccccgccggcccgggcgcgaacactcagcgcacccccgttccacttggtcccgccgcgccttccggtgcgccttccggtgcgccttccggtgcgccttccgctccgccccttcaggcaggaagtgtcggcgccgccactgtccggccacagcctaacgctcttcgctgtcgtttgtggtctcgcgcagggcggccccggttctggtgtttggcgtcggaattaaacaaccaccatgtcgagcaaaaaggcaaagaccaagaccaccaagaagcgccctcagcgtgcaacatccaatgtgtttgccatgtttgaccagtcacagattcaggagttcaaagaggccttcaacatgattgatcagaacagagatggcttcatcgacaaggaagatttgcatgatatgcttgcttctctagggaagaatcccactgatgcataccttgatgccatgatgaatgaggccccagggcccatcaatttcaccatgttcctgaccatgtttggtgagaagttaaatggcacagatcctgaagatgtcatcagaaacgcctttgcttgctttgatgaagaagcaacaggcaccattcaggaagattacctaagagagctgctgacaaccatgggggatcggtttacagatgaggaagtggatgagctgtacagagaagcacctattgacaaaaaggggaatttcaattacatcgagttcacacgcatcctgaaacatggagccaaagacaaagatgactgaaagaactttagctaaaatcttccagttacattgtcttactctcttttacttctcagacacttcccccaccctcatagaacctgttgcatgcaacttagtttcacagctttgcctcttctttttgatgtatttattccagacctttctgccacttagcacttgtataatcagactggaaatggggatgagggtgtaaattgtattgaaaaagatcgcgaataaaaatcaacaaatgtgaaagcccagaaaaatatattcgtatttctggttttgctggatttttacatttttatataataaaaatgttattttgaaataaagattatgctgactcaaatgcaatgtaa

SEQ ID NO: 56632 - DNA, 1064 bp, Artificial Sequence
  derived and/or modified sequence
actgaaggccttggattcaaccttaagagggagaacttagcgtttccggctagatgtgtgggaggtggtaacgagcaaaactcaaaagctgggaattgtgtcctgtgaaaagcaggccgtggggacaccggcgggtatggaacagaactgtaatgactaatagtcggaaataagggtagatagaattaaacaaccaccatgtcgagcaaaaaggcaaagaccaagaccaccaagaagcgccctcagcgtgcaacatccaatgtgtttgccatgtttgaccagtcacagattcaggagttcaaagaggccttcaacatgattgatcagaacagagatggcttcatcgacaaggaagatttgcatgatatgcttgcttctctagggaagaatcccactgatgcataccttgatgccatgatgaatgaggccccagggcccatcaatttcaccatgttcctgaccatgtttggtgagaagttaaatggcacagatcctgaagatgtcatcagaaacgcctttgcttgctttgatgaagaagcaacaggcaccattcaggaagattacctaagagagctgctgacaaccatgggggatcggtttacagatgaggaagtggatgagctgtacagagaagcacctattgacaaaaaggggaatttcaattacatcgagttcacacgcatcctgaaacatggagccaaagacaaagatgactgaaagaactttagctaaaatcttccagttacattgtcttactctcttttacttctcagacacttcccccaccctcatagaacctgttgcatgcaacttagtttcacagctttgcctcttctttttgatgtatttattccagacctttctgccacttagcacttgtataatcagactggaaatggggatgagggtgtaaattgtattgaaaaagatcgcgaataaaaatcaacaaatgtgaaagcccagaaaaatatattcgtatttctggttttgctggatttttacatttttatataataaaaatgttattttgaaataaagattatgctgactcaaatgcaatgtaa

SEQ ID NO: 56633 - DNA, 1025 bp, Artificial Sequence
  derived and/or modified sequence
ctgccctcccggcgccgcggcgggtcctggcggtggattggggccgacccgggcgtgttcgtgtggagcacctgccctgtgcccaacactatcctagatgctttggagggtggaggagcctcctgttgcacggtcttgcctaagaattaaacaaccaccatgtcgagcaaaaaggcaaagaccaagaccaccaagaagcgccctcagcgtgcaacatccaatgtgtttgccatgtttgaccagtcacagattcaggagttcaaagaggccttcaacatgattgatcagaacagagatggcttcatcgacaaggaagatttgcatgatatgcttgcttctctagggaagaatcccactgatgcataccttgatgccatgatgaatgaggccccagggcccatcaatttcaccatgttcctgaccatgtttggtgagaagttaaatggcacagatcctgaagatgtcatcagaaacgcctttgcttgctttgatgaagaagcaacaggcaccattcaggaagattacctaagagagctgctgacaaccatgggggatcggtttacagatgaggaagtggatgagctgtacagagaagcacctattgacaaaaaggggaatttcaattacatcgagttcacacgcatcctgaaacatggagccaaagacaaagatgactgaaagaactttagctaaaatcttccagttacattgtcttactctcttttacttctcagacacttcccccaccctcatagaacctgttgcatgcaacttagtttcacagctttgcctcttctttttgatgtatttattccagacctttctgccacttagcacttgtataatcagactggaaatggggatgagggtgtaaattgtattgaaaaagatcgcgaataaaaatcaacaaatgtgaaagcccagaaaaatatattcgtatttctggttttgctggatttttacatttttatataataaaaatgttattttgaaataaagattatgctgactcaaatgcaatgtaa

SEQ ID NO: 56634 - DNA, 519 bp, Artificial Sequence
  derived and/or modified sequence
atgagcagcaagaaggccaagaccaagaccaccaagaagcggccccaaagggcaaccagtaacgtcttcgctatgttcgatcagtctcaaatacaagagttcaaggaggctttcaatatgatcgaccagaaccgggatgggttcattgacaaggaagatctgcatgatatgctggcgtcactcggcaagaacccaactgacgcatatctcgatgctatgatgaatgaggcccccggccccattaactttactatgtttctcactatgttcggtgaaaagcttaacgggactgaccctgaagacgttatccgaaacgccttcgcatgttttgatgaagaggctacagggaccatacaggaagactatctcagggagctgttaaccacgatgggggaccgcttcactgacgaggaggttgacgaactatatcgagaagccccgatcgataagaagggcaattttaactatatagaatttacgagaatcctgaagcatggagctaaggacaaagacgattag

SEQ ID NO: 56635 - DNA, 519 bp, Artificial Sequence
  derived and/or modified sequence
atgagcagcaagaaggccaagaccaagaccaccaagaagcggccccagagggccacctcaaatgtgttcgccatgttcgatcagagtcagatccaggaattcaaagaagctttcaatatgatcgaccagaatcgagatggtttcatcgataaggaagacctacacgatatgctggcgtctctcggaaaaaaccccactgacgcctatctggacgcaatgatgaatgaggctcccggtcccatcaattttaccatgttcctgaccatgtttggggagaagctgaacggaacagaccctgaagatgtgatcagaaatgcgtttgcatgttttgatgaagaggcaactggaaccatacaggaggactaccttcgggaacttctgactaccatgggggacaggtttactgacgaggaggttgacgagttatatcgggaggcaccaatcgacaaaaaggggaactttaactatatcgagtttacaaggatcctgaagcacggcgctaaggataaggacgattag

SEQ ID NO: 56636 - DNA, 519 bp, Artificial Sequence
  derived and/or modified sequence
atgagcagcaagaaggccaagaccaagaccaccaagaagcggccccagagagcgacctccaatgtttttgcaatgtttgaccagtcacagatacaagagttcaaagaggcatttaacatgatcgatcagaatagggacggatttatagacaaggaggatttacacgacatgctggctagtctggggaagaaccctacagacgcatacctggacgccatgatgaacgaagcccccggacccattaattttactatgttcctgacaatgttcggtgagaaactgaatggtaccgacccagaggacgtgattcgaaatgcgtttgcctgctttgatgaagaagccaccgggaccattcaggaagattacctgagggagctgctaacgactatgggcgacagatttaccgatgaggaagtagatgagttataccgagaggctcccatagataagaaggggaattttaattacatcgaattcacacggatcctaaagcatggagcaaaggataaagacgattag

SEQ ID NO: 56637 - DNA, 519 bp, Artificial Sequence
  derived and/or modified sequence
atgagcagcaagaaggccaagaccaagaccaccaagaagcggccccagcgggcaacgtccaacgtgtttgcaatgttcgatcagtctcaaattcaggagttcaaagaggcctttaacatgatcgatcagaatcgggatggcttcattgacaaggaggaccttcacgatatgctggcctccctcggaaaaaatcccaccgacgcttacctggacgctatgatgaatgaagcgccgggaccaatcaacttcaccatgttccttacaatgtttggcgagaagttgaatggcaccgaccccgaggacgttatcaggaatgccttcgcctgttttgacgaggaagcaaccggaaccatccaagaggactacctgagggagttgctgaccactatgggggatcgcttcactgatgaagaagtagacgaactgtaccgggaagcacccatcgacaagaaggggaacttcaactacatcgaatttaccaggattctcaaacacggagctaaagacaaagacgactag

SEQ ID NO: 56638 - DNA, 519 bp, Artificial Sequence
  derived and/or modified sequence
atgagcagcaagaaggccaagaccaagaccaccaagaagcggccccaacgagctacgtcaaatgtgttcgcaatgttcgaccaatctcagattcaagaattcaaagaggcatttaacatgattgaccaaaaccgagatggctttatagacaaagaggatcttcacgacatgctcgcctcactgggtaagaacccgaccgacgcttacttggacgcaatgatgaatgaggcacctggtcctattaactttaccatgtttctcaccatgttcggagaaaagctgaacggcacagaccccgaggatgtgatccgcaacgccttcgcctgttttgatgaagaggcgaccggaaccattcaggaagactatctgcgggaactgctaaccacaatgggagatcgctttacagatgaggaggttgacgagctgtacagagaggcccctatcgacaagaaagggaactttaattacattgagtttacacgcatcttgaaacacggtgcgaaggataaagatgattag

SEQ ID NO: 56639 - DNA, 519 bp, Artificial Sequence
  derived and/or modified sequence
atgagttcaaaaaaggctaaaaccaagaccaccaagaagagaccacagcgagcaacctcaaacgtgttcgcaatgtttgaccaatcgcaaattcaagagttcaaggaggcatttaatatgatcgaccagaatcgcgacggctttatcgacaaagaggatctgcacgacatgttggccagcttgggtaaaaacccaacagatgcctatttagatgccatgatgaatgaggcaccgggtcctattaacttcactatgttcctgacaatgttcggcgagaagttgaacggtaccgatcctgaagatgtcattcggaatgcatttgcttgctttgatgaggaggcaactgggactatccaagaggattacctcagagagctgctgacaactatgggagacaggttcacggatgaagaggtggatgagctgtaccgcgaagctcccatcgataagaaagggaattttaattacattgagttcactcggatccttaaacatggtgccaaggacaaagatgactag

SEQ ID NO: 56640 - DNA, 519 bp, Artificial Sequence
  derived and/or modified sequence
atgagcagtaaaaaagccaaaacaaaaactacaaaaaagcgaccacaaagggcaacttccaacgtgtttgcaatgttcgaccagtctcaaatccaggagtttaaggaagcatttaacatgatcgaccagaatcgagacgggttcattgacaaagaggacctgcatgatatgctagccagcctgggaaaaaaccccactgatgcatacctagatgcgatgatgaatgaggcaccaggtcccataaattttacaatgttcctgacaatgtttggagaaaagcttaacggaacagacccggaggacgtgatcagaaacgcttttgcctgctttgacgaggaggctaccggcacgatccaggaagactacttgagggaactgctgactaccatgggagaccgatttacagatgaggaagtggacgaattatatagagaagctcccattgacaaaaagggaaactttaattacatcgagtttacgcggatattgaaacacggagccaaagataaggacgactag

SEQ ID NO: 56641 - DNA, 519 bp, Artificial Sequence
  derived and/or modified sequence
atgtcatccaagaaagccaaaactaagaccaccaaaaagaggcctcaaagggccacatccaatgtgtttgcaatgttcgaccagtctcagatccaggaatttaaagaggctttcaacatgattgatcagaatagggacggcttcattgacaaggaggatctccacgacatgctggcctccctcggcaaaaatcccactgacgcatacctagacgctatgatgaatgaagctcctggtcctattaattttaccatgttccttacaatgttcggagagaagctcaatggcactgaccctgaggacgttatacggaatgccttcgcttgttttgacgaagaggcaacgggtacaatccaggaagactacctgagagagctgctgacaactatgggggaccgctttactgatgaggaggtcgatgaactttaccgcgaggcaccaatagataaaaagggaaacttcaactatattgagtttacgcgcatcctgaagcacggggctaaagacaaagacgattag

SEQ ID NO: 56642 - DNA, 519 bp, Artificial Sequence
  derived and/or modified sequence
atgtcctccaagaaagccaagactaagaccaccaagaaacggccacagagagcaacctccaatgtcttcgcgatgttcgatcagagtcagatccaggaatttaaagaggcctttaacatgattgaccagaacagggatggattcatcgacaaagaggacctgcatgatatgctcgctagcctcggcaagaatccaaccgacgcatatctggatgccatgatgaacgaagcccctggtcccattaatttcacaatgtttctcacaatgttcggcgaaaagttgaatggcacagatcctgaagacgtcataaggaacgcctttgcttgtttcgacgaagaggcgactggtaccatccaagaagactacctccgggagctcctgaccacaatgggcgataggttcaccgacgaggaggtggatgagctgtaccgtgaagctcccatagacaaaaagggaaattttaattacatagagtttaccaggattctgaaacacggcgcaaaagataaagacgattag

SEQ ID NO: 56643 - DNA, 519 bp, Artificial Sequence
  derived and/or modified sequence
atgtcaagcaagaaggccaagacaaagacaacaaagaagcgcccacagagagccacgtcgaatgtcttcgcaatgttcgatcagtcccagatccaggaatttaaggaagctttcaacatgattgaccagaatagagatggattcattgacaaggaggatctccacgacatgctggcctcacttggcaagaaccccaccgatgcatacctggatgcaatgatgaatgaagctcccggtccgatcaactttaccatgttcctgaccatgttcggggaaaaactcaatggaacagatccggaggacgtcatccggaatgcattcgcctgctttgacgaagaagctacgggcaccatccaggaagattatctgagggaacttcttaccactatgggagacagatttaccgatgaagaggtagacgaactctaccgggaagcccctattgataagaaggggaacttcaattatatcgagtttacgcgcattctgaagcacggcgctaaagacaaggatgattag

SEQ ID NO: 56644 - DNA, 519 bp, Artificial Sequence
  derived and/or modified sequence
atgagcagcaagaaggccaagaccaagaccaccaagaagagaccccagagagccaccagcaacgtgttcgccatgttcgaccagagccagatccaggagttcaaggaggccttcaacatgatcgaccagaacagagacggcttcatcgacaaggaggacctgcacgacatgctggccagcctgggcaagaaccccaccgacgcctacctggacgccatgatgaacgaggcccccggccccatcaacttcaccatgttcctgaccatgttcggcgagaagctgaacggcaccgaccccgaggacgtgatcagaaacgccttcgcctgcttcgacgaggaggccaccggcaccatccaggaggactacctgagagagctgctgaccaccatgggcgacagattcaccgacgaggaggtggacgagctgtacagagaggcccccatcgacaagaagggcaacttcaactacatcgagttcaccagaatcctgaagcacggcgccaaggacaaggacgactag

SEQ ID NO: 56645 - protein, 234 aa, Artificial Sequence
  derived and/or modified sequence
MAAALQVLPRLARAPLHPLLWRGSVARLASSMALAEQARQLFESAVGAVLPGPMLHRALSLDPGGRQLKVRDRNFQLRQNLYLVGFGKAVLGMAAAAEELLGQHLVQGVISVPKGIRAAMERAGKQEMLLKPHSRVQVFEGAEDNLPDRDALRAALAIQQLAEGLTADDLLLVLISGGEPHPVRCGGGPCGGDCQWPHRGQFPQCARLPAYPQSLRPPCSPATFCEDCAVSGRL

SEQ ID NO: 56646 - DNA, 705 bp, Artificial Sequence
  derived and/or modified sequence
atggctgctgcactacaagtgctcccgcggttggccagggcgcctctgcaccctctgctctggcgcgggtcagtggctcgcttagccagtagcatggctttggccgagcaggccagacagctgtttgaatccgctgttggcgctgtgttgccgggtccgatgctgcatcgagcactgtctttggatcctggcggtcggcagcttaaggttcgagaccggaatttccagctgcggcaaaacctgtacctggtggggttcggaaaggcagtgctgggcatggcagccgctgcagaagagctactgggccagcatctcgttcagggcgttatcagtgtgccgaagggtatacgggccgctatggagcgggcggggaagcaggagatgctccttaagccacactccagagtgcaggtgtttgagggcgcagaggataacctacctgatcgggacgcactgcgggcagccttggcaatccagcagttggctgaaggtctgacagccgatgatcttctgctggtccttatctcgggcggagaaccgcatccagtaaggtgcggtggaggaccctgcggcggtgactgccagtggcctcatcgaggccagtttcctcagtgtgctagattacctgcttatccccagtctttgaggcccccttgctctccagccactttctgcgaggactgcgcggtgtctggtcgcctttag

SEQ ID NO: 56647 - DNA, 618 bp, Artificial Sequence
  derived and/or modified sequence
atggcagccgctttacaggttctcccccggttagccagagcccctctgcacccactgctgtggaggggctcagttgctaggttggcaagctcaatggccctggcagaacaagcgcgccagctgtttgagagcgccgttggcgccgttctgcccgggccaatgctccacagggcactcagtctcgacccaggaggaaggcagctcaaggtgagggatagaaactttcagttgcgccagaacctgtatctcgtgggctttggaaaagctgtgcttggcatggccgctgctgccgaggaactcctagggcagcatctcgtgcaaggcgtcatttctgtgcccaagggtattcgagctgctatggagcgggctggcaaacaggaaatgttactgaaaccgcacagcagagtgcaggtcttcgaaggggccgaggacaacctgcccgatagggacgctctgcgggccgctttggcaattcagcagctcgccgaaggactgaccgcggacgacctgctgttggtcttgattagcggttgggggactccagcggctcaccgagatgacaggtaccaatgccacggtcatccaccactggtgcccgctgcctccgtcatggcgtag

SEQ ID NO: 56648 - DNA, 705 bp, Artificial Sequence
  derived and/or modified sequence
atggccgctgccctccaggtgctgccacggctggcccgtgcacctctgcatcctttgctgtggagagggagcgtcgctcggctggcctctagtatggcactggccgagcaggccaggcagctgttcgaatccgctgtgggtgccgtcttgccagggccaatgcttcaccgggctctgagtctcgatccagggggtagacagctcaaggtgagggatcggaactttcagctgcgtcaaaatctgtacctcgttggttttgggaaggcagtgctaggaatggctgcggccgcagaagagctgctgggccagcacctcgtccaaggcgtcatctccgttcccaaaggaattcgcgctgccatggagcgcgcgggcaaacaggagatgctgctgaagcctcactcccgggttcaagtgttcgaaggagcagaggataatctgcccgaccgcgacgctctgagggcagcactggccattcagcagctggcggaaggccttacagccgatgatttgctgctggtcctaattagtggcggcgaacctcaccctgttagatgtggtggcggtccatgtggaggtgattgccaatggccccataggggacagtttccccaatgtgcgcgcctgcctgcctatcctcagagcctccggccaccttgttctcccgccactttctgtgaagattgcgcggttagcggacgactctag

SEQ ID NO: 56649 - DNA, 935 bp, Artificial Sequence
  derived and/or modified sequence
caccccctagtacttccgttctccagcgctgggcaccgcggccggagctgtgggctggcagccatgggtgccaggcagtgctgagagcagtggggcatggctgcagccctgcaggtcctgccccgcttggcccgagcccccttgcatccactcctctggcggggctcagtggcccgtctggccagcagcatggccttggcagagcaggccaggcagctgtttgagagtgctgtaggtgcagtgctgccgggccccatgctgcaccgggcactatccttggaccctggtggcagacagctgaaggtgcgggaccggaactttcagctgaggcaaaacctctacctggtgggctttggcaaggctgtgctgggtatggcagctgcagctgaggaactactgggccagcatcttgtgcagggcgtgatcagcgttcccaaggggatccgtgctgccatggagcgtgccggcaagcaggagatgctgctgaagccacatagccgtgtccaggtattcgagggtgcggaggacaacctcccggaccgcgatgcgctgcgggctgcactggccatccagcaactggctgagggactcacagctgatgacctgctgctcgtgctgatctcagggtggggcacacctgctgcacacagggatgacaggtaccaatgtcatggacacccacctcttgttcctgcggcctcggtgatggcataggtcacattttgggagttcagaggaggcctacaagggcaaggtcagatggcagagcaagccagactggcagatgggggcttccccctacccctgaggatgaggacaagcccctcggccagttcagcgttcccgtgcttctcccttgggcagcctctctcttgagcccctcaccctgtttctttctgtgaagcgagaatgtctgaaaataaataggaccatgc

SEQ ID NO: 56650 - DNA, 705 bp, Artificial Sequence
  derived and/or modified sequence
atggctgctgccctgcaggtgctgccccggctggcccgggcccccctgcaccccctgctgtggaggggctctgtggcccggctggccagctccatggccctggccgagcaggcccggcagctgtttgagagcgctgtgggcgctgtgctgcccggccccatgctgcaccgggccctgagcctggaccccggcggccggcagctgaaggtgcgggacaggaacttccagctgcggcagaacctgtacctggtgggctttgggaaggctgtgctgggcatggctgctgctgctgaggagctgctgggccagcacctggtgcagggcgtcatctctgtgcccaagggcatccgggccgccatggagagagctgggaagcaggagatgctgctgaagccccacagccgggtgcaggtgtttgaaggagctgaggacaacctgcctgacagagatgccctgcgggccgccctggccatccagcagctggccgagggcctgacagcagatgacctgctgctggtgctgatcagcggcggggagccccaccctgtgcgctgtggcggcggcccctgtggcggggactgccagtggccccaccggggccagttcccccagtgtgcccggctgcctgcctacccccagagcctgcggcccccctgcagccctgccaccttctgtgaggactgtgctgtgtctggccgcctgtag

SEQ ID NO: 56651 - DNA, 618 bp, Artificial Sequence
  derived and/or modified sequence
atggctgctgccctgcaggtgctgccccggctggcccgggcccccctgcaccccctgctgtggaggggctctgtggcccggctggccagctccatggccctggccgagcaggcccggcagctgtttgagagcgctgtgggcgctgtgctgcccggccccatgctgcaccgggccctgagcctggaccccggcggccggcagctgaaggtgcgggacaggaacttccagctgcggcagaacctgtacctggtgggctttgggaaggctgtgctgggcatggctgctgctgctgaggagctgctgggccagcacctggtgcagggcgtcatctctgtgcccaagggcatccgggccgccatggagagagctgggaagcaggagatgctgctgaagccccacagccgggtgcaggtgtttgaaggagctgaggacaacctgcctgacagagatgccctgcgggccgccctggccatccagcagctggccgagggcctgacagcagatgacctgctgctggtgctgatcagcggctggggcaccccagctgcccacagagatgaccgctaccagtgccacggccacccccccctggtgcctgctgcctctgtgatggcctag

SEQ ID NO: 56652 - DNA, 705 bp, Artificial Sequence
  derived and/or modified sequence
atggccgccgccctgcaggtgctgccccggctggcccgggcccccctgcacccacttctgtggcgaggcagcgtcgcaagactcgcctcatcaatggccttggccgagcaggcccgccaactgtttgaatcagctgtgggagccgtgctgccaggccctatgctgcatcgggcactgagtctggaccctggggggagacaactcaaggtgagggaccgcaactttcagctccgtcaaaacctgtatctcgtcggcttcggcaaggctgtcctgggaatggcagctgcagccgaggaactacttggacagcacctggtgcagggcgtcatctccgtgcccaagggcattcgcgcagctatggaacgtgcaggtaaacaggaaatgctccttaagccccactctcgggttcaggtctttgagggagcagaggataatctgcccgaccgggacgccttgcgtgccgccctcgccattcagcagctagcggaaggcctgaccgctgatgacttgctgttggtgctcatcagtgggggagagccccaccctgttagatgtgggggaggtccatgtgggggcgattgtcaatggccgcatagagggcagtttccgcaatgtgctcgcttacctgcttacccacagtcactgcgtcctccgtgttctcccgccaccttctgcgaggactgtgcggtctctgggcggctttag

SEQ ID NO: 56653 - DNA, 618 bp, Artificial Sequence
  derived and/or modified sequence
atggccgccgccctgcaggtgctgccccggctggcccgggcccccctccacccactactttggcgcggatctgtcgcacgattggcttcatcaatggccctcgcggaacaggcaaggcaacttttcgagtccgccgtaggggcagtcctccccgggccaatgctgcatagggcactgtccctcgatcccggtggccgccagctgaaagttcgcgataggaactttcagttgcgccaaaatctttatctggtgggctttggcaaagccgtgctgggcatggccgccgctgccgaggagcttttgggtcaacacctcgtccagggcgtcattagcgttcctaaggggatcagggcggcaatggaaagagccggaaagcaagagatgctgttaaagccccattctagagtgcaagtctttgaaggagccgaggataacttgcccgacagagacgccctgcgggcggccctggcaatccagcagctcgctgaaggcttgacggctgatgatctcctgctcgtcctgatctctgggtggggaacacctgccgcgcatcgcgacgaccggtaccagtgccatgggcacccccccctagtgcccgccgccagcgtcatggcatag

SEQ ID NO: 56654 - DNA, 705 bp, Artificial Sequence
  derived and/or modified sequence
atggccgccgccctgcaggtgctgccccggctggcccgggcccccctccacccgctcctatggaggggttccgtggctcgcctggcctcaagtatggccttggcagagcaggctagacagctttttgagtccgcagttggggcagtgctgcccgggcctatgctgcatagagctttaagcctggacccaggcggacgccagcttaaggttcgggacaggaatttccaactgcggcaaaacctgtatctggtgggctttggaaaggctgttttagggatggccgctgccgcagaggagctgctcggtcagcacctagttcagggtgttattagtgttccaaagggcatacgagctgctatggaacgagccggaaagcaggagatgcttctcaagccgcactcccgggtgcaggtgttcgaaggtgccgaagataacctgcctgaccgtgatgctttaagggcagctctagccatccagcagctcgcggaaggtttaaccgcagatgacctgctactggtgttgataagcggtggggaacctcatcccgtgcgttgcggaggcggaccctgcggcggggactgtcaatggccccaccgggggcagtttccacagtgcgccagacttccagcatatccacagtccctgaggcccccttgttcgcccgccacgttctgtgaggactgcgccgtgtctggcagactctag

SEQ ID NO: 56655 - DNA, 705 bp, Artificial Sequence
  derived and/or modified sequence
atggcagccgcactgcaagtgttgcccaggcttgcaagagctcccctccatcccctcttatggcggggaagtgttgccagattagcctcaagcatggctcttgcagagcaagccagacagctgttcgaaagcgccgtgggagccgtgctccctggccctatgttacaccgcgctctgagtcttgacccaggagggagacagctgaaggtgagagatagaaactttcagctgcgccagaacttgtatttggttgggttcggaaaagccgtgttaggcatggccgcagccgcagaggaactgttaggccaacatcttgttcaaggcgtgatcagcgtacctaaaggaattcgagctgctatggagcgggctggaaaacaagaaatgctgctaaaaccccactctcgagtgcaggttttcgagggagccgaagacaacctcccagatcgggacgccctccgcgctgccctggcaattcagcaactggccgagggcctgacagctgatgacctcctgctggtcctgatcagcgggggagagccccatcctgtgcggtgcggcggaggtccatgcggcggagattgccagtggcctcaccggggtcagttcccacaatgcgccagactgcctgcatacccacagagtttgcgccctccttgctcacctgccactttttgcgaggattgtgcagtgtctggtcggctgtag

SEQ ID NO: 56656 - DNA, 618 bp, Artificial Sequence
  derived and/or modified sequence
atggctgcggcattgcaggttctgccacggctggcacgggctccactgcaccctttgctgtggcggggatctgttgccagacttgcctctagcatggccctcgcagaacaagccagacaactctttgaatcagcagttggcgctgtgttacctggtccaatgctacatcgagccctgagcctggatcctgggggaagacagctgaaagttagggataggaacttccaactaaggcagaacttgtacctggttggcttcggaaaagccgtgctggggatggcggctgctgccgaggagttactaggccagcaccttgtccaaggggtcatatccgttccaaaaggtattagggctgccatggagagagctggaaaacaggagatgctgctcaaaccccattctcgcgtccaggtttttgagggtgccgaggataacttaccagacagagatgccttgagggcagctctggccattcagcagctggctgaagggctgacagctgacgaccttctactcgtactgattagtggatggggaacccctgccgcacaccgcgacgaccggtatcagtgtcacggtcacccaccactggttccagccgcatctgtgatggcatag

SEQ ID NO: 56657 - DNA, 705 bp, Artificial Sequence
  derived and/or modified sequence
atggctgcagctctccaggtgctgcccaggctcgcccgagcccctctgcacccactgctttggcggggttctgtcgctcgcttggcatcttctatggccctggctgaacaggcgcgacagctgttcgagtccgccgttggcgcagttctccctggacccatgttacatagagctctgtccctagatcctggaggccgtcagcttaaagtgcgagaccgaaacttccagttgaggcagaacctctatcttgtggggttcggaaaggcagtccttggcatggcggcagccgctgaagagctcttgggacagcacctagtgcagggggtgatttccgtacctaagggcatccgcgctgccatggagagggcgggaaaacaagagatgttgttgaagccccattcacgggtccaggtgttcgagggtgcagaagataacctgcctgatagagacgcgttgcgcgcagcccttgccatccagcagctggctgaggggctgaccgcagacgaccttctcttggtgctgatctcagggggagaaccacacccagttcggtgtggtggaggcccttgcggcggagattgccagtggccccatcgcggacaatttccgcagtgtgcccgtttgcctgcttatccccagtccctgagaccgccatgtagccctgctacattctgtgaggattgcgctgtttccggacgtctgtag

SEQ ID NO: 56658 - DNA, 705 bp, Artificial Sequence
  derived and/or modified sequence
atggccgccgccctgcaggtgctgcccagactggccagagcccccctgcaccccctgctgtggagaggcagcgtggccagactggccagcagcatggccctggccgagcaggccagacagctgttcgagagcgccgtgggcgccgtgctgcccggccccatgctgcacagagccctgagcctggaccccggcggcagacagctgaaggtgagagacagaaacttccagctgagacagaacctgtacctggtgggcttcggcaaggccgtgctgggcatggccgccgccgccgaggagctgctgggccagcacctggtgcagggcgtgatcagcgtgcccaagggcatcagagccgccatggagagagccggcaagcaggagatgctgctgaagccccacagcagagtgcaggtgttcgagggcgccgaggacaacctgcccgacagagacgccctgagagccgccctggccatccagcagctggccgagggcctgaccgccgacgacctgctgctggtgctgatcagcggcggcgagccccaccccgtgagatgcggcggcggcccctgcggcggcgactgccagtggccccacagaggccagttcccccagtgcgccagactgcccgcctacccccagagcctgagacccccctgcagccccgccaccttctgcgaggactgcgccgtgagcggcagactgtag

SEQ ID NO: 56659 - DNA, 618 bp, Artificial Sequence
  derived and/or modified sequence
atggccgccgccctgcaggtgctgcccagactggccagagcccccctgcaccccctgctgtggagaggcagcgtggccagactggccagcagcatggccctggccgagcaggccagacagctgttcgagagcgccgtgggcgccgtgctgcccggccccatgctgcacagagccctgagcctggaccccggcggcagacagctgaaggtgagagacagaaacttccagctgagacagaacctgtacctggtgggcttcggcaaggccgtgctgggcatggccgccgccgccgaggagctgctgggccagcacctggtgcagggcgtgatcagcgtgcccaagggcatcagagccgccatggagagagccggcaagcaggagatgctgctgaagccccacagcagagtgcaggtgttcgagggcgccgaggacaacctgcccgacagagacgccctgagagccgccctggccatccagcagctggccgagggcctgaccgccgacgacctgctgctggtgctgatcagcggctggggcacccccgccgcccacagagacgacagataccagtgccacggccacccccccctggtgcccgccgccagcgtgatggcctag

SEQ ID NO: 56660 - protein, 2216 aa, Artificial Sequence
  derived and/or modified sequence
MWGLLIWTLLALHQIRAARAQDDVSPYFKTEPVRTQVHLEGNRLVLTCMAEGSWPLEFKWLHNNRELTKFSLEYRYMITSLDRTHAGFYRCIVRNRMGALLQRQTEVQVAYMGSFEEGEKHQSVSHGEAAVIRAPRIASFPQPQVTWFRDGRKIPPSSRIAITLENTLVILSTVAPDAGRYYVQAVNDKNGDNKTSQPITLTVENVGGPADPIAPTIIIPPKNTSVVAGTSEVTLECVANARPLIKLHIIWKKDGVLLSGGISDHNRRLTIPNPTGSDAGYYECEAVLRSSSVPSVVRGAYLSVLEPPQFVKEPERHITAEMEKVVDIPCQAKGVPPPSITWYKDAAVVEVEKLTRFRQRNDGGLQISGLVPDDTGMFQCFARNAAGEVQTSTYLAVTSIAPNITRGPLDSTVIDGMSVVLACETSGAPRPAITWQKGERILASGSVQLPRFTPLESGSLLISPTHISDAGTYTCLATNSRGVDEASADLVVWARTRITKPPQDQSVIKGTQASMVCGVTHDPRVTIRYIWEKDGATLGTESHPRIRLDRNGSLHISQTWSGDIGTYTCRVISAGGNDSRSAHLRVRQLPHAPEHPVATLSTVERRAINLTWTKPFDGNSPLIRYILEMSENNAPWTVLLASVDPKATSVTVKGLVPARSYQFRLCAVNDVGKGQFSKDTERVSLPEEPPTAPPQNVIASGRTNQSIMIQWQPPPESHQNGILKGYIIRYCLAGLPVGYQFKNITDADVNNLLLEDLIIWTNYEIEVAAYNSAGLGVYSSKVTEWTLQGVPTVPPGNVHAEATNSTTIRFTWNAPSPQFINGINQGYKLIAWEPEQEEEVTMVTARPNFQDSIHVGFVSGLKKFTEYFTSVLCFTTPGDGPRSTPQLVRTHEDVPGPVGHLSFSEILDTSLKVSWQEPGEKNGILTGYRISWEEYNRTNTRVTHYLPNVTLEYRVTGLTALTTYTIEVAAMTSKGQGQVSASTISSGVPPELPGPPTNLGISNIGPRSVTLQFRPGYDGKTSISRWLVEAQVGVVGEGEEWLLIHQLSNEPDARSMEVPDLNPFTCYSFRMRQVNIVGTSPPSQPSRKIQTLQAPPDMAPANVSLRTASETSLWLRWMPLPEMEYNGNPESVGYKIKYSRSDGHGKTLSHVVQDRVERDYTIEDLEEWTEYRVQVQAFNAIGSGPWSQTVVGRTRESVPSSGPTNVSALATTSSSMLVRWSEVPEADRNGLVLGYKVMYKEKDSDTQPRFWLVEGNSSRSAQLTGLGKYVLYEVQVLAFTRIGDGSPSHPPILERTLDDVPGPPMGILFPEVRTTSVRLIWQPPAAPNGIILAYQITHRLNTTTANTATVEVLAPSARQYTATGLKPESVYLFRITAQTRKGWGEAAEALVVTTEKRDRPQPPSRPMVQQEDVRARSVLLSWEPGSDGLSPVRYYTIQTRELPSGRWALHSASVSHNASSFIVDRLKPFTSYKFRVKATNDIGDSEFSEESESLTTLQAAPDEAPTILSVTPHTTTSVLIRWQPPAEDKINGILLGFRIRYRELLYEGLRGFTLRGINNPGATWAELTSMYSMRNLSRPSLTQYELDNLNKHRRYEIRMSVYNAVGEGPSSPPQEVFVGEAVPTAAPRNVVVHGATATQLDVTWEPPPLDSQNGDIQGYKIYFWEAQRGNLTERVKTLFLAENSVKLKNLTGYTAYMVSVAAFNAAGDGPRSTPTQGQTQQAAPSAPSSVKFSELTTTSVNVSWEAPQFPNGILEGYRLVYEPCSPVDGVSKIVTVDVKGNSPLWLKVKDLAEGVTYRFRIRAKTFTYGPEIEANVTTGPGEGAPGPPGVPIIVRYSSAIAIHWSSGDPGKGPITRYVIEARPSDEGLWDILIKDIPKEVSSYTFSMDILKPGVSYDFRVIAVNDYGFGTPSSPSQSVPAQKANPFYEEWWFLVVIALVGLIFILLLVFVLIIRGQSKKYAKKTDSGNSAKSGALGHSEMMSLDESSFPALELNNRRLSVKNSFCRKNGLYTRSPPRPSPGSLHYSDEDVTKYNDLIPAESSSLTEKPSEISDSQGSDSEYEVDSNHQKAHSFVNHYISDPTYYNSWRRQQKGISRAQAYSYTESDSGEPDHTTVTNSTSTQQGSLFRPKASRTPTPQNPPNPPSQQSTLYRPPSKAGVQKEGENRERMCVASSSSALRWWGSLLPWELHGAGEVAVSLLWTRSGAGIWRERGSGG

SEQ ID NO: 56661 - protein, 2172 aa, Artificial Sequence
  derived and/or modified sequence
MWGLLIWTLLALHQIRAARAQDDVSPYFKTEPVRTQVHLEGNRLVLTCMAEGSWPLEFKWLHNNRELTKFSLEYRYMITSLDRTHAGFYRCIVRNRMGALLQRQTEVQVAYMGSFEEGEKHQSVSHGEAAVIRAPRIASFPQPQVTWFRDGRKIPPSSRIAITLENTLVILSTVAPDAGRYYVQAVNDKNGDNKTSQPITLTVENVGGPADPIAPTIIIPPKNTSVVAGTSEVTLECVANARPLIKLHIIWKKDGVLLSGGISDHNRRLTIPNPTGSDAGYYECEAVLRSSSVPSVVRGAYLSVLEPPQFVKEPERHITAEMEKVVDIPCQAKGVPPPSITWYKDAAVVEVEKLTRFRQRNDGGLQISGLVPDDTGMFQCFARNAAGEVQTSTYLAVTSIAPNITRGPLDSTVIDGMSVVLACETSGAPRPAITWQKGERILASGSVQLPRFTPLESGSLLISPTHISDAGTYTCLATNSRGVDEASADLVVWARTRITKPPQDQSVIKGTQASMVCGVTHDPRVTIRYIWEKDGATLGTESHPRIRLDRNGSLHISQTWSGDIGTYTCRVISAGGNDSRSAHLRVRQLPHAPEHPVATLSTVERRAINLTWTKPFDGNSPLIRYILEMSENNAPWTVLLASVDPKATSVTVKGLVPARSYQFRLCAVNDVGKGQFSKDTERVSLPEEPPTAPPQNVIASGRTNQSIMIQWQPPPESHQNGILKGYIIRYCLAGLPVGYQFKNITDADVNNLLLEDLIIWTNYEIEVAAYNSAGLGVYSSKVTEWTLQGVPTVPPGNVHAEATNSTTIRFTWNAPSPQFINGINQGYKLIAWEPEQEEEVTMVTARPNFQDSIHVGFVSGLKKFTEYFTSVLCFTTPGDGPRSTPQLVRTHEDVPGPVGHLSFSEILDTSLKVSWQEPGEKNGILTGYRISWEEYNRTNTRVTHYLPNVTLEYRVTGLTALTTYTIEVAAMTSKGQGQVSASTISSGVPPELPGPPTNLGISNIGPRSVTLQFRPGYDGKTSISRWLVEAQVGVVGEGEEWLLIHQLSNEPDARSMEVPDLNPFTCYSFRMRQVNIVGTSPPSQPSRKIQTLQAPPDMAPANVSLRTASETSLWLRWMPLPEMEYNGNPESVGYKIKYSRSDGHGKTLSHVVQDRVERDYTIEDLEEWTEYRVQVQAFNAIGSGPWSQTVVGRTRESVPSSGPTNVSALATTSSSMLVRWSEVPEADRNGLVLGYKVMYKEKDSDTQPRFWLVEGNSSRSAQLTGLGKYVLYEVQVLAFTRIGDGSPSHPPILERTLDDVPGPPMGILFPEVRTTSVRLIWQPPAAPNGIILAYQITHRLNTTTANTATVEVLAPSARQYTATGLKPESVYLFRITAQTRKGWGEAAEALVVTTEKRDRPQPPSRPMVQQEDVRARSVLLSWEPGSDGLSPVRYYTIQTRELPSGRWALHSASVSHNASSFIVDRLKPFTSYKFRVKATNDIGDSEFSEESESLTTLQAAPDEAPTILSVTPHTTTSVLIRWQPPAEDKINGILLGFRIRYRELLYEGLRGFTLRGINNPGATWAELTSMYSMRNLSRPSLTQYELDNLNKHRRYEIRMSVYNAVGEGPSSPPQEVFVGEAVPTAAPRNVVVHGATATQLDVTWEPPPLDSQNGDIQGYKIYFWEAQRGNLTERVKTLFLAENSVKLKNLTGYTAYMVSVAAFNAAGDGPRSTPTQGQTQQAAPSAPSSVKFSELTTTSVNVSWEAPQFPNGILEGYRLVYEPCSPVDGVSKIVTVDVKGNSPLWLKVKDLAEGVTYRFRIRAKTFTYGPEIEANVTTGPGEGAPGPPGVPIIVRYSSAIAIHWSSGDPGKGPITRYVIEARPSDEGLWDILIKDIPKEVSSYTFSMDILKPGVSYDFRVIAVNDYGFGTPSSPSQSVPAQKANPFYEEWWFLVVIALVGLIFILLLVFVLIIRGQSKKYAKKTDSGNSAKSGALGHSEMMSLDESSFPALELNNRRLSVKNSFCRKNGLYTRSPPRPSPGSLHYSDEDVTKYNDLIPAESSSLTEKPSEISDSQGSDSEYEVDSNHQKAHSFVNHYISDPTYYNSWRRQQKGISRAQAYSYTESDSGEPDHTTVTNSTSTQQGSLFRPKASRTPTPQNPPNPPSQQSTLYRPPSSLAPGSRAPIAGFSSFV

SEQ ID NO: 56662 - DNA, 6651 bp, Artificial Sequence
  derived and/or modified sequence
atgtggggcctgctgatctggaccctgctggccctgcaccagatcagagccgccagagcccaggacgacgtgagcccctacttcaagaccgagcccgtgagaacccaggtgcacctggagggcaacagactggtgctgacctgcatggccgagggcagctggcccctggagttcaagtggctgcacaacaacagagagctgaccaagttcagcctggagtacagatacatgatcaccagcctggacagaacccacgccggcttctacagatgcatcgtgagaaacagaatgggcgccctgctgcagagacagaccgaggtgcaggtggcctacatgggcagcttcgaggagggcgagaagcaccagagcgtgagccacggcgaggccgccgtgatcagagcccccagaatcgccagcttcccccagccccaggtgacctggttcagagacggcagaaagatcccccccagcagcagaatcgccatcaccctggagaacaccctggtgatcctgagcaccgtggcccccgacgccggcagatactacgtgcaggccgtgaacgacaagaacggcgacaacaagaccagccagcccatcaccctgaccgtggagaacgtgggcggccccgccgaccccatcgcccccaccatcatcatcccccccaagaacaccagcgtggtggccggcaccagcgaggtgaccctggagtgcgtggccaacgccagacccctgatcaagctgcacatcatctggaagaaggacggcgtgctgctgagcggcggcatcagcgaccacaacagaagactgaccatccccaaccccaccggcagcgacgccggctactacgagtgcgaggccgtgctgagaagcagcagcgtgcccagcgtggtgagaggcgcctacctgagcgtgctggagcccccccagttcgtgaaggagcccgagagacacatcaccgccgagatggagaaggtggtggacatcccctgccaggccaagggcgtgcccccccccagcatcacctggtacaaggacgccgccgtggtggaggtggagaagctgaccagattcagacagagaaacgacggcggcctgcagatcagcggcctggtgcccgacgacaccggcatgttccagtgcttcgccagaaacgccgccggcgaggtgcagaccagcacctacctggccgtgaccagcatcgcccccaacatcaccagaggccccctggacagcaccgtgatcgacggcatgagcgtggtgctggcctgcgagaccagcggcgcccccagacccgccatcacctggcagaagggcgagagaatcctggccagcggcagcgtgcagctgcccagattcacccccctggagagcggcagcctgctgatcagccccacccacatcagcgacgccggcacctacacctgcctggccaccaacagcagaggcgtggacgaggccagcgccgacctggtggtgtgggccagaaccagaatcaccaagcccccccaggaccagagcgtgatcaagggcacccaggccagcatggtgtgcggcgtgacccacgaccccagagtgaccatcagatacatctgggagaaggacggcgccaccctgggcaccgagagccaccccagaatcagactggacagaaacggcagcctgcacatcagccagacctggagcggcgacatcggcacctacacctgcagagtgatcagcgccggcggcaacgacagcagaagcgcccacctgagagtgagacagctgccccacgcccccgagcaccccgtggccaccctgagcaccgtggagagaagagccatcaacctgacctggaccaagcccttcgacggcaacagccccctgatcagatacatcctggagatgagcgagaacaacgccccctggaccgtgctgctggccagcgtggaccccaaggccaccagcgtgaccgtgaagggcctggtgcccgccagaagctaccagttcagactgtgcgccgtgaacgacgtgggcaagggccagttcagcaaggacaccgagagagtgagcctgcccgaggagccccccaccgcccccccccagaacgtgatcgccagcggcagaaccaaccagagcatcatgatccagtggcagcccccccccgagagccaccagaacggcatcctgaagggctacatcatcagatactgcctggccggcctgcccgtgggctaccagttcaagaacatcaccgacgccgacgtgaacaacctgctgctggaggacctgatcatctggaccaactacgagatcgaggtggccgcctacaacagcgccggcctgggcgtgtacagcagcaaggtgaccgagtggaccctgcagggcgtgcccaccgtgccccccggcaacgtgcacgccgaggccaccaacagcaccaccatcagattcacctggaacgcccccagcccccagttcatcaacggcatcaaccagggctacaagctgatcgcctgggagcccgagcaggaggaggaggtgaccatggtgaccgccagacccaacttccaggacagcatccacgtgggcttcgtgagcggcctgaagaagttcaccgagtacttcaccagcgtgctgtgcttcaccacccccggcgacggccccagaagcaccccccagctggtgagaacccacgaggacgtgcccggccccgtgggccacctgagcttcagcgagatcctggacaccagcctgaaggtgagctggcaggagcccggcgagaagaacggcatcctgaccggctacagaatcagctgggaggagtacaacagaaccaacaccagagtgacccactacctgcccaacgtgaccctggagtacagagtgaccggcctgaccgccctgaccacctacaccatcgaggtggccgccatgaccagcaagggccagggccaggtgagcgccagcaccatcagcagcggcgtgccccccgagctgcccggcccccccaccaacctgggcatcagcaacatcggccccagaagcgtgaccctgcagttcagacccggctacgacggcaagaccagcatcagcagatggctggtggaggcccaggtgggcgtggtgggcgagggcgaggagtggctgctgatccaccagctgagcaacgagcccgacgccagaagcatggaggtgcccgacctgaaccccttcacctgctacagcttcagaatgagacaggtgaacatcgtgggcaccagcccccccagccagcccagcagaaagatccagaccctgcaggccccccccgacatggcccccgccaacgtgagcctgagaaccgccagcgagaccagcctgtggctgagatggatgcccctgcccgagatggagtacaacggcaaccccgagagcgtgggctacaagatcaagtacagcagaagcgacggccacggcaagaccctgagccacgtggtgcaggacagagtggagagagactacaccatcgaggacctggaggagtggaccgagtacagagtgcaggtgcaggccttcaacgccatcggcagcggcccctggagccagaccgtggtgggcagaaccagagagagcgtgcccagcagcggccccaccaacgtgagcgccctggccaccaccagcagcagcatgctggtgagatggagcgaggtgcccgaggccgacagaaacggcctggtgctgggctacaaggtgatgtacaaggagaaggacagcgacacccagcccagattctggctggtggagggcaacagcagcagaagcgcccagctgaccggcctgggcaagtacgtgctgtacgaggtgcaggtgctggccttcaccagaatcggcgacggcagccccagccacccccccatcctggagagaaccctggacgacgtgcccggcccccccatgggcatcctgttccccgaggtgagaaccaccagcgtgagactgatctggcagccccccgccgcccccaacggcatcatcctggcctaccagatcacccacagactgaacaccaccaccgccaacaccgccaccgtggaggtgctggcccccagcgccagacagtacaccgccaccggcctgaagcccgagagcgtgtacctgttcagaatcaccgcccagaccagaaagggctggggcgaggccgccgaggccctggtggtgaccaccgagaagagagacagaccccagccccccagcagacccatggtgcagcaggaggacgtgagagccagaagcgtgctgctgagctgggagcccggcagcgacggcctgagccccgtgagatactacaccatccagaccagagagctgcccagcggcagatgggccctgcacagcgccagcgtgagccacaacgccagcagcttcatcgtggacagactgaagcccttcaccagctacaagttcagagtgaaggccaccaacgacatcggcgacagcgagttcagcgaggagagcgagagcctgaccaccctgcaggccgcccccgacgaggcccccaccatcctgagcgtgaccccccacaccaccaccagcgtgctgatcagatggcagccccccgccgaggacaagatcaacggcatcctgctgggcttcagaatcagatacagagagctgctgtacgagggcctgagaggcttcaccctgagaggcatcaacaaccccggcgccacctgggccgagctgaccagcatgtacagcatgagaaacctgagcagacccagcctgacccagtacgagctggacaacctgaacaagcacagaagatacgagatcagaatgagcgtgtacaacgccgtgggcgagggccccagcagccccccccaggaggtgttcgtgggcgaggccgtgcccaccgccgcccccagaaacgtggtggtgcacggcgccaccgccacccagctggacgtgacctgggagcccccccccctggacagccagaacggcgacatccagggctacaagatctacttctgggaggcccagagaggcaacctgaccgagagagtgaagaccctgttcctggccgagaacagcgtgaagctgaagaacctgaccggctacaccgcctacatggtgagcgtggccgccttcaacgccgccggcgacggccccagaagcacccccacccagggccagacccagcaggccgcccccagcgcccccagcagcgtgaagttcagcgagctgaccaccaccagcgtgaacgtgagctgggaggccccccagttccccaacggcatcctggagggctacagactggtgtacgagccctgcagccccgtggacggcgtgagcaagatcgtgaccgtggacgtgaagggcaacagccccctgtggctgaaggtgaaggacctggccgagggcgtgacctacagattcagaatcagagccaagaccttcacctacggccccgagatcgaggccaacgtgaccaccggccccggcgagggcgcccccggcccccccggcgtgcccatcatcgtgagatacagcagcgccatcgccatccactggagcagcggcgaccccggcaagggccccatcaccagatacgtgatcgaggccagacccagcgacgagggcctgtgggacatcctgatcaaggacatccccaaggaggtgagcagctacaccttcagcatggacatcctgaagcccggcgtgagctacgacttcagagtgatcgccgtgaacgactacggcttcggcacccccagcagccccagccagagcgtgcccgcccagaaggccaaccccttctacgaggagtggtggttcctggtggtgatcgccctggtgggcctgatcttcatcctgctgctggtgttcgtgctgatcatcagaggccagagcaagaagtacgccaagaagaccgacagcggcaacagcgccaagagcggcgccctgggccacagcgagatgatgagcctggacgagagcagcttccccgccctggagctgaacaacagaagactgagcgtgaagaacagcttctgcagaaagaacggcctgtacaccagaagcccccccagacccagccccggcagcctgcactacagcgacgaggacgtgaccaagtacaacgacctgatccccgccgagagcagcagcctgaccgagaagcccagcgagatcagcgacagccagggcagcgacagcgagtacgaggtggacagcaaccaccagaaggcccacagcttcgtgaaccactacatcagcgaccccacctactacaacagctggagaagacagcagaagggcatcagcagagcccaggcctacagctacaccgagagcgacagcggcgagcccgaccacaccaccgtgaccaacagcaccagcacccagcagggcagcctgttcagacccaaggccagcagaacccccaccccccagaacccccccaacccccccagccagcagagcaccctgtacagaccccccagcaaggccggcgtgcagaaggagggcgagaacagagagagaatgtgcgtggccagcagcagcagcgccctgagatggtggggcagcctgctgccctgggagctgcacggcgccggcgaggtggccgtgagcctgctgtggaccagaagcggcgccggcatctggagagagagaggcagcggcggctag

SEQ ID NO: 56663 - DNA, 6519 bp, Artificial Sequence
  derived and/or modified sequence
atgtggggcctgctgatctggaccctgctggccctgcaccagatcagagccgccagagcccaggacgacgtgagcccctacttcaagaccgagcccgtgagaacccaggtgcacctggagggcaacagactggtgctgacctgcatggccgagggcagctggcccctggagttcaagtggctgcacaacaacagagagctgaccaagttcagcctggagtacagatacatgatcaccagcctggacagaacccacgccggcttctacagatgcatcgtgagaaacagaatgggcgccctgctgcagagacagaccgaggtgcaggtggcctacatgggcagcttcgaggagggcgagaagcaccagagcgtgagccacggcgaggccgccgtgatcagagcccccagaatcgccagcttcccccagccccaggtgacctggttcagagacggcagaaagatcccccccagcagcagaatcgccatcaccctggagaacaccctggtgatcctgagcaccgtggcccccgacgccggcagatactacgtgcaggccgtgaacgacaagaacggcgacaacaagaccagccagcccatcaccctgaccgtggagaacgtgggcggccccgccgaccccatcgcccccaccatcatcatcccccccaagaacaccagcgtggtggccggcaccagcgaggtgaccctggagtgcgtggccaacgccagacccctgatcaagctgcacatcatctggaagaaggacggcgtgctgctgagcggcggcatcagcgaccacaacagaagactgaccatccccaaccccaccggcagcgacgccggctactacgagtgcgaggccgtgctgagaagcagcagcgtgcccagcgtggtgagaggcgcctacctgagcgtgctggagcccccccagttcgtgaaggagcccgagagacacatcaccgccgagatggagaaggtggtggacatcccctgccaggccaagggcgtgcccccccccagcatcacctggtacaaggacgccgccgtggtggaggtggagaagctgaccagattcagacagagaaacgacggcggcctgcagatcagcggcctggtgcccgacgacaccggcatgttccagtgcttcgccagaaacgccgccggcgaggtgcagaccagcacctacctggccgtgaccagcatcgcccccaacatcaccagaggccccctggacagcaccgtgatcgacggcatgagcgtggtgctggcctgcgagaccagcggcgcccccagacccgccatcacctggcagaagggcgagagaatcctggccagcggcagcgtgcagctgcccagattcacccccctggagagcggcagcctgctgatcagccccacccacatcagcgacgccggcacctacacctgcctggccaccaacagcagaggcgtggacgaggccagcgccgacctggtggtgtgggccagaaccagaatcaccaagcccccccaggaccagagcgtgatcaagggcacccaggccagcatggtgtgcggcgtgacccacgaccccagagtgaccatcagatacatctgggagaaggacggcgccaccctgggcaccgagagccaccccagaatcagactggacagaaacggcagcctgcacatcagccagacctggagcggcgacatcggcacctacacctgcagagtgatcagcgccggcggcaacgacagcagaagcgcccacctgagagtgagacagctgccccacgcccccgagcaccccgtggccaccctgagcaccgtggagagaagagccatcaacctgacctggaccaagcccttcgacggcaacagccccctgatcagatacatcctggagatgagcgagaacaacgccccctggaccgtgctgctggccagcgtggaccccaaggccaccagcgtgaccgtgaagggcctggtgcccgccagaagctaccagttcagactgtgcgccgtgaacgacgtgggcaagggccagttcagcaaggacaccgagagagtgagcctgcccgaggagccccccaccgcccccccccagaacgtgatcgccagcggcagaaccaaccagagcatcatgatccagtggcagcccccccccgagagccaccagaacggcatcctgaagggctacatcatcagatactgcctggccggcctgcccgtgggctaccagttcaagaacatcaccgacgccgacgtgaacaacctgctgctggaggacctgatcatctggaccaactacgagatcgaggtggccgcctacaacagcgccggcctgggcgtgtacagcagcaaggtgaccgagtggaccctgcagggcgtgcccaccgtgccccccggcaacgtgcacgccgaggccaccaacagcaccaccatcagattcacctggaacgcccccagcccccagttcatcaacggcatcaaccagggctacaagctgatcgcctgggagcccgagcaggaggaggaggtgaccatggtgaccgccagacccaacttccaggacagcatccacgtgggcttcgtgagcggcctgaagaagttcaccgagtacttcaccagcgtgctgtgcttcaccacccccggcgacggccccagaagcaccccccagctggtgagaacccacgaggacgtgcccggccccgtgggccacctgagcttcagcgagatcctggacaccagcctgaaggtgagctggcaggagcccggcgagaagaacggcatcctgaccggctacagaatcagctgggaggagtacaacagaaccaacaccagagtgacccactacctgcccaacgtgaccctggagtacagagtgaccggcctgaccgccctgaccacctacaccatcgaggtggccgccatgaccagcaagggccagggccaggtgagcgccagcaccatcagcagcggcgtgccccccgagctgcccggcccccccaccaacctgggcatcagcaacatcggccccagaagcgtgaccctgcagttcagacccggctacgacggcaagaccagcatcagcagatggctggtggaggcccaggtgggcgtggtgggcgagggcgaggagtggctgctgatccaccagctgagcaacgagcccgacgccagaagcatggaggtgcccgacctgaaccccttcacctgctacagcttcagaatgagacaggtgaacatcgtgggcaccagcccccccagccagcccagcagaaagatccagaccctgcaggccccccccgacatggcccccgccaacgtgagcctgagaaccgccagcgagaccagcctgtggctgagatggatgcccctgcccgagatggagtacaacggcaaccccgagagcgtgggctacaagatcaagtacagcagaagcgacggccacggcaagaccctgagccacgtggtgcaggacagagtggagagagactacaccatcgaggacctggaggagtggaccgagtacagagtgcaggtgcaggccttcaacgccatcggcagcggcccctggagccagaccgtggtgggcagaaccagagagagcgtgcccagcagcggccccaccaacgtgagcgccctggccaccaccagcagcagcatgctggtgagatggagcgaggtgcccgaggccgacagaaacggcctggtgctgggctacaaggtgatgtacaaggagaaggacagcgacacccagcccagattctggctggtggagggcaacagcagcagaagcgcccagctgaccggcctgggcaagtacgtgctgtacgaggtgcaggtgctggccttcaccagaatcggcgacggcagccccagccacccccccatcctggagagaaccctggacgacgtgcccggcccccccatgggcatcctgttccccgaggtgagaaccaccagcgtgagactgatctggcagccccccgccgcccccaacggcatcatcctggcctaccagatcacccacagactgaacaccaccaccgccaacaccgccaccgtggaggtgctggcccccagcgccagacagtacaccgccaccggcctgaagcccgagagcgtgtacctgttcagaatcaccgcccagaccagaaagggctggggcgaggccgccgaggccctggtggtgaccaccgagaagagagacagaccccagccccccagcagacccatggtgcagcaggaggacgtgagagccagaagcgtgctgctgagctgggagcccggcagcgacggcctgagccccgtgagatactacaccatccagaccagagagctgcccagcggcagatgggccctgcacagcgccagcgtgagccacaacgccagcagcttcatcgtggacagactgaagcccttcaccagctacaagttcagagtgaaggccaccaacgacatcggcgacagcgagttcagcgaggagagcgagagcctgaccaccctgcaggccgcccccgacgaggcccccaccatcctgagcgtgaccccccacaccaccaccagcgtgctgatcagatggcagccccccgccgaggacaagatcaacggcatcctgctgggcttcagaatcagatacagagagctgctgtacgagggcctgagaggcttcaccctgagaggcatcaacaaccccggcgccacctgggccgagctgaccagcatgtacagcatgagaaacctgagcagacccagcctgacccagtacgagctggacaacctgaacaagcacagaagatacgagatcagaatgagcgtgtacaacgccgtgggcgagggccccagcagccccccccaggaggtgttcgtgggcgaggccgtgcccaccgccgcccccagaaacgtggtggtgcacggcgccaccgccacccagctggacgtgacctgggagcccccccccctggacagccagaacggcgacatccagggctacaagatctacttctgggaggcccagagaggcaacctgaccgagagagtgaagaccctgttcctggccgagaacagcgtgaagctgaagaacctgaccggctacaccgcctacatggtgagcgtggccgccttcaacgccgccggcgacggccccagaagcacccccacccagggccagacccagcaggccgcccccagcgcccccagcagcgtgaagttcagcgagctgaccaccaccagcgtgaacgtgagctgggaggccccccagttccccaacggcatcctggagggctacagactggtgtacgagccctgcagccccgtggacggcgtgagcaagatcgtgaccgtggacgtgaagggcaacagccccctgtggctgaaggtgaaggacctggccgagggcgtgacctacagattcagaatcagagccaagaccttcacctacggccccgagatcgaggccaacgtgaccaccggccccggcgagggcgcccccggcccccccggcgtgcccatcatcgtgagatacagcagcgccatcgccatccactggagcagcggcgaccccggcaagggccccatcaccagatacgtgatcgaggccagacccagcgacgagggcctgtgggacatcctgatcaaggacatccccaaggaggtgagcagctacaccttcagcatggacatcctgaagcccggcgtgagctacgacttcagagtgatcgccgtgaacgactacggcttcggcacccccagcagccccagccagagcgtgcccgcccagaaggccaaccccttctacgaggagtggtggttcctggtggtgatcgccctggtgggcctgatcttcatcctgctgctggtgttcgtgctgatcatcagaggccagagcaagaagtacgccaagaagaccgacagcggcaacagcgccaagagcggcgccctgggccacagcgagatgatgagcctggacgagagcagcttccccgccctggagctgaacaacagaagactgagcgtgaagaacagcttctgcagaaagaacggcctgtacaccagaagcccccccagacccagccccggcagcctgcactacagcgacgaggacgtgaccaagtacaacgacctgatccccgccgagagcagcagcctgaccgagaagcccagcgagatcagcgacagccagggcagcgacagcgagtacgaggtggacagcaaccaccagaaggcccacagcttcgtgaaccactacatcagcgaccccacctactacaacagctggagaagacagcagaagggcatcagcagagcccaggcctacagctacaccgagagcgacagcggcgagcccgaccacaccaccgtgaccaacagcaccagcacccagcagggcagcctgttcagacccaaggccagcagaacccccaccccccagaacccccccaacccccccagccagcagagcaccctgtacagaccccccagcagcctggcccccggcagcagagcccccatcgccggcttcagcagcttcgtgtag

SEQ ID NO: 56664 - DNA, 6651 bp, Artificial Sequence
  derived and/or modified sequence
atgtgggggctgctcatatggactctgctcgcattgcatcagataagagccgccagagcacaagacgacgtctccccatattttaagacagagcccgtgcgcacacaagtgcacttagagggaaatagattagtcctgacctgcatggcggagggctcctggcctctagagttcaaatggctccataacaatcgggagctgacaaaattctctctggaatatagatacatgattactagcctggacagaactcatgctgggttctataggtgcattgtgagaaatcgaatgggcgccctcttacagaggcaaactgaggtccaggtggcctacatgggatcattcgaagaaggggagaagcatcaaagcgtcagtcatggggaggccgcagttattcgcgcgccacgtatagcatcatttcctcagcctcaggtgacatggttcagagacggcaggaaaattcctccgagtagccggattgcgattacacttgagaatacactggttatcctgagcaccgttgccccagacgccggaaggtattatgtgcaggcggttaacgacaaaaatggcgacaataagacaagccagccaattaccctgaccgttgagaacgtgggcggtcccgctgaccccatcgcacccaccatcatcattcccccaaagaatacatccgtcgtggcaggtacgagcgaggtaacattggagtgtgtggctaacgcccgccctctgatcaagctgcacatcatatggaaaaaagacggagtgcttctgtccggtggaatcagtgatcataatcggcgactaacaatccccaatcccaccggatccgacgcgggctactacgagtgcgaggcagtactacggtccagctctgttccatcggtggtgcggggggcctacctatctgtgctcgagcctcctcagtttgttaaagagcccgaacgacacatcactgctgaaatggagaaagtcgtggatataccgtgtcaggcaaagggagtgcctccaccgtcaatcacctggtataaagacgctgctgtggtcgaggtggagaagctgacacgtttcagacagagaaatgatggggggctgcaaattagtgggttggtccctgatgacacaggaatgttccagtgcttcgctaggaacgccgccggagaggtacaaacaagcacctatctggcggtgacatccattgcacccaacataaccaggggcccattggatagcaccgttatagatggcatgtcagttgtgttagcctgcgaaacgtctggcgcaccacggccagctatcacctggcagaaaggggaaagaatattagcgtcaggatccgtgcagctcccgcggtttactcctctcgagtctggcagcctgctaatcagtcccactcatatctcagatgccgggacgtacacctgcctagccacaaactcccgcggcgtagacgaggcctcagccgacctagtggtgtgggcaaggacccgcatcaccaagccgccacaagatcaatctgtcataaagggcactcaagcatctatggtttgtggcgtgacacacgatccaagggtgaccatccgatatatctgggagaaggacggcgcaacccttggcacagagtcccaccctcgcataagactggaccgcaacggatcactacacatttctcagacctggagtggggatataggtacttatacttgtagagtgatttctgccgggggcaatgatagtcgcagtgcacacctaagagtgcgccagctccctcatgctcccgaacatcccgttgccaccctgagcacagtggaacgccgcgccatcaatctgacctggaccaagccgtttgatggtaacagccctttgatacggtatatcctggagatgtcagagaataacgccccttggactgtattgttggcaagcgtggatcctaaagccacctctgtcacagtaaagggtttggtccctgccaggagttaccaattcagactgtgcgcggtcaatgacgtcgggaagggccagttctccaaggacaccgaacgtgtcagccttccagaggaaccaccaaccgccccaccgcagaatgttatcgccagtggtcgcactaatcaaagtatcatgatccagtggcagccacccccagaatcccaccagaatggcatcctaaagggatatatcatccgctattgcctggccgggctgccggtggggtatcagtttaagaacatcaccgacgcggatgtgaacaatctcttattagaggacctgataatttggactaattacgaaatcgaggttgccgcctacaactcagcaggactgggtgtgtacagcagtaaagtgaccgaatggacccttcaaggcgtacctaccgtgccaccgggaaatgtgcacgctgaagccacgaacagcactaccataaggtttacatggaacgcaccctcacctcagttcattaacgggatcaatcaggggtacaaactgatcgcttgggaaccagagcaggaggaagaggtaacgatggtaacagcccggcccaacttccaggactccatacacgtaggctttgtatcaggcctgaaaaagtttacagaatacttcacaagcgtgctttgcttcacaacacccggtgatggaccccggagcacacctcagctggtgagaacccatgaagatgtgcctgggccggttgggcacctgtccttctctgaaatcctggatacgtccctcaaagtgagctggcaagaaccgggtgagaaaaacggtatactgactggataccgcatttcatgggaagaatacaatagaaccaacaccagggttacacactacctgcccaatgtgactctcgaatatagggtcactggattgaccgctctgaccacttacacaatcgaggtggccgcgatgacctctaaaggtcagggccaagtcagcgcctctactatcagctcaggcgtgccccccgagttgcctggtccacctacaaatttgggcatatccaatattggacctagatctgttaccctacagttccgaccagggtatgatggtaagaccagtattagtaggtggctcgtcgaggcacaggtgggagtagttggggagggggaagagtggcttctgatccatcaactttccaatgagcctgatgcccgctccatggaggtccctgacctgaaccccttcacctgctacagcttccgcatgagacaagtgaatattgtcggcaccagcccaccatcccagccatccagaaaaatccagacacttcaagcaccacctgatatggcccctgccaacgtgagcttgaggaccgcatcagaaacctccctatggttaaggtggatgcctttgccagagatggagtataacggcaatccggagtccgtgggatacaaaattaagtactcacggagcgatggacatgggaagacgctgtcacatgtggtgcaggaccgcgtcgaaagggattatacaattgaggatctggaagaatggacagaatatcgagttcaagtgcaggcattcaacgctatcggcagcgggccttggtctcaaacagtggtgggcaggacacgagagtcagtccctagcagcgggcctaccaatgtttcagctcttgcgacgacgtctagttccatgctggtccgatggtccgaagtgccagaagcggataggaacggattggtgctcggatacaaggtgatgtataaagagaaggactccgatacacagccacgcttctggctggtagaggggaatagttcccggtcagctcagttgacggggctgggcaagtacgtcctgtacgaagtccaggttcttgccttcacccgtattggcgacggctccccatcccatccaccaattctggaacgaacactcgatgatgttcccggcccccccatgggtattctcttccccgaggtgcgaactacaagcgtgcgcttgatctggcaaccacccgccgcccctaatggaatcatcctggcctaccagatcacccataggcttaatactaccaccgccaataccgcaaccgtggaggtgttggctcccagcgcccgacagtatactgccaccggcctgaaacccgagagcgtgtacttgttcagaataacagctcagactagaaaaggatggggcgaggccgcagaggccctcgtcgtcacaactgagaaacgagacagacctcagcccccgtcccggcctatggtgcaacaggaggacgtgcgggctagatccgtgctgctgagttgggaaccagggagcgacggactgtccccggtgcgctactatactattcaaactcgggagttaccctctggtcgctgggccctccattccgcatccgtgtcacataatgcttcaagttttatagtggatagacttaagccctttaccagctataagtttcgggtgaaagcaactaatgatatcggggattccgagttcagcgaagagagcgagtcccttaccacactgcaggcagctcccgacgaggcacccaccatcctgtccgtcacacctcacacgacaactagcgtcttgatccggtggcagccgcctgctgaggacaagattaatggaattctgctcggattccgcattcgatatcgcgaactgctctatgaggggctgcggggttttactctgcggggaatcaataaccccggagctacatgggccgaactgacttccatgtatagtatgagaaacctgtctagacccagcttgacacagtatgaacttgacaatctcaataagcacagaagatatgagattcgtatgtccgtgtataatgctgtgggggaggggccatcctctcccccccaggaagtcttcgtgggggaggcggtgcccactgctgctccccggaatgttgtggtgcacggagcaactgcaacccagctcgatgtcacctgggagcctccacccctcgactctcaaaatggtgacatccagggctataagatctacttttgggaagcccagcgtggaaacttaactgagcgagtcaagacactcttcttggcagagaattccgttaaacttaagaatttaaccggttacacagcctatatggtgtctgtcgccgctttcaatgcggccggcgatggcccaagatccaccccaactcagggccaaacccagcaagccgccccttccgccccatccagcgtgaagttctccgaactgactacaactagtgtgaacgtctcctgggaagctccccagtttcccaatggcatcctggagggataccgcctggtgtacgagccatgttctccggtggatggggtttcaaagatagtcaccgtggacgttaagggcaacagcccactatggctgaaagtgaaagatctggccgaaggcgtcacataccgatttagaattcgggcaaagacctttacatatggcccagaaattgaggccaacgtgactacagggcctggagagggcgcccccggccccccaggcgtgccaataattgtgagatattcctccgccattgctattcactggtcgtccggcgatccaggcaaggggccaataacccggtacgttattgaagcccggccttccgatgagggcctctgggatatccttatcaaagacataccaaaggaagtgtccagctacactttctcaatggatattttgaagccaggtgtttcctacgattttagggtgatagccgtgaacgactatggtttcggcaccccttcttctcccagtcaatctgtgcctgcacagaaggccaatcctttctatgaggagtggtggtttctcgtcgttatcgcactggttggtctgatttttatcttgcttctcgtgtttgtgcttattattcgcggacagtccaagaaatatgctaagaaaaccgatagcggaaactccgcaaaatctggggcccttgggcacagtgaaatgatgtctttagacgagagttctttcccagctttggagctgaataacaggcggcttagtgtgaagaacagcttctgcagaaaaaatggtctgtatacgagatcacccccgcggcccagccccggctctttgcactactccgacgaggacgtgacgaaatacaatgacctgatcccggcggagtcaagctctctaacagagaaacccagcgaaatttccgactcacagggctctgacagtgaatacgaagttgactcaaatcaccagaaggcccactctttcgtgaaccactatatcagcgatcctacttactacaactcttggagaaggcagcagaagggcatttctagagcgcaagcgtatagctatacagagagtgattccggcgaacccgatcacacgacagtgacaaactccacttctacccaacagggatcattattcagacccaaagcctccagaacccctacaccccagaatccaccaaatcctccctctcagcagtccaccctctacagaccacctagcaaggcaggggtgcagaaagagggcgagaatcgggagcggatgtgtgtagcctcctcaagttcagccctgcgatggtggggctccctgttaccttgggaattgcatggtgcaggtgaagttgctgttagcctgctgtggacgcgtagcggcgcggggatttggagggagaggggctcaggaggttag

SEQ ID NO: 56665 - DNA, 6519 bp, Artificial Sequence
  derived and/or modified sequence
atgtgggggttattgatttggaccctgctggcgctgcatcagattcgggctgccagagctcaggacgatgtgtccccttacttcaaaacagaacccgtgcgcacacaggttcatctagagggaaacaggttagtattgacctgcatggccgaaggcagttggccccttgagttcaagtggctccataacaaccgggagctgactaagttctcactggaatatcggtacatgattacatcactagaccgaactcacgccggtttctatcgatgcatagtgagaaataggatgggtgccctcttgcaaagacaaactgaggttcaggtggcttacatgggaagcttcgaagagggcgagaaacaccagagtgttagtcacggtgaagcggccgtcattagggctcctagaatcgcctcttttccgcagccccaggtgacgtggtttagggatggacgtaaaattcctccatcctcaaggatagccatcacgcttgaaaacacactggttattctatctaccgtggcaccggacgccggccgttactatgtccaggctgtgaacgataagaatggcgacaacaaaacaagccagccaattacccttaccgtggagaatgtgggaggccccgctgatcccatcgcgccaaccattatcatcccgccgaaaaacacttctgtggtggccgggaccagcgaagtaaccttagagtgcgtcgcaaatgctcggcctctgatcaagttacatatcatctggaaaaaggacggcgtcttactgtcgggaggcatctctgatcacaatagacggctcaccatcccaaaccctactgggagcgacgctgggtattacgagtgcgaggccgtgctgcgttccagctccgtgcccagcgtcgtgagaggtgcctatttatccgtgctggaaccacctcagtttgtaaaagagccagagcggcacattacagcagagatggagaaagtggtggacattccctgtcaagcaaaaggtgtccctccgcctagcatcacctggtacaaggacgccgccgtcgtggaggttgagaaactgaccaggttccgccaacgcaacgatgggggtctccagatctcgggcctggttcctgatgacaccgggatgtttcagtgtttcgctcgtaatgccgccggggaagtgcaaactagtacatatctggccgtgacgtccatcgcaccgaacataacaaggggacccttggatagcacggtaatcgatggcatgtcagtcgtcctggcctgcgagacctcaggcgccccccgcccagcaataacatggcaaaaaggtgaaaggattctcgcgagtggatccgtgcagctcccaaggttcactcccctggagagcggatcactcttaatttctccaacacacatcagcgacgccggtacctatacttgcctcgccacaaattctcgcggtgtggatgaggcaagcgccgatctggtcgtctgggcgcgaacccgaattacgaagcccccacaagatcagagtgtgataaagggcacccaagccagcatggtgtgtggcgtcacacacgatccacgggtcaccatccgatacatttgggagaaagatggggcaacgctgggtacagaatcccatcctagaatcaggttggaccggaacggcagcttgcacattagccagacctggtcaggtgacatagggacctatacctgccgggtaatcagtgccggcgggaatgactctcggagcgcccatctacgggtgagacagctgccacacgcccccgagcatcccgtggccaccttatcaacagtggaacgtcgggccatcaatctaacttggactaaaccgtttgacggcaactctcctcttattcgttatatcctcgaaatgagtgaaaacaatgcgccttggactgtcctgctggcttctgttgatccgaaagccacgagtgtgactgtcaagggactcgtacccgccaggtcctatcagttccgtctgtgcgctgtgaacgacgtggggaagggacaattttctaaggatacagagagagtaagtctgccagaggaaccccccaccgcacctccacagaatgtcattgcttccggaagaactaaccagagcattatgatacagtggcagccacctcccgagtcccatcagaatgggattttgaagggatacattatccgatactgcctggccggcctgcctgtgggttaccagtttaaaaatataaccgatgctgacgtgaacaacctgctcttagaggatctgatcatctggacgaactatgagattgaagtggccgcatataattccgctggcttaggtgtctacagctccaaagtaaccgaatggactctgcagggagtgccaacagtgcctccaggaaacgtccacgctgaagctacaaactctacgacaattcgctttacctggaacgcgccatctccacagttcatcaatggcataaatcagggatataaactcatcgcctgggaaccagaacaggaagaggaggttactatggtgaccgctagaccaaactttcaggattctatccacgtcgggtttgttagcggactgaagaagtttaccgagtacttcacaagcgttctgtgtttcaccactcctggtgacggccccagatctacaccccagctggtgagaacacatgaggacgtgccagggcccgtagggcacctcagcttttccgagatcctcgacacttctttgaaggtttcctggcaggagcctggcgagaaaaacggtatcctaacaggttacaggatctcttgggaggaatataaccgaaccaacaccagggtgactcattacctgccaaacgtgaccctggagtatcgggtgaccggactgactgctctgactacttatacaattgaggttgccgccatgacgtctaaggggcagggccaggtgtctgcaagtacgatttcttctggagtgcccccagagctgccgggcccccctaccaatttggggatctccaacataggcccaagaagcgttaccctgcagtttagacccgggtacgacggaaaaactagtattagccgctggctagtagaagctcaagttggtgtcgtgggcgagggagaggagtggctcctgatccaccaacttagcaacgagccggacgccaggagcatggaagttcctgatctcaatccattcacctgctactcctttaggatgcgccaggtcaacatcgtgggcacctcccccccatcccagccatcccggaaaattcagaccctccaggcccctcctgatatggcccctgcgaatgtttctctgaggaccgctagcgagaccagcctatggctccggtggatgcccctcccagaaatggaatataacggaaacccagaaagcgtaggatacaaaatcaaatactcccgttcagacggccatggtaagacactgagccacgtcgttcaagatcgtgtggaaagggactacaccatagaggacctcgaggagtggaccgagtatcgagtgcaggtgcaagcctttaatgctattggatccgggccctggtctcagacagtcgtgggccgcacgcgggagagtgtgccgtcttccggccccactaatgtcagcgccctggcgacgacgtcatcttccatgctcgtgcgatggtccgaagttcccgaggccgacagaaacggtctggtgcttggatacaaggttatgtacaaggaaaaagacagcgatacgcagccccgtttctggcttgtcgaagggaattccagcagaagcgcccagttaaccgggttgggtaagtatgtgctgtacgaagtacaagtgttggcgtttactcgcattggggatgggagtccctcccacccgccaattctcgaaagaaccttggatgacgttccgggcccccccatggggatactctttccggaagtcagaaccactagcgtgaggctaatctggcagccccctgcggcccctaatggcattattttggcgtatcaaattacgcataggttaaatactaccaccgcaaacacagcaacggtggaggtcctagccccatcggccaggcaatataccgccacggggttaaaacctgagtcggtctatctgtttaggatcacggctcaaactcggaaaggatggggcgaggccgctgaagcattggtcgtaacaacagaaaaacgcgaccgtcctcagcctccaagccggccgatggtccagcaggaagacgtacgagccagatccgtgcttctcagctgggaaccaggctccgatggactgagcccagtgcgatattataccattcagacacgcgaactgcccagcggcaggtgggcactccatagtgcttcagtcagccataacgcaagctcctttatagtagacagactaaaaccattcacctcctataagtttagggtgaaagcgacaaacgacatcggggactcagagttctccgaagagtccgaaagtctcacgacgctgcaggccgctcctgacgaggctcccaccatcttatcggtgaccccacacacaaccacgtctgttctgatccggtggcagcctcccgcagaggacaagattaatggaattctgctcgggttccggattcggtaccgcgaactattgtacgagggcctgagagggtttaccctgcgaggcatcaacaaccctggcgcgacatgggcagaattaaccagcatgtacagcatgaggaaccttagtcggccatcactgacccagtatgagcttgataaccttaataaacaccgcagatatgagattcgcatgtcggtgtacaatgcggttggggagggccctagctctccaccccaggaggtatttgttggtgaagccgtccccactgcagcccccagaaacgttgtggttcatggagccacagccacacaactggacgtgacttgggagccccccccattggactctcagaacggcgatatccagggatacaaaatctacttttgggaagctcagcgaggaaatctcacagaacgcgtgaagactctttttctggctgaaaattccgtcaaactaaaaaatctgacggggtacaccgcgtatatggtcagcgttgctgccttcaatgccgcaggtgatggtccacgaagtacccctacacaaggacagactcagcaagccgcacccagtgctccatctagtgttaagtttagcgagcttacgactacctcagttaatgtttcttgggaagccccgcaatttcccaacggcatacttgaaggatatcggctggtctacgaaccttgttccccggtagatggcgtgtccaagattgttaccgtggatgttaaaggcaactctccactgtggctaaaggtgaaagatctagctgagggcgtgacttatcgctttagaattcgcgcgaagaccttcacctacggacctgagatcgaagccaacgtaaccacgggacccggggagggtgcgcctggccctcctggagtgcccataattgttcgttactcttcggctattgctatccattggagctctggcgaccccgggaagggacccatcacccgttacgtgatcgaagcccgtcctagcgacgaaggactctgggatatactgataaaagatatccccaaagaggtctcttcatacacttttagcatggatatcctcaaaccaggcgtgagctacgacttcagggtgatcgccgtgaacgactatggattcggcacccccagttccccaagccagagtgtgcctgcccagaaggccaatccattttacgaagaatggtggttcctggtggtcatagcgctcgtggggttgatctttatcttgcttcttgtattcgtgctgatcatccgcgggcagtccaagaagtacgctaaaaagacagactctggcaattcggccaagtccggggcactcggacactccgaaatgatgtcattggacgaatcttcgttccccgccctagagctgaataatcgcaggctgtctgtgaaaaactccttctgcagaaagaacggcctctacacacggtcaccaccccgcccctccccaggctccctccactatagcgacgaagatgttacgaagtacaatgatctcatcccggcagaaagctccagcctcaccgaaaagccatccgaaatctccgattctcagggttctgattccgagtatgaagttgacagcaatcatcaaaaggcacattccttcgtgaatcattatattagtgacccaacgtactataattcctggcgaaggcagcagaaggggatttcaagagcccaggcatattcgtatacagaaagcgacagcggggaacccgaccatactaccgtcactaactcaacgagtacacagcagggatccctctttcgaccaaaagcttctcggaccccaaccccgcagaatccaccgaaccctccatctcagcagtctacactctatcggccacccagctctctggcccctggaagcagggccccaatagccggattctcctcattcgtgtag

SEQ ID NO: 56666 - DNA, 6651 bp, Artificial Sequence
  derived and/or modified sequence
atgtggggcctgctgatctggaccctgctggccctgcaccagatccgggccgcccgggcccaggatgatgtgagcccctacttcaagacagagcctgtgaggacccaggtgcacctggagggcaaccggctggtgctgacctgcatggccgagggctcctggcccctggagttcaagtggctgcacaacaaccgggagctgaccaagttcagcctggagtaccgctacatgatcaccagcctggacaggacccacgccggcttctaccgctgcatcgtgaggaacaggatgggcgccctgctgcagaggcagacagaggtgcaggtggcctacatgggcagctttgaggagggggagaagcaccagagcgtgagccacggggaggccgccgtcatccgggcccccagaattgccagcttcccccagccccaggtgacctggttcagagatggcaggaagatcccccccagcagccgcatcgccatcaccctggagaacaccctggtgatcctgagcacagtggccccagatgctggccgctactacgtgcaggccgtgaatgacaagaatggagacaacaagaccagccagcccatcaccctgactgtggagaatgtgggcggccctgctgaccccatcgcccccaccatcatcatcccccccaagaacacctctgtggtggccggcaccagcgaggtgaccctggagtgtgtggccaatgcccggcccctcatcaagctgcacatcatctggaagaaggatggagtgctgctgagcggcggcatcagtgaccacaacagaaggctgaccatccccaaccccactggaagtgatgctggctactatgaatgtgaggccgtgctgcggagcagctctgtgcccagcgtggtgcggggggcctacctgtctgtgctggagcccccccagtttgtgaaggagcctgagcggcacatcacagctgagatggagaaggtggtggacatcccctgccaggccaagggcgtgcccccacccagcatcacctggtacaaggatgctgctgtggtggaggtggagaagctgacccgcttccggcagagaaatgatggcggcctgcagatcagcggcctggtgcctgatgacaccggcatgttccagtgctttgccagaaatgctgctggggaggtgcagaccagcacctacctggccgtgaccagcatcgcccccaacatcacccggggccccctggacagcacagtgattgatggcatgtctgtggtgctggcctgtgagaccagcggggcccccaggcctgccatcacctggcagaagggggagcgcatcctggccagcggctctgtgcagctgccccgcttcacccccctggagagcggcagcctgctgatcagccccacccacatcagtgatgctggcacctacacctgcctggccaccaacagccggggcgtggatgaggccagcgctgacctggtggtgtgggcccggacccgcatcaccaagccaccccaggaccagagcgtcatcaagggcacccaggcctccatggtgtgtggggtgacccatgacccccgggtgaccatccgctacatctgggagaaggatggagccaccctgggcacagagagccacccccgcatccggctggacagaaatggcagcctgcacatcagccagacctggagcggggacatcggcacctacacctgcagggtcatctctgctggaggaaatgacagccgcagcgcccacctgcgggtgcggcagctgccccacgcccctgagcaccctgtggccaccctgagcacagtggagcggcgggccatcaacctgacctggaccaagccctttgatggcaacagccccctcatccgctacatcctggagatgtctgaaaataatgccccctggacagtgctgctggcctctgtggaccccaaggccacctctgtgacagtgaagggcctggtgcctgcccggagctaccagttccggctgtgtgctgtgaatgatgtgggcaagggccagttcagcaaggacacagagcgggtgtccctgcctgaggagcccccaacagccccaccccagaatgtcatcgccagcggccgcaccaaccagagcatcatgatccagtggcagcccccacctgagagccaccagaatggcatcctgaagggctacatcatccgctactgcctggccggcctgcctgtgggctaccagttcaagaacatcacagatgctgatgtgaacaacctgctgctggaggacctgatcatctggaccaactatgaaattgaggtggccgcctacaacagcgctggcctgggcgtgtacagcagcaaggtgacagagtggaccctgcagggcgtgcccaccgtgcccccaggaaatgtgcacgccgaggccaccaacagcaccaccatccgcttcacctggaatgcccccagcccccagttcatcaatggcatcaaccagggctacaagctgattgcctgggagcctgagcaggaggaggaggtgaccatggtgacagcccggcccaacttccaggacagcatccacgtgggctttgtgtctggcctgaagaagttcacagagtacttcacctctgtgctgtgcttcaccaccccaggagatggccccaggagcaccccccagctggtgaggacccatgaagatgtgcccggccctgtgggccacctgtccttcagcgagatcctggacaccagcctgaaggtgtcctggcaggagcccggggagaagaatggcatcctgaccggctaccgcatctcctgggaggagtacaacagaaccaacaccagggtgacccactacctgcccaacgtgaccctggagtacagagtgacaggcctgacagccctgaccacctacaccatcgaggtggccgccatgaccagcaagggccagggccaggtgtctgccagcaccatcagcagcggcgtgcccccagagctgcccggcccccccaccaacctgggcatcagcaacatcggccccaggtctgtgaccctgcagttccggcccggctatgatggcaagaccagcatcagccgctggctggtggaggcccaggtgggcgtggtgggggagggggaggagtggctgctgatccaccagctgagcaatgaaccagatgcccgctccatggaggtgcctgacctgaaccccttcacctgctacagcttcaggatgaggcaggtgaacatcgtgggcaccagcccccccagccagcccagcaggaagatccagaccctgcaggcccccccagacatggccccagccaacgtgtccctgaggacagccagcgagaccagcctgtggctgcgctggatgcccctgcctgagatggagtacaacggcaaccctgagagcgtgggctacaagatcaagtacagcagaagtgatggccacggcaagaccctgagccacgtggtgcaggacagagtggagcgggactacaccatcgaggacctggaggagtggacagagtacagagtgcaggtgcaggccttcaatgccatcggcagcggcccctggagccagacagtggtgggccgcacccgggagagcgtgcccagcagcggccccaccaacgtgtctgccctggccaccaccagcagctccatgctggtgcgctggagcgaggtgcctgaggccgacagaaatggcctggtgctgggctacaaggtgatgtacaaggagaaggacagcgacacccagccccgcttctggctggtggagggcaacagcagccgcagcgcccagctgaccggcctgggcaagtatgtgctgtatgaggtgcaggtgctggccttcaccagaattggagatggcagccccagccacccccccatcctggagaggaccctggatgatgtgcccggcccccccatgggcatcctcttccctgaggtgaggaccacctctgtgcggctcatctggcagcccccagctgcccccaacggcatcatcctggcctaccagatcacccaccggctgaacaccaccacagccaacacagccaccgtggaggtgctggcccccagcgcccggcagtacacagccaccggcctgaagccagagagcgtgtacctgttccgcatcacagcccagaccaggaagggctggggcgaggccgctgaggccctggtggtgaccacagagaagagggaccggccccagccccccagccggcccatggtgcagcaggaggatgtgcgggcccggtctgtgctgctgtcctgggagcccggcagtgatggcctgagccctgtgcgctactacaccatccagacccgggagctgcccagcggccgctgggccctgcacagcgcctctgtgagccacaatgccagcagcttcatcgtggaccggctgaagcccttcaccagctacaagttccgggtgaaggccaccaatgacatcggggacagcgagttcagcgaggagagcgagagcctgaccaccctgcaggccgccccagatgaggcccccaccatcctgtctgtgaccccccacaccaccacctctgtgctgatccgctggcagcccccagctgaggacaagatcaatggcatcctgctgggcttccgcatccgctaccgggagctgctgtatgagggcctgcggggcttcaccctgcggggcatcaacaaccctggggccacctgggccgagctgacctccatgtacagcatgaggaacctgagccggcccagcctgacccagtatgagctggacaacctgaacaagcacagaagatatgagatccgcatgtctgtgtacaatgctgtgggggagggccccagcagccccccccaggaggtgtttgtgggggaggccgtgcccacagctgcccccagaaatgtggtggtgcatggagccacagccacccagctggatgtgacctgggagcccccacccctggacagccagaatggagacatccagggctacaagatctacttctgggaggcccagaggggcaacctgacagagcgggtgaagaccctcttcctggccgagaacagcgtgaagctgaagaacctgaccggctacacagcctacatggtgtctgtggccgccttcaatgctgctggagatggccccaggagcacccccacccagggccagacccagcaggccgcccccagcgcccccagctctgtgaagttcagcgagctgaccaccacctctgtgaatgtgtcctgggaggccccccagttccccaacggcatcctggagggctaccgcctggtgtatgagccctgcagccctgtggatggagtgtccaagatcgtgacagtggatgtgaagggcaacagccccctgtggctgaaggtgaaggacctggccgagggcgtgacctaccgcttccgcatccgggccaagaccttcacctacggccctgagattgaggccaacgtgaccaccggccctggagagggcgcccctggccccccaggagtgcccatcatcgtgcgctacagcagcgccatcgccatccactggagcagcggggaccccgggaagggccccatcaccaggtatgtgattgaggcccggcccagtgatgagggcctgtgggacatcctgatcaaggacatccccaaggaggtgagcagctacaccttctccatggacatcctgaagccaggagtgtcctatgacttccgggtgattgctgtgaatgactatggcttcggcacccccagcagccccagccagagcgtgcctgcccagaaggccaaccccttctatgaggagtggtggttcctggtggtgattgccctggtgggcctcatcttcatcctgctgctggtgtttgtgctgatcatccggggccagagcaagaagtatgccaagaagacagacagcggcaacagcgccaagagcggggccctgggccacagcgagatgatgagcctggatgagagcagcttccctgccctggagctgaacaacagaaggctgtctgtgaagaacagcttctgcaggaagaatggcctgtacaccaggagccccccccggcccagccctggcagcctgcactacagtgatgaagatgtgaccaagtacaatgacctgatcccagctgagagcagcagcctgacagagaagcccagcgagatcagtgacagccagggcagtgacagtgaatatgaggtggacagcaaccaccagaaggcccacagctttgtgaaccactacatcagtgaccccacctactacaacagctggaggcggcagcagaagggcatcagccgggcccaggcctacagctacacagaaagtgacagcggggagccagaccacaccaccgtgaccaacagcaccagcacccagcagggcagcctcttccggcccaaggccagcaggacccccaccccccagaacccccccaacccccccagccagcagagcaccctgtacagaccacccagcaaggccggcgtgcagaaggagggggagaaccgggagaggatgtgtgtggccagcagcagcagcgccctgcgctggtggggcagcctgctgccctgggagctgcacggggccggggaggtggccgtgtccctgctgtggaccaggtctggggccggcatctggagggagcggggcagcggcggctag

SEQ ID NO: 56667 - DNA, 6519 bp, Artificial Sequence
  derived and/or modified sequence
atgtggggcctgctgatctggaccctgctggccctgcaccagatccgggccgcccgggcccaggatgatgtgagcccctacttcaagacagagcctgtgaggacccaggtgcacctggagggcaaccggctggtgctgacctgcatggccgagggctcctggcccctggagttcaagtggctgcacaacaaccgggagctgaccaagttcagcctggagtaccgctacatgatcaccagcctggacaggacccacgccggcttctaccgctgcatcgtgaggaacaggatgggcgccctgctgcagaggcagacagaggtgcaggtggcctacatgggcagctttgaggagggggagaagcaccagagcgtgagccacggggaggccgccgtcatccgggcccccagaattgccagcttcccccagccccaggtgacctggttcagagatggcaggaagatcccccccagcagccgcatcgccatcaccctggagaacaccctggtgatcctgagcacagtggccccagatgctggccgctactacgtgcaggccgtgaatgacaagaatggagacaacaagaccagccagcccatcaccctgactgtggagaatgtgggcggccctgctgaccccatcgcccccaccatcatcatcccccccaagaacacctctgtggtggccggcaccagcgaggtgaccctggagtgtgtggccaatgcccggcccctcatcaagctgcacatcatctggaagaaggatggagtgctgctgagcggcggcatcagtgaccacaacagaaggctgaccatccccaaccccactggaagtgatgctggctactatgaatgtgaggccgtgctgcggagcagctctgtgcccagcgtggtgcggggggcctacctgtctgtgctggagcccccccagtttgtgaaggagcctgagcggcacatcacagctgagatggagaaggtggtggacatcccctgccaggccaagggcgtgcccccacccagcatcacctggtacaaggatgctgctgtggtggaggtggagaagctgacccgcttccggcagagaaatgatggcggcctgcagatcagcggcctggtgcctgatgacaccggcatgttccagtgctttgccagaaatgctgctggggaggtgcagaccagcacctacctggccgtgaccagcatcgcccccaacatcacccggggccccctggacagcacagtgattgatggcatgtctgtggtgctggcctgtgagaccagcggggcccccaggcctgccatcacctggcagaagggggagcgcatcctggccagcggctctgtgcagctgccccgcttcacccccctggagagcggcagcctgctgatcagccccacccacatcagtgatgctggcacctacacctgcctggccaccaacagccggggcgtggatgaggccagcgctgacctggtggtgtgggcccggacccgcatcaccaagccaccccaggaccagagcgtcatcaagggcacccaggcctccatggtgtgtggggtgacccatgacccccgggtgaccatccgctacatctgggagaaggatggagccaccctgggcacagagagccacccccgcatccggctggacagaaatggcagcctgcacatcagccagacctggagcggggacatcggcacctacacctgcagggtcatctctgctggaggaaatgacagccgcagcgcccacctgcgggtgcggcagctgccccacgcccctgagcaccctgtggccaccctgagcacagtggagcggcgggccatcaacctgacctggaccaagccctttgatggcaacagccccctcatccgctacatcctggagatgtctgaaaataatgccccctggacagtgctgctggcctctgtggaccccaaggccacctctgtgacagtgaagggcctggtgcctgcccggagctaccagttccggctgtgtgctgtgaatgatgtgggcaagggccagttcagcaaggacacagagcgggtgtccctgcctgaggagcccccaacagccccaccccagaatgtcatcgccagcggccgcaccaaccagagcatcatgatccagtggcagcccccacctgagagccaccagaatggcatcctgaagggctacatcatccgctactgcctggccggcctgcctgtgggctaccagttcaagaacatcacagatgctgatgtgaacaacctgctgctggaggacctgatcatctggaccaactatgaaattgaggtggccgcctacaacagcgctggcctgggcgtgtacagcagcaaggtgacagagtggaccctgcagggcgtgcccaccgtgcccccaggaaatgtgcacgccgaggccaccaacagcaccaccatccgcttcacctggaatgcccccagcccccagttcatcaatggcatcaaccagggctacaagctgattgcctgggagcctgagcaggaggaggaggtgaccatggtgacagcccggcccaacttccaggacagcatccacgtgggctttgtgtctggcctgaagaagttcacagagtacttcacctctgtgctgtgcttcaccaccccaggagatggccccaggagcaccccccagctggtgaggacccatgaagatgtgcccggccctgtgggccacctgtccttcagcgagatcctggacaccagcctgaaggtgtcctggcaggagcccggggagaagaatggcatcctgaccggctaccgcatctcctgggaggagtacaacagaaccaacaccagggtgacccactacctgcccaacgtgaccctggagtacagagtgacaggcctgacagccctgaccacctacaccatcgaggtggccgccatgaccagcaagggccagggccaggtgtctgccagcaccatcagcagcggcgtgcccccagagctgcccggcccccccaccaacctgggcatcagcaacatcggccccaggtctgtgaccctgcagttccggcccggctatgatggcaagaccagcatcagccgctggctggtggaggcccaggtgggcgtggtgggggagggggaggagtggctgctgatccaccagctgagcaatgaaccagatgcccgctccatggaggtgcctgacctgaaccccttcacctgctacagcttcaggatgaggcaggtgaacatcgtgggcaccagcccccccagccagcccagcaggaagatccagaccctgcaggcccccccagacatggccccagccaacgtgtccctgaggacagccagcgagaccagcctgtggctgcgctggatgcccctgcctgagatggagtacaacggcaaccctgagagcgtgggctacaagatcaagtacagcagaagtgatggccacggcaagaccctgagccacgtggtgcaggacagagtggagcgggactacaccatcgaggacctggaggagtggacagagtacagagtgcaggtgcaggccttcaatgccatcggcagcggcccctggagccagacagtggtgggccgcacccgggagagcgtgcccagcagcggccccaccaacgtgtctgccctggccaccaccagcagctccatgctggtgcgctggagcgaggtgcctgaggccgacagaaatggcctggtgctgggctacaaggtgatgtacaaggagaaggacagcgacacccagccccgcttctggctggtggagggcaacagcagccgcagcgcccagctgaccggcctgggcaagtatgtgctgtatgaggtgcaggtgctggccttcaccagaattggagatggcagccccagccacccccccatcctggagaggaccctggatgatgtgcccggcccccccatgggcatcctcttccctgaggtgaggaccacctctgtgcggctcatctggcagcccccagctgcccccaacggcatcatcctggcctaccagatcacccaccggctgaacaccaccacagccaacacagccaccgtggaggtgctggcccccagcgcccggcagtacacagccaccggcctgaagccagagagcgtgtacctgttccgcatcacagcccagaccaggaagggctggggcgaggccgctgaggccctggtggtgaccacagagaagagggaccggccccagccccccagccggcccatggtgcagcaggaggatgtgcgggcccggtctgtgctgctgtcctgggagcccggcagtgatggcctgagccctgtgcgctactacaccatccagacccgggagctgcccagcggccgctgggccctgcacagcgcctctgtgagccacaatgccagcagcttcatcgtggaccggctgaagcccttcaccagctacaagttccgggtgaaggccaccaatgacatcggggacagcgagttcagcgaggagagcgagagcctgaccaccctgcaggccgccccagatgaggcccccaccatcctgtctgtgaccccccacaccaccacctctgtgctgatccgctggcagcccccagctgaggacaagatcaatggcatcctgctgggcttccgcatccgctaccgggagctgctgtatgagggcctgcggggcttcaccctgcggggcatcaacaaccctggggccacctgggccgagctgacctccatgtacagcatgaggaacctgagccggcccagcctgacccagtatgagctggacaacctgaacaagcacagaagatatgagatccgcatgtctgtgtacaatgctgtgggggagggccccagcagccccccccaggaggtgtttgtgggggaggccgtgcccacagctgcccccagaaatgtggtggtgcatggagccacagccacccagctggatgtgacctgggagcccccacccctggacagccagaatggagacatccagggctacaagatctacttctgggaggcccagaggggcaacctgacagagcgggtgaagaccctcttcctggccgagaacagcgtgaagctgaagaacctgaccggctacacagcctacatggtgtctgtggccgccttcaatgctgctggagatggccccaggagcacccccacccagggccagacccagcaggccgcccccagcgcccccagctctgtgaagttcagcgagctgaccaccacctctgtgaatgtgtcctgggaggccccccagttccccaacggcatcctggagggctaccgcctggtgtatgagccctgcagccctgtggatggagtgtccaagatcgtgacagtggatgtgaagggcaacagccccctgtggctgaaggtgaaggacctggccgagggcgtgacctaccgcttccgcatccgggccaagaccttcacctacggccctgagattgaggccaacgtgaccaccggccctggagagggcgcccctggccccccaggagtgcccatcatcgtgcgctacagcagcgccatcgccatccactggagcagcggggaccccgggaagggccccatcaccaggtatgtgattgaggcccggcccagtgatgagggcctgtgggacatcctgatcaaggacatccccaaggaggtgagcagctacaccttctccatggacatcctgaagccaggagtgtcctatgacttccgggtgattgctgtgaatgactatggcttcggcacccccagcagccccagccagagcgtgcctgcccagaaggccaaccccttctatgaggagtggtggttcctggtggtgattgccctggtgggcctcatcttcatcctgctgctggtgtttgtgctgatcatccggggccagagcaagaagtatgccaagaagacagacagcggcaacagcgccaagagcggggccctgggccacagcgagatgatgagcctggatgagagcagcttccctgccctggagctgaacaacagaaggctgtctgtgaagaacagcttctgcaggaagaatggcctgtacaccaggagccccccccggcccagccctggcagcctgcactacagtgatgaagatgtgaccaagtacaatgacctgatcccagctgagagcagcagcctgacagagaagcccagcgagatcagtgacagccagggcagtgacagtgaatatgaggtggacagcaaccaccagaaggcccacagctttgtgaaccactacatcagtgaccccacctactacaacagctggaggcggcagcagaagggcatcagccgggcccaggcctacagctacacagaaagtgacagcggggagccagaccacaccaccgtgaccaacagcaccagcacccagcagggcagcctcttccggcccaaggccagcaggacccccaccccccagaacccccccaacccccccagccagcagagcaccctgtacagaccacccagcagcctggcccctggcagccgggcccccatcgccggcttcagcagctttgtgtag

SEQ ID NO: 56668 - DNA, 6651 bp, Artificial Sequence
  derived and/or modified sequence
atgtggggcctgctgatctggaccctgctggccctgcaccagatcagagccgccagagctcaggatgacgtgtcaccctatttcaaaaccgagcccgttcggacacaagtgcacctggagggcaatagattagtcctcacatgtatggccgaagggagctggcctctcgagtttaagtggctccacaataatcgcgagctcacaaaattctccctggaatataggtacatgatcacaagtttggaccggacgcacgccggcttttaccgatgcattgtcaggaacagaatgggagccctgctccaaaggcagacagaggtccaggttgcttacatgggctccttcgaggagggtgaaaagcaccagagtgtaagtcacggagaggctgcagtgattagggctcccagaatcgcttccttcccccagccccaagtaacgtggttccgcgacgggaggaagatccctccatcctccaggatagctattactctagagaatacactggtgatcctgtctacggtggcacctgacgccggtaggtactacgtgcaggccgttaatgacaagaatggcgacaataaaacctcccagccaattaccctaacagtggagaatgttggagggcccgccgacccaatagcacccactatcattattccccctaagaacacgagtgtggtagccggcacctcagaggtgacactggaatgcgtggccaacgcccggcctttgatcaaactgcacattatctggaaaaaggatggagtgctgcttagtggggggattagcgaccataacagaaggctgacaatccctaatccgaccggatccgacgcagggtattatgagtgcgaagccgtcctccgatcctctagtgtgccgagtgtggtgaggggagcttacctatctgtccttgaaccccctcaatttgtcaaggagccagaaagacacatcaccgccgagatggaaaaagtggtagatatcccctgccaggccaagggagtcccacccccctccatcacttggtataaggatgccgcagtagtggaggtggagaagttgacacgtttcaggcagcgcaatgatgggggattgcagatcagcgggcttgttcctgacgataccggtatgtttcagtgttttgctcgaaacgccgccggggaggttcaaaccagcacatatctggccgtaaccagcatcgcaccgaatattaccaggggccccctggactccactgtcatagacggcatgagcgtggtgcttgcttgcgagacctctggcgcccctaggcccgcaataacttggcagaagggtgaacgtatcttggcatcgggcagtgtgcagctacctagatttacgccgctggaatccgggagtctgctgatctctccaacccacatctctgatgccggaacatatacctgcctggccaccaacagccgcggggtcgatgaagcttctgcggacctggtggtatgggcgcgcacgcgtatcaccaagccgccccaggaccagagcgttataaagggtacacaggcttccatggtctgtggagttactcatgacccacgcgtgacgatccgatacatctgggaaaaggacggagccacattaggtaccgaatctcaccctaggattcgcctggataggaacggctctctgcatatttctcaaacctggagtggggatataggaacatacacatgtcgggttatcagcgccggtggaaatgactcaaggagtgcacatctacgcgtccggcagttaccccatgcgccggaacaccctgtggcgaccctgtcaaccgtagagaggcgggctatcaacctgacttggactaagccctttgacgggaactctcctctgatccgctacatccttgagatgtctgaaaacaacgcaccatggactgtgctcctggcctcagtggacccaaaagccaccagtgtgacggtgaaaggcttggtacccgctagatcttaccagttccgtttgtgcgctgtgaacgacgtgggcaaagggcagttttctaaagataccgagcgggtgtctctgcctgaagagcctccaaccgctccaccccagaacgtgattgctagcggacggactaatcaatcaatcatgatacagtggcagccaccgccagaatctcatcaaaacggcattctgaaaggttacatcatccgctattgtctggcaggattacccgtgggataccaattcaagaatattacagatgccgatgtcaacaacctgcttctcgaagatctcattatctggaccaactacgaaatagaggtggcagcctataattctgcgggcctgggtgtctactcatctaaagttactgaatggacgttgcaaggggttccaacagtaccccctgggaacgtacacgcggaggcaacaaattccaccactatcagattcacatggaatgctccttcacctcaattcatcaacggcatcaaccagggctacaagctcatcgcatgggaaccagagcaggaggaggaagtgactatggtgaccgcccggcccaatttccaggactcaatccacgtcggattcgtctctgggctcaagaagttcaccgagtactttacatctgtcctatgtttcaccacgcctggcgacggtccacggagcacaccccaattggtgcggacccacgaggatgtccctggtccagtcggccatttgagcttttcagagatcctggatacctcccttaaagtatcttggcaggagcccggcgaaaagaacgggatcctcacggggtaccgaatttcctgggaagagtataaccgaactaacaccagggtgacccactatttacccaatgtaaccctcgagtatcgcgtgactggactgaccgcgctgacaacctatacaatcgaggtcgcagccatgacatctaaggggcaggggcaggttagtgcatctacaatctccagcggggtcccgccagagctgcctggccccccaaccaacctggggattagcaatatcgggccgcgatctgtgacgttgcaattcagacctggctatgacggcaagacatccatttcgagatggctggtcgaggcccaagtgggagtcgtaggtgagggggaggagtggctgctcattcaccaattgagtaacgaaccagacgcccgctccatggaggtgcccgacctcaatccatttacgtgctattccttcagaatgcgacaggtgaacattgtgggaacgtctcccccatcacagccaagccggaagattcaaacccttcaggccccacctgatatggcccctgccaatgtgtcacttcggaccgccagtgaaacttccctgtggcttcgatggatgccactccccgagatggagtataacggcaaccctgagagcgtgggctacaagatcaagtatagccgcagcgatggtcacgggaaaacactatctcatgtggtccaggaccgggtggagcgcgattacacaatcgaggatcttgaagagtggacagagtacagagttcaggtccaggcctttaatgctattggttcagggccctggtctcaaacagtggtggggaggacgcgtgagagcgtcccaagctcagggcccacaaatgtaagcgcgctggctaccacctcttctagcatgctagtaagatggagcgaggtgccggaagcagaccgcaatggcctcgtgttgggctacaaggtaatgtacaaagaaaaggacagcgacactcaaccgagattctggttggtcgagggcaatagctcacggtctgcacagttaacgggcctcggcaaatacgtgctctacgaagtacaggtactggcattcaccagaatcggcgacggttcacccagccatccacctattctggagaggactctagacgatgttcctgggccccccatgggaatcttgtttcccgaggttaggacgacctctgtgagactcatctggcagccccctgcagcaccgaatggtatcatcctagcctatcagatcacccaccgactgaacacaactaccgctaacactgccaccgtggaggtgctggcccccagcgccagacagtacactgcaaccgggctcaaacctgagtctgtgtacctgttccggatcacagctcaaactcgaaaaggctggggggaagctgccgaagctctggtcgttactaccgagaagagggatagaccgcagccacctagcagacctatggtccagcaggaggatgtgagagcaagaagtgtcctgctgtcttgggaacccggatcagacggcctgtctcctgttcggtattacactatccagacacgagaactgcctagtggcagatgggccctgcacagtgcctcagtgtctcacaatgcgtcaagctttatcgttgatcggctgaagcctttcacatcctacaagttcagggtcaaggccactaacgatataggtgacagcgaatttagcgaggagtccgaatcactaaccacgttacaggcagcccccgacgaagcccctaccatcctgtcagtaaccccacatacaacaacctcagtcctgatcagatggcagccaccagctgaggacaagatcaacggaatcttactcgggttccggatcagatatcgggagctcctatacgaagggctccgggggtttacccttcggggcattaacaatcctggtgccacatgggccgagctcactagtatgtacagcatgcgaaatctgtctagaccatctctgacgcaatatgagctggataacctaaacaaacacagacggtatgagatacggatgtccgtctataacgccgtgggggagggcccaagttctcctcctcaagaggttttcgtcggagaggcagtgccaacggccgcccctcgcaacgtggtggtccacggtgctacagccacacagttagatgttacatgggaaccccctcctctcgactcccagaatggcgatatccaggggtacaaaatatatttttgggaggcccagcggggaaatctgaccgagagagttaagacactgttcctcgccgaaaattctgtcaagcttaaaaatcttacagggtacacagcctacatggtgagtgtggctgcatttaacgccgcaggggacggccctcgatccacccccactcagggacagacccagcaggccgctccttctgcgccatccagcgtcaaatttagcgaactgaccacgaccagcgtcaatgtcagctgggaggccccgcaattccccaacgggattttggaggggtatcggctcgtttatgagccatgctctcctgtggacggcgtttcaaagattgtcactgtggatgttaaggggaactctccactctggctcaaggtaaaggaccttgcagagggggtgacttatagattccgaatccgcgccaagacatttacttacggacctgaaattgaggctaatgtgaccacaggtccaggagagggagctcccgggccccctggggtgcccatcattgtgcggtacagttctgccatcgcaatccactggagcagcggtgatcccgggaaaggcccgatcacaagatatgttatagaggcccgaccatccgatgagggattatgggacattttaattaaggacatcccaaaggaagtatcctcttacacattcagcatggacatcctgaaacctggtgtgagctacgactttcgcgtaattgcggtcaatgactacggctttggcactcccagctcaccgagccagagtgtccccgcccagaaagccaatccattttacgaggaatggtggtttctcgtcgtcattgcgctcgtgggactgatctttattctgctgctggtgttcgtcctgatcattcgagggcagagcaaaaaatacgccaagaagaccgatagcggtaatagcgcaaagtccggagccctggggcactctgaaatgatgtcactagatgagtcttcatttcccgctctggaactgaataacagacgtctgtccgtgaagaactccttctgtcgcaaaaacggactgtatacaagatctccgcccagaccatcacccgggagtctccattattcagatgaggatgtgacaaaatacaatgacttaatccctgcggagtcctctagtcttaccgagaagccatcagagatctctgactcgcaagggtctgattccgagtatgaagtggactctaaccaccagaaggcccactccttcgtgaatcactacatttcagaccctacctattacaactcttggagaagacagcaaaaaggaatttcccgagcccaagcgtattcctatacggagtccgatagcggcgaaccagatcacacaacagtaacaaattccacgagtacccagcaggggagcctgttccgccctaaagcctctcggacacctacaccacagaacccaccaaaccccccgagtcagcagtctacactgtaccgcccccctagcaaggctggcgtgcagaaagagggcgagaaccgagaacgcatgtgcgtagcatcttccagtagcgccctgagatggtgggggagtctactgccctgggagctgcacggcgccggcgaagtggcggtgtctctgctctggaccaggtctggcgctggaatatggcgcgaacgtggatcgggggggtag

SEQ ID NO: 56669 - DNA, 6519 bp, Artificial Sequence
  derived and/or modified sequence
atgtggggcctgctgatctggaccctgctggccctgcaccagatcagagccgctagggcccaggatgacgtatcgccgtacttcaaaacggagccagtacgcacacaggtgcacctggaaggaaatcggcttgtgttgacatgcatggcggagggaagctggcctctcgaattcaaatggctgcacaataatagggagctgaccaaatttagcctcgagtacaggtatatgatcacttcactagatcgaacccacgccgggttctaccgatgcatcgtgcggaaccgcatgggcgccctcctacagcggcagacagaggttcaagtggcctacatgggcagtttcgaagagggcgaaaaacaccagtcagttagccacggcgaggcagcggtgattcgcgcaccccgcattgcatcgttcccccagccccaggtgacctggttcagggacggtcgtaaaatacctccgtcctctaggatcgctatcaccctggagaacacgctggttatactctctacggtagctcctgacgccggcaggtattatgtccaggcagtgaatgacaagaacggagataacaagaccagtcaaccgattaccctgactgtcgaaaacgtgggaggccctgctgaccctatagcacccaccatcatcatacctcccaagaacacctctgtggtggccggaacctccgaggtgactttggaatgcgtcgccaacgcccggccacttattaagctgcatatcatctggaagaaagatggggtgctgctgtcaggaggtatatccgaccataatagacggctgactatccccaaccccacaggcagtgatgctggatattatgagtgtgaggccgtacttcgctcgtcttctgtcccttctgttgtcagaggggcctacctgagcgtattggagccaccacagtttgtgaaagaacccgaacggcatatcactgccgaaatggagaaggtggtcgacattccatgccaggccaagggagtgcccccaccaagtattacctggtacaaggatgcggctgtcgtcgaagtcgaaaaattaacacgattcaggcagaggaacgacgggggtctgcagatctctggcctcgtgccagacgataccgggatgtttcagtgcttcgccagaaatgctgccggtgaggtgcagaccagcacctacctggcggtgacctcaatcgcacctaatatcacaaggggacccttggacagcaccgtgatcgacgggatgagcgtggtactagcatgtgagacaagcggcgcccctaggcccgctattacatggcagaagggggagcgcatcttggcaagtggatcagttcaactgcctcgattcactcctctcgagagtgggtcactgctgattagtcccacacacatctcagacgccggaacctacacttgcctggctactaatagtcgcggcgtggatgaggcgtcggcagacctggtggtgtgggctaggactcgtatcacaaagcccccacaagaccagtccgtgattaaagggactcaggcctcaatggtgtgcggagtcacccatgacccgagggttactattagatacatttgggagaaagatggcgccacattagggaccgaatctcacccccggatcagactggatcgtaacggaagtctgcatatcagccagacctggtccggggatattggcacatacacttgtagggtcatcagcgccggcggcaatgactcacggagcgcacatttaagggttcgccagctgcctcacgctcccgaacatcccgtggcaactcttagtacggtggaacggcgggcaataaacctgacttggacgaaaccctttgatggaaacagtcccctcattcgctatattcttgaaatgagcgagaacaatgcaccgtggacagtgctgttggcatccgtggatccaaaggccacctccgttacagtgaagggattggttcccgccagatcatatcaatttcgactctgtgcagtgaacgatgtggggaagggacaattctccaaagatacagagcgggtcagcctgccggaagaaccgcccacagccccccctcagaacgtgattgcttcgggacggacaaaccagtcaattatgattcagtggcagccccctccagaatcgcaccagaatggtatcctgaagggctacattattcggtattgcctggccggattaccagtggggtatcaattcaaaaacattaccgacgcggacgtcaacaatctactgctggaggacctgattatctggaccaattatgagatcgaagtggccgcgtataacagtgccggtctaggggtctactcatctaaagtaacagagtggacccttcaaggggtaccaacggtgccccctggcaatgtccacgctgaagcgaccaactcaaccaccatccgctttacctggaatgctcccagcccgcagttcatcaacgggattaatcagggctataaactgatcgcttgggagcccgagcaagaggaagaagtgaccatggtcactgcacggcctaacttccaggacagcatccatgtgggctttgtatcaggccttaagaagtttaccgagtatttcacttcagtcctgtgtttcaccacgcccggagatggccctcgatctactccccagctggtgagaacccacgaagacgtgccagggccggtcgggcacctaagcttcagcgagattttggataccagtcttaaggtgtcctggcaagagcccggggagaagaatggcattctgaccggataccgaatcagctgggaggaatataatcgtacgaacactagagtgactcactatttacctaatgtcaccctggagtatagggtcaccgggctgacggccctcacgacttacaccattgaggttgctgctatgacctcaaaagggcagggacaggtttcagcatcaaccataagttcgggagtgcctccagagctgcctgggcctccgactaatctgggcatctctaatatcggaccgcgttctgtcacattgcagtttcggccaggctacgatggaaagacatcaatctcacggtggttggtggaggcccaggtgggagtcgtaggagaaggggaggaatggctgctgattcatcagctcagcaacgagcctgacgcccgtagcatggaagtgccggatctcaatccattcacctgttactcctttagaatgcgacaagtgaacattgttggtacctctcctccgtcgcagccttctcgtaagattcagaccctgcaagccccgcccgacatggccccggctaatgtctctctgcgcacagctagcgaaactagcttatggctaagatggatgccgctgccagaaatggaatacaacgggaatcctgaatctgtaggttataagataaagtactcacggagcgatggccatggcaagaccctctctcacgtcgtccaggaccgggtggaacgcgattataccatagaggacctggaagagtggactgagtaccgagtgcaggttcaggcctttaatgccatcggatcgggtccctggtcccagactgtcgtggggcgtacccgggaaagcgttcccagctccggtccaacaaatgtgtcagcgcttgcaacaacaagctctagcatgcttgttcgctggtctgaggtcccggaggccgatcggaacggtttagtgctcggttacaaagtcatgtacaaagagaaggatagtgatacccaacctaggttttggctggtggaggggaattcttcacgctcggcccagctgacaggactggggaaatacgtcctgtacgaagtgcaggtcctggccttcactagaataggtgatggaagcccatcccatcctccaatcttggaacggacgttagatgacgtgccaggacctcctatgggtattctgtttcccgaggtacgaaccacatccgtgcgcttaatctggcagccacccgctgcaccgaatgggataatcttggcttatcagataacccaccgccttaacaccactaccgctaacaccgcgacggtggaagtgctcgctccgtctgcccgccagtatacggccaccggtctcaagcctgaatccgtatacctgttccgtataaccgctcaaacacggaagggatggggggaggctgcagaggccctagtcgtgaccaccgaaaagagagataggccccaaccacctagtagacctatggtgcagcaggaagatgtgcgggcccggtccgttctgctgtcctgggaacccggctccgatgggctctctcccgtgcgatactatactattcagacccgcgaactgccatctgggagatgggctctgcactctgcctctgtttcccacaatgcctcaagttttatcgttgatcggctcaagccattcacttcgtacaagttcagagttaaagccactaacgatattggagatagcgaattctcagaagaaagcgagtctctgaccacactccaagccgcgcccgacgaggcgccaaccattctgagcgtgaccccccatactacaacttctgtcctgatccggtggcaaccaccagctgaggacaagatcaatggaatcttactgggatttcggatcaggtatcgcgaactgctctatgaagggcttcgcggattcaccctgcgcggcatcaataatccaggtgccacatgggctgagctcacctccatgtatagcatgcggaacctttcacgcccgtctctaacacagtacgagctggacaacttaaacaagcaccgcagatatgagataaggatgagcgtgtataacgctgtgggtgaaggcccatcaagccctccccaggaggtctttgtgggcgaggctgtgccaactgcggctccccgaaatgtggtagtgcatggagccactgcgacacagctggacgtcacctgggaacctcccccacttgatagccaaaacggcgacatccaggggtacaaaatttacttctgggaggctcagagggggaatcttacggagcgcgtgaaaaccctatttcttgcggagaactccgtgaagctgaagaatctcacaggctacacagcttatatggtttccgtcgcagctttcaacgcggctggggacggacctcgctcgaccccaacccaaggacaaacccagcaagctgccccgtcagcaccctcatctgttaaattctccgaacttacgacaacctctgttaatgtctcatgggaagcgccccagtttccgaacggaatactggaggggtatagactggtttatgagccttgctccccagtcgatggcgtgagcaaaattgtgaccgtagacgtcaagggcaattctccactgtggttgaaggtgaaggaccttgcggaaggcgttacctataggtttagaatacgtgccaagacatttacatatggaccagaaatagaggctaacgtgactactggacctggcgaaggggcccctgggccacctggagttcccatcatcgtcaggtatagttcggcgattgccatccactggtcttctggggaccccggcaaggggccgattacccggtatgttatcgaagcaagaccgtctgacgagggactgtgggacattctcatcaaggatatccctaaggaggtgtccagctacaccttctccatggacatcctgaaaccgggcgtgagttatgattttcgggtgattgctgtcaatgattacggattcggcactccttcatccccctcgcagagcgtccccgcacagaaggcaaaccccttctatgaagagtggtggttccttgtagttattgccctggtgggtttgatcttcatcctcctgctcgtgtttgtgcttataatccgggggcagagcaagaaatatgctaagaaaactgactcaggcaatagtgccaaatcaggtgctttagggcactccgagatgatgtccctagatgagtcatcctttcccgccctggaattgaataataggcgtctgagtgtgaaaaattcattttgcagaaagaatggtctttatacaaggtccccaccacgcccctctcccggcagcctccactactccgacgaggacgttaccaaatataatgacctaatacccgcagagtcttctagcctcacagaaaaaccctctgagatctccgattctcagggatccgattctgagtacgaggtggactccaatcaccagaaggctcactccttcgtgaatcattacatctcagatcctacctactacaatagctggcgccgccagcaaaagggtatctctcgggcacaggcttatagttacacagagagcgactccggagaaccggatcacactaccgtaacaaacagcacgtccactcagcagggtagcctctttcgaccaaaagcatcacgaacccctaccccacagaacccgcccaatccgcctagccagcagtcaaccctgtatcggccgccttctagcctcgcacccggatcaagagcgcctatcgccgggttttcctccttcgtctag

SEQ ID NO: 56670 - DNA, 6650 bp, Artificial Sequence
  derived and/or modified sequence
atgtgggggctgctgatttggacactcctggcactgcaccagatcagggccgctagggcccaggacgacgtgagcccctatttcaagaccgagccagtccgaacacaagtgcacctggagggaaatagactggtgctgacctgtatggccgaagggagctggcctcttgaatttaaatggctccataataaccgcgaactaactaagtttagtctggaataccgatacatgatcacttcactcgacagaacccatgccggattctataggtgtatcgtcaggaatagaatgggggctttgctgcagagacagactgaggttcaagtggcctacatgggctcatttgaggagggtgagaaacaccagagtgtgagtcacggggaggctgctgtgatcagggccccacgaatagcctccttcccgcaacctcaggtgacttggttccgggacggcaggaaaatccccccaagctcccgaatcgcaataaccctggaaaacaccctcgtcatcttatcaacggttgcacccgacgcgggtcggtattacgtgcaggccgtgaatgacaagaatggggacaacaaaacttcccagccaattactctcacggtcgaaaatgtgggcggtccagcggaccccatagccccaacaatcatcatcccaccaaagaacacatctgttgtggccggaaccagcgaggtcactcttgagtgcgtggccaacgcacggcctttaatcaaactgcatattatctggaagaaggacggggtcctgctcagcggtggcatcagcgaccataaccgccgtcttacgattcctaatcctactggttctgacgccggatattacgaatgtgaggccgtgcttagatcgagcagcgtcccctctgttgtcagaggcgcttacctgagcgtcctggagcctcctcagttcgttaaggaacctgaacggcacattactgcagaaatggagaaggtggtggatatcccgtgccaagctaaaggtgtgccaccaccttccattacctggtacaaggatgcagccgtggtggaggtagagaaacttaccaggttccgacagagaaatgatgggggactgcagattagcggactcgtacctgacgataccggcatgtttcagtgcttcgcgagaaatgcggcaggagaggtgcagaccagtacctatttggccgtcacgagtatcgccccaaacattacccggggacctcttgactccactgtcatagacggcatgtcagtggttcttgcgtgtgagacaagcggagccccaagacccgctattacatggcagaagggcgaacgtattttagcttccggcagtgtgcaactgccgaggttcactcctctcgagagcgggtcgctgttgatttctccaacccacatctctgatgcagggacctacacttgtctagcaaccaactccagaggcgttgacgaagccagtgccgacctggtagtgtgggctcggaccaggatcaccaagcccccacaggaccagagcgtgataaagggaacacaggcctcaatggtgtgcggagtcacacatgatccacgtgtgactatccgatacatctgggagaaggatggggcaacgctgggcacagagagccatccccgtatacgcttggacagaaacggatcgctgcatattagtcagacctggagtggagatattggtacttacacatgcagggtcatcagcgcaggtgggaacgactctcggtcggcacatctgagggtccgacagcttcctcacgccccagagcatccagtggcaacattaagtacggttgaacgccgtgctataaaccttacctggacaaaaccctttgacggcaatagtcccttgattcgttacatactggagatgagcgagaacaatgcgccttggactgtgctgctcgcttccgtagacccaaaggccacatccgtgaccgtgaagggactggtgcctgcaagaagttaccagttccgattgtgcgccgtgaacgacgtcgggaaagggcaatttagtaaggacaccgagagagtttcactgccggaggaaccccctacagcaccaccacagaacgttattgccagtgggcgaaccaatcagtcaataatgatacagtggcagcctcctccggagagtcaccaaaacgggatacttaagggatatatcatacgatattgtctcgccggactgcctgtggggtaccaatttaagaacatcaccgacgctgacgtgaacaatcttctcctcgaagatttgattatctggaccaattacgagatcgaggtggccgcttataattctgctgggctgggcgtctacagcagcaaagttactgagtggaccttgcagggagtgccgactgtaccccctggcaacgtccacgcagaagccaccaattccaccaccatacggttcacctggaacgccccatctcctcaatttatcaacggaattaaccagggctataagttaatcgcatgggaacccgagcaggaggaggaggtgactatggtaaccgcaaggcctaattttcaagatagcatccacgtcggcttcgtttccggccttaaaaaattcacagagtacttcaccagtgttctgtgcttcacaacaccaggagacggaccgcgtagcactccgcagctggttcgcacacacgaggacgttcctggcccagtcggccacttgagtttctcggagatactggacacatccctcaaggtatcttggcaggagcccggagaaaaaaacggcatactgacaggatatcggatctcttgggaggagtataaccggactaacaccagggtaactcactatcttccaaacgtgacactcgagtaccgtgtgaccggtctcacagcattgacaacttacactatagaggttgcagctatgaccagcaagggccagggccaagtcagcgcaagcaccatctccagcggagtcccgcctgaactacccggtcctcctacaaacctgggaatttctaacatcgggcctagaagtgttaccctacagtttagaccgggatacgatggtaaaacatctatcagtagatggctggtggaggcccaggttggggtggtgggagaaggagaggagtggctgctcattcaccagctgagtaatgagccggacgccaggagcatggaagttcccgacctgaatcccttcacatgctacagctttcggatgaggcaggtcaacatcgtggggacttcgccgcctagtcagcctagtcgaaaaattcagaccctccaggcaccacccgatatggcccctgccaacgtgtccctgagaactgccagcgaaacgagtctgtggttgaggtggatgcctctccctgagatggaatacaacggaaacccagaatcagtgggttacaaaattaagtattcgcgcagcgatggacatggaaagactctgtcacatgtggtccaggatcgcgtcgagcgagattacaccatcgaggaccttgaagagtggactgagtacagagtccaagtgcaggcttttaatgccatcgggagtggcccatggtcgcagactgtagtaggtcgtacaagggagtctgttccgtcctcagggccaacgaatgtcagcgctctcgctactacatccagtagcatgctggtgaggtggtccgaggtcccagaggctgaccgcaacggtctggttctgggctacaaagtgatgtataaggagaaggactctgacacacaaccccgattttggctggtggaaggcaattcatctcggtccgcacagctgacaggcttgggcaagtatgttctctatgaagtgcaggtcttagccttcacacgaattggggacggtagcccatcgcatccccctatccttgaacgaactctggatgatgttcccggtcctcccatggggattctgtttccagaagtccgaaccacctccgttcgactcatctggcaaccgccagccgcacccaatggcatcatactggcctaccagatcacacataggctgaacacaacgacagccaacaccgcaacggtggaggttctggcaccttctgctagacaatataccgcgaccggcctcaagccagagtccgtatacctgttccgcatcaccgcgcagaccaggaaaggttggggagaggccgcagaagccctcgtggtaactacagagaagcgggaccgcccacagcccccttcccgcccaatggttcagcaggaggacgttagggccaggagcgtcctactgtcatgggagccaggatccgacggcctgtctcccgtacgttactataccatccagacccgcgagctcccctccggcagatgggcattacactctgccagtgtgtcacacaatgcttcttccttcatcgtggatagattgaaaccattcacctcctacaaattccgggttaaagccaccaatgacataggagatagcgaattcagtgaagagtctgagtccctgacaactctccaggccgctccagatgaagcaccaactatcctgtcagttacaccccataccactacatctgtgctaatcaggtggcaacctccagctgaggacaagataaacggaatactgctcggatttaggattcgctatcgggagctgctgtatgaagggcttcggggatttacacttcggggaatcaataatcccggtgccacttgggctgaacttacctcaatgtactctatgcgcaatctgtctcgtccttccctgacacagtatgaacttgataatctcaataagcataggaggtacgaaatccggatgtcagtctacaacgccgttggcgaagggccaagcagtccccctcaggaggtcttcgtcggcgaggcagtgcccacggcagcccctcgcaatgtcgtcgtgcatggggcaaccgccacccagctcgatgtcacctgggagccccctcctcttgattctcagaacggagatatccagggatataagatctatttctgggaagcacagcgcggaaacttaactgagcgggttaagaccttgttcctggccgaaaattcagtgaaattgaaaaacttgacgggctatacggcatatatggtcagcgtggccgcttttaacgccgcaggagatggccctcgatcgacccctacacagggccagacacagcaagccgctccctccgcacctagttcagttaagttttcagagctgaccaccacgagcgtgaatgtatcctgggaggccccacaatttccaaatggtatcttggaggggtatcgcctcgtatacgagccctgcagccctgttgacggcgtttcaaaaatcgttacagtggatgttaagggaaactctcccctctggctgaaagtaaaggaccttgctgaaggagtgacttacagatttcgtatccgtgcaaaaacatttacttatgggcctgagatagaggctaatgtcacaacaggacctggagaaggagcccctgggcctcccggagtgccaataatcgtaaggtactccagtgctatcgccattcattggtccagtggagacccagggaaaggacccatcacaagatacgtcattgaggccaggcctagtgacgagggtctgtgggacatcttaattaaagacatcccaaaggaggtcagctcctacactttctctatggacatcctgaagccaggagttagttacgattttagggtgatcgccgtgaatgattacggattcggtacaccctcctcaccaagccagtccgtgcctgcccaaaaagcaaacccattctacgaggaatggtggttccttgtggtaattgctctcgtcggcctgattttcatcctcttgctcgtgttcgtgctcataattaggggccagtcgaagaaatatgccaaaaagaccgattccggaaactctgccaaatctggtgccctaggacactctgaaatgatgtccctagatgagagcagttttccagcactggaacttaataatcgcagactctctgtgaaaaattctttctgtcggaaaaatggattatatacaagatcacccccaagaccatcaccagggagcttacactactccgacgaggatgtaacaaagtacaacgacctaattcccgctgaatcatcttctttgactgagaaaccttcagagatctccgatagtcaggggagtgattccgagtatgaagtggacagtaatcatcaaaaggctcacagttttgtcaatcattacatttccgatccgacatattataacagctggcgccgtcaacagaagggaattagccgagcccaggcgtactcttacactgagagcgattccggagagcctgatcatactaccgttactaatagcacctcaacacagcagggttccctgttccgtcccaaggcgtcacgtacacctacaccacaaaacccccctaacccccctagccaacaatccactctgtacagacctcccagcaaagctggcgtgcagaaagagggggaaaatagagaacggatgtgcgttgctagctcatccagcgcgctgcgatggtggggttcacttttaccttgggaattacacggcgctggcgaggttgccgtttcattgttgtggacgaggagtggtgcaggtatatggcgggaaaggggctccggaggtta

SEQ ID NO: 56671 - DNA, 6518 bp, Artificial Sequence
  derived and/or modified sequence
atgtggggcctgctcatatggactctcctggcacttcatcagataagagctgctcgagcacaggatgatgtatcgccatatttcaagaccgagcccgtgcggacacaagtgcacctggaaggcaatcggctcgtgctgacctgcatggccgaaggaagttggccccttgagtttaagtggctacacaacaacagagaacttacaaagttctcactggaataccgctatatgattacgtctctggatcgcactcatgctgggttttataggtgtatcgtgagaaatcgaatgggcgctcttctgcagcggcagaccgaggtccaggtggcttacatggggtcatttgaagaaggagagaaacatcaatccgtctcacacggtgaggcagccgttatccgtgcaccccgaatagcttctttcccacagcctcaggtcacgtggtttcgggatggcagaaagatacctcctagctcgcgcattgccattactcttgagaatactctggtaattttgtccactgtcgcacccgatgccggacgatattatgtccaggcggtgaacgacaagaacggcgacaacaagacctcgcagccaataaccctgactgttgagaatgtgggcggtcccgcagacccaattgcacctaccatcattattcctccaaagaacaccagcgtggtggccggaacctctgaggtaactctggagtgcgtggccaacgctcggcctctgatcaagctgcatatcatctggaagaaggacggggtgctgctgtccgggggaatctcagaccacaaccggaggctgactatcccaaaccccacaggcagtgacgcaggatactacgagtgcgaggccgtgctgcgctcatctagtgtccctagcgttgtccgcggtgcctatctctctgtgctggaacctccccagttcgtcaaggagcccgagagacatataacagccgaaatggagaaggttgtggatatcccatgccaggcaaagggtgttccgccacccagtatcacatggtataaagatgccgctgtcgtggaggtggaaaaattgacacgcttccggcagcgcaacgatggcggtctgcagatatcagggttggtgcccgatgacactggcatgtttcagtgctttgcgagaaacgccgctggagaggtgcagacaagtacttatttggctgttacctcgatcgcaccgaacatcacaaggggccctctcgattccaccgtgatcgacggaatgagtgttgtgctggcatgtgaaacaagtggggctcctcggccagcgattacttggcagaagggggagagaatactcgcatccggctccgtccaacttcccaggtttactccccttgagtctggctcattgctgatctcgcccacacacatttctgacgcgggtacctatacctgtctcgccactaactcaaggggcgtagatgaggcatccgcagatctggtcgtctgggctcgtacaagaattacaaagccaccacaggaccagtccgtcataaagggcacccaggctagtatggtatgtggagtgacgcatgatcctcgggtaaccatccggtacatatgggaaaaggatggggcaactctgggcaccgagtcccacccaaggattagactggatagaaatgggagtcttcatatctcacaaacatggagcggtgatatcggcacctatacctgccgcgtgattagcgccggaggaaatgatagtcggagtgctcacttgcgggtaagacaactaccccatgcccctgagcatccagtggccacactttctacagtggagcgacgcgcaattaacttgacttggaccaaaccttttgatgggaatagtcccctcatcagatacatcctcgagatgagcgaaaataatgcgccatggaccgtgctactggcttccgttgatccaaaagctacctccgtcactgttaagggactcgtcccggcacggagttaccagttccggctgtgtgccgtcaacgatgtgggcaagggtcaattcagtaaagacacagaaagggtgtcactgcctgaagagcctcccacagcgccaccgcagaacgtcatcgcaagcggacggacaaaccagagtattatgatacagtggcagcctcctcccgagtctcatcagaatggcattcttaaagggtacattattcggtactgtctggccggactaccggtgggctaccagtttaagaatatcacggatgccgacgttaacaatctgctgctcgaagacctaatcatttggacaaactacgaaatagaggttgccgcttataattctgcgggtctgggtgtctacagctccaaggtcacagaatggacacttcaaggggtaccaacagtgcctcctgggaatgttcacgcggaagcaaccaactctacgaccatacgcttcacttggaatgcaccctctcctcagtttattaacgggatcaaccaaggctataagcttatcgcatgggaaccagagcaggaagaggaagtgaccatggtgacagcccgtccgaattttcaagacagcattcatgtgggattcgtgagcgggctgaaaaaattcaccgaatacttcacgtctgtgctgtgtttcaccactcctggcgatggtccacggagcacgcctcagctagtacgcacccatgaggatgttcccggacccgtgggtcatctatcattcagcgaaattctcgacaccagtttgaaggtgtcctggcaagagcccggagagaagaatggtatcctgaccggttaccgcatatcttgggaggagtacaatcgaaccaatacacgggtcacacattatctgccaaacgtgacactcgagtaccgtgtgacggggctgacagccctgactacttacacgattgaggtggctgcaatgacctccaaggggcagggccaagtgtccgcgagcacaatcagcagcggagtgcctccagagttgcccggaccccctacaaatctcggaatcagcaatatcggacctcgttccgtgacccttcaatttcgtcccggatacgacggaaaaacatccataagtaggtggctggtcgaggcgcaagtgggcgtggtgggcgagggcgaagagtggctcctgattcaccaacttagcaatgagcccgacgctcgatctatggaggtgccggatctcaaccccttcacctgttatagctttcggatgcggcaggtgaacatcgttggtactagtccaccctcccagccctctcgaaagattcagacactccaggctcccccagacatggcacccgctaacgtctcattgcgaactgcttcagagactagcttatggttgcgctggatgcctctgccagaaatggagtacaatggtaatcccgagtctgtcggctacaagatcaaatacagcaggagcgacgggcatggtaaaacgctcagccatgtagtccaggaccgggtcgagagggactatactatcgaagacttagaagagtggacagagtacagggtccaggtgcaggcattcaatgccataggttcaggaccctggtcccagaccgtagttggcaggaccagagagtctgtcccaagctccgggccaacaaatgtgagcgcccttgcgacgacctcttcgagtatgctggtccgctggtcagaggtccccgaagcagataggaacggccttgtactggggtacaaggttatgtacaaggagaaggattctgacacacaaccaaggttttggctggttgaaggcaattcttccaggtcggctcaattaactggcctggggaagtatgtgctttatgaagtgcaggtcctagcctttactcgtatcggggatggatctccaagccaccctcctattttggagcgtacactagacgacgtaccaggacctcccatgggaattcttttccccgaggttagaaccaccagcgtccgcctgatttggcagcctccagccgcaccgaatggcattatcctcgcttatcagataactcaccgacttaacacaacaactgctaacactgctacagtggaagtactggctcccagcgccaggcaatacactgctaccgggctcaaacccgaaagtgtgtacctgtttaggattacagcccagacaagaaaggggtggggggaggcggcagaggcactagtagtcactaccgagaagagggaccgccctcagccaccctcccgccctatggtccaacaagaagatgtgcgggcacgaagcgtcctactcagttgggagcctgggtccgacggtctttctcccgttcgctactacaccatacaaacgagggagctgccttctggtagatgggcgctccattctgcaagcgtgtctcataatgcctcctcattcatagttgatagattgaagcccttcaccagctataagttccgcgtcaaggccaccaacgacatcggagattccgagttttcggaagaaagcgaatctcttacaaccctgcaggctgctcccgatgaagctcctaccatcctgtctgtgacaccccacacaactacaagcgtattgattaggtggcaaccgccagcagaagataagataaatggaattctcctgggcttcagaattaggtacagggagctgctgtatgaagggcttagggggttcaccctacgcggtatcaataatcccggagccacatgggccgaactgacttcaatgtacagcatgcgcaacctgtcccggccttctttgacgcagtatgagttggacaacctgaataagcaccgcagatacgagatacgcatgtcagtgtataatgctgtgggggagggcccatccagtcctccccaggaggttttcgtcggcgaggcagttcccactgcagcccctcgaaatgtcgttgtgcacggtgccaccgccacccagcttgacgtgacttgggagccccctcctctcgactctcagaacggtgacattcagggatataaaatctacttttgggaggctcagagagggaacctgacagaaagggtcaaaaccctcttcctcgcagaaaatagtgtgaagttgaaaaatctcaccggttacacagcatatatggtgtcagtggctgccttcaatgctgcaggcgatggtcctcgaagcacgccgactcagggccaaacccagcaggcagccccatctgcccctagttccgtcaaattctctgagctaaccactactagtgttaacgtgagctgggaggcaccacagtttcccaacggcattctggagggctaccggcttgtatatgaaccgtgttcccccgttgacggcgttagcaagatagttacagtcgacgtcaaaggcaatagcccactttggttgaaggtgaaagacctggctgagggggttacctaccgtttccgcatcagagcaaaaacatttacctacggcccagaaattgaagccaatgtgacaactggccctggggagggggctcctggaccccctggagtccctattatcgtgcgctactcatcagcaattgctattcattggtcttcaggcgatcccggtaagggacccatcacccgctacgtgattgaagcacggccaagtgacgaagggctatgggacatattaattaaggatatccccaaggaggtgagctcatacacatttagtatggatatattgaagcctggagtctcttatgactttcgagttattgcagtcaatgactatggttttgggacacctagttcacccagccagtcagtccctgcacagaaggccaacccattctacgaagagtggtggttcctggtggtgatcgccctcgtcggcctgattttcatacttttacttgtctttgtcctgataatccgcggtcaatctaaaaagtacgccaagaagactgacagcggcaatagcgctaaaagtggggctctaggccacagcgaaatgatgtctctggatgagtcctctttccctgccctcgaacttaataatagaaggctctctgtgaaaaactcattttgcagaaaaaacgggctgtacacaagatcaccaccccgtccctcccctggtagcctacattatagtgacgaagatgtcaccaaatacaatgacttgatccccgcagaaagttccagcctcacagaaaagccgtcagaaattagcgatagccagggtagtgattctgagtacgaggtggatagtaaccaccagaaggcccactcgtttgttaaccactacatctcagaccctacctattacaatagttggcgacggcagcagaagggtattagccgagcacaagcttactcttacaccgaatccgactctggcgaaccagaccataccacagtgacaaactcaacaagtactcagcaagggagcttattccgccctaaggcatcccggacacccacaccccagaatccacctaaccccccttcccagcagtctacactctataggcctcctagctcactcgctcctggatcacgagctccgattgcgggtttctcgtcctttgtgta

SEQ ID NO: 56672 - DNA, 6651 bp, Artificial Sequence
  derived and/or modified sequence
atgtgggggcttttgatctggacactgctagctctgcatcagatccgcgcggccagagcccaagatgatgtgtccccgtatttcaagacagagcctgtgcggacacaggtgcacttggaaggaaaccgcctggtgcttacatgcatggccgagggcagctggccactggagttcaagtggctccacaacaacagggagctgaccaagttctccctggaatacagatacatgatcaccagcctggaccgcacccacgctggcttttaccgttgcatcgtgcggaaccgaatgggggccctgctgcagcggcaaaccgaggtccaggtggcctacatggggagctttgaggaaggtgagaagcaccagagcgtctcccacggagaagcagctgtcatccgtgccccgcgcatcgccagcttcccccagccacaggtgacctggttccgggacggccgcaagatcccgcccagcagccgcatagccatcacgctggagaacacccttgtcatcctgtcaacggtggcccctgacgcaggtcgctactatgtgcaggctgttaacgacaaaaacggggataacaagaccagccagcccatcacgctcaccgtggagaatgtaggggggcctgcagaccccatcgcacccaccatcatcatcccacctaaaaacaccagcgtggtggccggcacctcagaggttaccttggagtgtgtggccaatgccaggcccctgatcaagctacatatcatttggaagaaggacggggtattgctgtcgggcggcatcagtgaccacaaccgccggctcaccatccccaaccccaccggcagtgacgccggctactacgagtgtgaggctgtcctgcgcagcagcagcgtcccctctgttgtccggggcgcctacctctcagtgctggaaccgcctcagtttgtcaaggagccagaaagacacatcactgcggagatggagaaggtggtggacatcccctgtcaggccaaaggtgtgccgccgccctccatcacctggtacaaggacgcagccgtggtggaggtggagaagttgacccgcttccggcagcgcaacgacgggggcctgcagatcagcggcctggtgcccgatgataccggcatgttccagtgcttcgcccgcaatgcagccggcgaggtgcaaacttccacctacctggctgtcaccagcatcgcccctaacatcaccagaggccccctggacagcacggtgatcgatggcatgtcagtggtgctagcatgtgagacctcgggggcgccccgaccagctatcacttggcagaaaggggagcgcatcttggccagtggctctgtgcagctgcctcgcttcacacccctggagtcgggcagcctcctcatcagccccacacacatctccgatgcggggacctacacctgcctggccaccaactctcggggggtcgatgaggcctcagcagacctagtcgtttgggctcggacccgcatcaccaagcccccccaggatcagagtgtcatcaagggcacccaggcctccatggtgtgcggagtgacccacgacccccgagtaaccatcaggtacatctgggagaaggacggggccaccctgggcacggagagccatcctcgtatccgcctggacagaaacggctccctgcacatctcacagacgtggtcgggagacatcggcacgtacacctgccgggtgatctcagcaggaggcaacgactctcgcagtgcccacctgcgagtcaggcaactgccccacgcgcccgagcacccagtggccactctcagcaccgtggaaaggcgagccatcaacctgacgtggaccaagccctttgatggcaacagccccctgatccgctacattctggagatgtcggagaacaatgccccctggactgtactcctggccagtgtggaccccaaagctacctcagtgacagtcaagggcctggttcctgcacgctcctaccagttccgtctttgtgccgtcaacgacgtggggaaaggacagttcagcaaagacaccgagagggtctccctccccgaggagccccccacggcccctccacagaacgtcatcgccagcggtcgaaccaaccagtccatcatgatccagtggcagccgcctcctgagagccaccagaatggaattctcaagggttacatcatcaggtactgcctggccgggctgcccgtggggtaccagtttaagaacatcacggatgctgatgtgaacaacctgctgctggaggatctcatcatttggaccaactacgagatcgaggtggctgcttacaacagcgctgggctgggggtctacagcagtaaagtcaccgagtggacgctgcagggagttcccacggtccctccgggcaatgtgcacgcggaagccaccaattccacgaccatccgcttcacctggaacgcccccagcccccagttcatcaacggcatcaaccagggctacaagctgatcgcctgggagccggaacaggaagaggaggttaccatggtgaccgcccggcctaactttcaagacagcatccacgtgggcttcgtgtctggcctgaagaagttcaccgagtacttcacctcagtgctgtgtttcaccacccccggggacgggccacgcagcaccccgcagctggtgcgcacccatgaggatgtgcctgggcccgtgggacacctgagcttcagtgagatcctggacacatcgctgaaggtcagctggcaagagccgggagagaaaaatggcatcctcacagggtaccggatctcctgggaggagtacaatcgaaccaacacccgtgtgacccactacctgcccaacgtgaccctggagtaccgtgtcacgggcctcaccgcgctcaccacctacaccatcgaggtggccgccatgacctcaaagggccagggccaagtgtccgcctccaccatctcctctggggtgcccccagaactcccagggccccccaccaacctgggcatttccaacatcggcccccgctctgtgaccttgcagttcaggccaggctacgatgggaaaacctccatctcccgctggctggtggaagcccaggtaggcgtggttggggagggagaggagtggttgctgatccaccagctctccaatgagcccgatgcccgctccatggaggtgcccgacctcaaccccttcacctgctacagcttccgcatgcgccaggtgaacatcgtgggcaccagcccccccagtcagccttctagaaagatccagaccctgcaggcaccccctgacatggccccagccaatgtgtctctgcgcacagccagtgagaccagcctgtggctgcgctggatgcctctcccggagatggaatacaatgggaaccctgagtccgtgggctataagatcaagtacagccggtcagacgggcatggcaagacgctgagccacgtggtgcaggaccgtgtggagcgggactacaccatcgaggacctggaggagtggacagagtaccgcgtccaggtccaggccttcaacgccatcgggagcgggccctggagccagacggtggtgggcaggacccgggagtcagttccctcttccggccccaccaatgtgtctgcactggccaccacctccagcagcatgctggtgcgctggagcgaggtccccgaggctgatcgcaacgggctcgtgctgggctataaggtgatgtataaggagaaggactcggacacccagccccgattctggctggtggaaggcaactcgtctcgcagtgcccagctcaccggcttgggcaaatacgtgctctatgaagtccaggtgctggccttcacacgcatcggggacggcagccccagccaccctcccatcctggagcggacgctggatgatgtcccaggaccacccatgggcatcctgttcccagaggtgcggaccacgtctgtgcggctgatctggcagccccctgccgcccccaatggcatcattcttgcttaccagatcacacaccggctcaacaccaccacggccaacaccgccactgtggaggtgctggcacccagcgcccggcagtacacagccacgggcctcaagccagagtctgtctacctgttccgcatcacggcccagacccgcaagggctggggagaagctgccgaggccttggtggtgaccaccgagaagagagaccgtccgcagccccccagcaggccgatggtgcagcaggaggatgtgagagcacgcagcgtgctgctgtcctgggagccagggagcgacgggctctcccctgtgcgctactacaccatccagacccgcgagctgcccagcggcaggtgggcactgcactcggcctccgtgagccacaatgcctccagcttcattgtggacaggctgaagcccttcacgtcctacaagttccgagtgaaggcgaccaatgacattggcgacagcgagttcagcgaggagtcggagtcactgaccaccctgcaggctgcccccgatgaagcacccaccatcctctccgtgacgccccacaccaccacctccgtgctaatccgatggcagccgccagcagaggacaagatcaatggcatcctcctgggcttccggatccgataccgggagctgctctatgaaggactgaggggcttcacgcttcgaggcatcaacaacccaggggccacatgggctgagcttacctccatgtactccatgcggaacctgagccggcccagcctcacgcagtacgagctggacaacctgaacaagcacaggcggtacgagatacggatgagcgtgtacaacgctgtgggtgaggggccctccagccccccgcaggaggtctttgttggggaggcagtgcccacagcagcacctcgtaacgtggtcgtccacggcgccacggccacacagctggacgtgacttgggagccacctccgctggacagccagaatggagacatccaggggtacaagatttatttctgggaagcccagcgggggaacctcacagagcgagtgaagacgcttttcctggctgagaacagcgtgaagctcaagaacttgactggctacacggcctacatggtcagcgtggccgccttcaacgccgctggggatgggcctcggagcacccccacccaaggccagacccagcaagcagcccccagcgctcccagctcggtcaagttcagtgagctgaccacaacctcagtgaatgtgtcctgggaagccccgcagttccccaatggcatcctggagggctacaggctggtgtacgagccctgcagccccgtggatggagtcagcaagatcgtgaccgtggacgtgaaggggaacagccccctgtggctgaaggtgaaggacctggcggagggggtgacctacaggttccgcatcagagccaagaccttcacctacgggccggagatcgaagccaacgtcaccacgggccccggagaaggtgccccaggaccgcctggcgtgcccatcatcgtgcggtacagctctgccatcgccattcactggtccagcggagacccgggcaaagggcccatcacccgctacgtcatcgaggccagaccttcagacgagggactatgggacatcctcatcaaagacatccccaaggaggtgagctcctacacgttcagcatggacatcctgaagccgggcgtgagctatgacttccgggtcatcgcggtcaacgactatggtttcggcacccccagcagcccctcccagtctgtgccagcccagaaagccaaccccttctatgaggagtggtggttcttggtggtcattgccctggtcggcctcatcttcatcctgcttctggtcttcgtgctcatcatccggggccagagcaagaagtacgccaagaagacagactcggggaacagtgccaagtctggagccctaggccacagcgagatgatgagcttggatgaaagcagcttccctgccctggaactcaacaacaggcggctctccgtcaagaactctttctgccgaaagaacggcctgtacaccaggtctccccccaggcccagcccaggcagcctgcactactcggatgaggatgtcaccaaatacaacgacctcatccctgcagagagcagcagcctgacggagaagccctcagaaatctccgactctcagggaagtgacagcgagtacgaggtcgactcaaaccaccagaaggcccactcctttgtcaaccactacatcagtgaccccacatactacaactcgtggcggcgacagcagaagggcatctcgagggcacaggcctacagctacacggagagcgactcgggtgagccagaccacaccaccgtcaccaacagcaccagcacccagcagggcagcctctttcggcccaaggccagtcggactccaacgccccagaacccccctaaccccccaagtcagcagagcaccctctaccgtccccccagcaaagccggcgttcagaaggagggagaaaaccgtgagaggatgtgtgtggccagcagctcttcagctttgagatggtggggttcactgctcccttgggaattacacggagctggggaagtggctgtgtcactgctatggacacggagtggggcgggcatctggagagagagagggagcggaggctaa

SEQ ID NO: 56673 - DNA, 10721 bp, Artificial Sequence
  derived and/or modified sequence
atgtgggggcttttgatctggacactgctagctctgcatcagatccgcgcggccagagcccaagatgatgtgtccccgtatttcaagacagagcctgtgcggacacaggtgcacttggaaggaaaccgcctggtgcttacatgcatggccgagggcagctggccactggagttcaagtggctccacaacaacagggagctgaccaagttctccctggaatacagatacatgatcaccagcctggaccgcacccacgctggcttttaccgttgcatcgtgcggaaccgaatgggggccctgctgcagcggcaaaccgaggtccaggtggcctacatggggagctttgaggaaggtgagaagcaccagagcgtctcccacggagaagcagctgtcatccgtgccccgcgcatcgccagcttcccccagccacaggtgacctggttccgggacggccgcaagatcccgcccagcagccgcatagccatcacgctggagaacacccttgtcatcctgtcaacggtggcccctgacgcaggtcgctactatgtgcaggctgttaacgacaaaaacggggataacaagaccagccagcccatcacgctcaccgtggagaatgtaggggggcctgcagaccccatcgcacccaccatcatcatcccacctaaaaacaccagcgtggtggccggcacctcagaggttaccttggagtgtgtggccaatgccaggcccctgatcaagctacatatcatttggaagaaggacggggtattgctgtcgggcggcatcagtgaccacaaccgccggctcaccatccccaaccccaccggcagtgacgccggctactacgagtgtgaggctgtcctgcgcagcagcagcgtcccctctgttgtccggggcgcctacctctcagtgctggaaccgcctcagtttgtcaaggagccagaaagacacatcactgcggagatggagaaggtggtggacatcccctgtcaggccaaaggtgtgccgccgccctccatcacctggtacaaggacgcagccgtggtggaggtggagaagttgacccgcttccggcagcgcaacgacgggggcctgcagatcagcggcctggtgcccgatgataccggcatgttccagtgcttcgcccgcaatgcagccggcgaggtgcaaacttccacctacctggctgtcaccagcatcgcccctaacatcaccagaggccccctggacagcacggtgatcgatggcatgtcagtggtgctagcatgtgagacctcgggggcgccccgaccagctatcacttggcagaaaggggagcgcatcttggccagtggctctgtgcagctgcctcgcttcacacccctggagtcgggcagcctcctcatcagccccacacacatctccgatgcggggacctacacctgcctggccaccaactctcggggggtcgatgaggcctcagcagacctagtcgtttgggctcggacccgcatcaccaagcccccccaggatcagagtgtcatcaagggcacccaggcctccatggtgtgcggagtgacccacgacccccgagtaaccatcaggtacatctgggagaaggacggggccaccctgggcacggagagccatcctcgtatccgcctggacagaaacggctccctgcacatctcacagacgtggtcgggagacatcggcacgtacacctgccgggtgatctcagcaggaggcaacgactctcgcagtgcccacctgcgagtcaggcaactgccccacgcgcccgagcacccagtggccactctcagcaccgtggaaaggcgagccatcaacctgacgtggaccaagccctttgatggcaacagccccctgatccgctacattctggagatgtcggagaacaatgccccctggactgtactcctggccagtgtggaccccaaagctacctcagtgacagtcaagggcctggttcctgcacgctcctaccagttccgtctttgtgccgtcaacgacgtggggaaaggacagttcagcaaagacaccgagagggtctccctccccgaggagccccccacggcccctccacagaacgtcatcgccagcggtcgaaccaaccagtccatcatgatccagtggcagccgcctcctgagagccaccagaatggaattctcaagggttacatcatcaggtactgcctggccgggctgcccgtggggtaccagtttaagaacatcacggatgctgatgtgaacaacctgctgctggaggatctcatcatttggaccaactacgagatcgaggtggctgcttacaacagcgctgggctgggggtctacagcagtaaagtcaccgagtggacgctgcagggagttcccacggtccctccgggcaatgtgcacgcggaagccaccaattccacgaccatccgcttcacctggaacgcccccagcccccagttcatcaacggcatcaaccagggctacaagctgatcgcctgggagccggaacaggaagaggaggttaccatggtgaccgcccggcctaactttcaagacagcatccacgtgggcttcgtgtctggcctgaagaagttcaccgagtacttcacctcagtgctgtgtttcaccacccccggggacgggccacgcagcaccccgcagctggtgcgcacccatgaggatgtgcctgggcccgtgggacacctgagcttcagtgagatcctggacacatcgctgaaggtcagctggcaagagccgggagagaaaaatggcatcctcacagggtaccggatctcctgggaggagtacaatcgaaccaacacccgtgtgacccactacctgcccaacgtgaccctggagtaccgtgtcacgggcctcaccgcgctcaccacctacaccatcgaggtggccgccatgacctcaaagggccagggccaagtgtccgcctccaccatctcctctggggtgcccccagaactcccagggccccccaccaacctgggcatttccaacatcggcccccgctctgtgaccttgcagttcaggccaggctacgatgggaaaacctccatctcccgctggctggtggaagcccaggtaggcgtggttggggagggagaggagtggttgctgatccaccagctctccaatgagcccgatgcccgctccatggaggtgcccgacctcaaccccttcacctgctacagcttccgcatgcgccaggtgaacatcgtgggcaccagcccccccagtcagccttctagaaagatccagaccctgcaggcaccccctgacatggccccagccaatgtgtctctgcgcacagccagtgagaccagcctgtggctgcgctggatgcctctcccggagatggaatacaatgggaaccctgagtccgtgggctataagatcaagtacagccggtcagacgggcatggcaagacgctgagccacgtggtgcaggaccgtgtggagcgggactacaccatcgaggacctggaggagtggacagagtaccgcgtccaggtccaggccttcaacgccatcgggagcgggccctggagccagacggtggtgggcaggacccgggagtcagttccctcttccggccccaccaatgtgtctgcactggccaccacctccagcagcatgctggtgcgctggagcgaggtccccgaggctgatcgcaacgggctcgtgctgggctataaggtgatgtataaggagaaggactcggacacccagccccgattctggctggtggaaggcaactcgtctcgcagtgcccagctcaccggcttgggcaaatacgtgctctatgaagtccaggtgctggccttcacacgcatcggggacggcagccccagccaccctcccatcctggagcggacgctggatgatgtcccaggaccacccatgggcatcctgttcccagaggtgcggaccacgtctgtgcggctgatctggcagccccctgccgcccccaatggcatcattcttgcttaccagatcacacaccggctcaacaccaccacggccaacaccgccactgtggaggtgctggcacccagcgcccggcagtacacagccacgggcctcaagccagagtctgtctacctgttccgcatcacggcccagacccgcaagggctggggagaagctgccgaggccttggtggtgaccaccgagaagagagaccgtccgcagccccccagcaggccgatggtgcagcaggaggatgtgagagcacgcagcgtgctgctgtcctgggagccagggagcgacgggctctcccctgtgcgctactacaccatccagacccgcgagctgcccagcggcaggtgggcactgcactcggcctccgtgagccacaatgcctccagcttcattgtggacaggctgaagcccttcacgtcctacaagttccgagtgaaggcgaccaatgacattggcgacagcgagttcagcgaggagtcggagtcactgaccaccctgcaggctgcccccgatgaagcacccaccatcctctccgtgacgccccacaccaccacctccgtgctaatccgatggcagccgccagcagaggacaagatcaatggcatcctcctgggcttccggatccgataccgggagctgctctatgaaggactgaggggcttcacgcttcgaggcatcaacaacccaggggccacatgggctgagcttacctccatgtactccatgcggaacctgagccggcccagcctcacgcagtacgagctggacaacctgaacaagcacaggcggtacgagatacggatgagcgtgtacaacgctgtgggtgaggggccctccagccccccgcaggaggtctttgttggggaggcagtgcccacagcagcacctcgtaacgtggtcgtccacggcgccacggccacacagctggacgtgacttgggagccacctccgctggacagccagaatggagacatccaggggtacaagatttatttctgggaagcccagcgggggaacctcacagagcgagtgaagacgcttttcctggctgagaacagcgtgaagctcaagaacttgactggctacacggcctacatggtcagcgtggccgccttcaacgccgctggggatgggcctcggagcacccccacccaaggccagacccagcaagcagcccccagcgctcccagctcggtcaagttcagtgagctgaccacaacctcagtgaatgtgtcctgggaagccccgcagttccccaatggcatcctggagggctacaggctggtgtacgagccctgcagccccgtggatggagtcagcaagatcgtgaccgtggacgtgaaggggaacagccccctgtggctgaaggtgaaggacctggcggagggggtgacctacaggttccgcatcagagccaagaccttcacctacgggccggagatcgaagccaacgtcaccacgggccccggagaaggtgccccaggaccgcctggcgtgcccatcatcgtgcggtacagctctgccatcgccattcactggtccagcggagacccgggcaaagggcccatcacccgctacgtcatcgaggccagaccttcagacgagggactatgggacatcctcatcaaagacatccccaaggaggtgagctcctacacgttcagcatggacatcctgaagccgggcgtgagctatgacttccgggtcatcgcggtcaacgactatggtttcggcacccccagcagcccctcccagtctgtgccagcccagaaagccaaccccttctatgaggagtggtggttcttggtggtcattgccctggtcggcctcatcttcatcctgcttctggtcttcgtgctcatcatccggggccagagcaagaagtacgccaagaagacagactcggggaacagtgccaagtctggagccctaggccacagcgagatgatgagcttggatgaaagcagcttccctgccctggaactcaacaacaggcggctctccgtcaagaactctttctgccgaaagaacggcctgtacaccaggtctccccccaggcccagcccaggcagcctgcactactcggatgaggatgtcaccaaatacaacgacctcatccctgcagagagcagcagcctgacggagaagccctcagaaatctccgactctcagggaagtgacagcgagtacgaggtcgactcaaaccaccagaaggcccactcctttgtcaaccactacatcagtgaccccacatactacaactcgtggcggcgacagcagaagggcatctcgagggcacaggcctacagctacacggagagcgactcgggtgagccagaccacaccaccgtcaccaacagcaccagcacccagcagggcagcctctttcggcccaaggccagtcggactccaacgccccagaacccccctaaccccccaagtcagcagagcaccctctaccgtccccccagcagcctggccccaggctcccgggctcccatagcaggattttcatcatttgtttgacatcagaagaggaaaaagcagaaagagaaatggcaccaaactcctccttcacccctcctctcactgcctgccagaaaacaaaaacaccaagaaaccaagtcaacttttcacctcctgagtttatttttccagagattccagggccagcaaagccggcgttcagaaggagggagaaaaccgtgagaggatgtgtgtggccagcagctcttcagctttgagatggtggggttcactgctcccttgggaattacacggagctggggaagtggctgtgtcactgctatggacacggagtggggcgggcatctggagagagagagggagcggaggctaaggactggaggccgccaggcaggcgtggccgagggaagaaaaagcttctggatgtccagccagctgcccccttccagcccctccaggacccctggacccactgccgctgctctctgcaaaaagaatgggcatcccggaggccacgcctatcttctctctctgctcctccttccctccatgcaccatcactgtggctggcaggcatcggacagcctcatccagaccccctgccctgtcttggcaacctctactgcccatctcccctgctcaacttctccaccaagcatttggtttatttagaaaaaggaagaaaaacaaaaaacaaaaaactaaagggtgagaatttgcttagcgccttccttgttcctgcatattttttaaaatattgaatccaaggaagagagcccaagggtaggggagaaaccccccacaactgacccctgcctccctgtgctggaattgactttcctgagcatggacaaggaaaggtgaagtctggggagcagaggtgtaaataaggcgactggccttggcactgtgggatgattaggtttaacgcattgtgggcaagataagaatgacactttgactgttctctttcttccaatccaggttccatccgtcctctctttaaaggggtagtcagcttcccaaggctggggagtggggcacagctgagggatctccctctgggcagacacgtcactctccactggatagatcctcaccacacacacacacacacacacatctcccatgcacttacaaggaacagggtctagggatcctctccagaacaaactcatctgggccctcctagccagacagcacactcactttcagatctgtgtccctctcactgccacccggcagcctcctaagcacagaggcacaggagcccagaggggtggcccaagtccctggtccagaggctggaatacccagagtttgctcagtcagcctagcacccagtttacaggcaaaaaggcaaagacaccctaacccccagtaacagcttccaggctgggctccgcctggccagggcggggaggggaaggggcaggtcaggaagctcagtccaaagtggacccagcatttgaattgcacgcccagcaggggcaggtcagatgggaccaagtgacaagaatagctgatgggagggaatgcttttacacacacacacacacacacacacacacatacacatacacaatctgctccaaggagtgttctgcaaaaagccacatccagtggccaggatcttcccgtccacttggtacttacggatgccagggtttagggagaagcctttctatctaactccatacattgtccaaggccctctgtgccctcagccagccctgtaaggccagcccaacacctgccccaccgctgagatgggtggcagatggcccacaggggcctgtctgattcagcgtgagccccttcgtggagcagggctccctctgtgcactgtgtacaggcgctgctggccctgcccaagagatgatgctctgttggggtgggtgagcagagttcaaggaagcccaagtaggagatttgggaaacatgccaaggtaagagagagcctggaccactctcctacagccccaagtcagtcactgtgctaatggtgaccgggaagggaagtcagggtctggggcccaaagaacgggcacacccagccatgagtttttcctgaagcacttgacccctgggaaatgtgaacggggagatgctggaagatggctcagcagacaggccagcccagctccagtgtccaaaaagcggtttctccaataaggaggcctgggaagggaagcacaatcttccccaaaggagaaccaagggctgaggttctgcccctccaggaagtaaggtgctctcggggcctccttggacttgtctgggggctgcagtggagtcagctggacacctgctccacccctgccacctccgcccccaccctctgcagcatctggcatctccatggcagcacatctgcagctgccggcctgtgatcgtgccgcacagctttcttttctttcctctcatcttttttttttttttttttttaaataacttcatccctttccctctctgctgagcatttaaccatttaaggaagttcccagtttgcattagggaattatttaagcccagcccagtgagggattatttgggaggaagcaggagtgagtaaaaacattgtgtctgtgtatatattgcacatgaggtcaattttcctttgcctttaatgaatcacctggtgcactaagatattccacccccccactccccacacgctcattcgcacccatgctgacacctacgtgtacatgcgggatggtgcccatgcacgcctgtgcttacacacatgcacacacaaatatgcacagaacacacatctgtatgtgtgttagcaaagagactcctgaactccctctgatggctgaagccatctctcccctgtgaggcacaggtggcctgggttgcttgcacttggggcgtggctgggatctattgtctgagagggtgaggacaccacgcaaatttagacaagcccatgagatcaggctgggcccatggtgaaagtcccacacttagtcaatacccactcatctggaatattgtctccacagccccagccacagctggaagcccaggcctgcagctgtggaactctagattttttcaggacacgtctctttgcccttgtttacatatctactggcacagccgaggctcccaaccgtcctcccagaaacctggccacattagaaaggggtggtgggccctgccctttgtagaaagagtgggaccctttctggcctgtgattttccgtgccagtgatgccagggcccctgcctgtgggactccacccaaagcaggttcacaccaggacacacctggcacctttggcattgcctccttgtgccctaagcaatctcccagtgttgcacccaggagcccatgctgggcacaccagggctttccccttcctggctgcgcctccagagttgacgtcagctccacacccacactgccaagacaaaccaaaaagatgctctgggctccagaaccaccatcctcctagggctccagagagtttgcaaacccaggctgcctccccttctgtccatccctcaccccccggcccccaaaactcctacccccaaacctggcactgccgtgatttagaggaaacaaggacacagcgggggctgcccccacctggtgcacgctgcctcaaggccttctgttgctgcccacgcctccctgggcagtgcttctaaaggtgccagagcctcaccacagtgccactctggctgggcaggggcttccctcagcttcccagagtgcacatctgaaggtgcctaccctgggtgaggggctggtgggcaggaaggtaaaggggagaccatctgagcagccgccacccgctccccagtgcctctgtatggccctatccagggacacccatgggcatgcgcacatggcaatcctgaccaccacctgagcacaggtgccccctcgggaccaccccccttctctttgtttccatcagaataaccaaaagcatttaaacgtgttacctttctccatccatctagactccagaaacaaaaatcaacacaaatctttattttttgatttaaaagatataacaaaaaattatggggagagtattcattatggcaggtgtctgtctgtaagaaaaaaatatatatctctatgtcatatagcgtgttagcaggtttattttttaaatgaaaggtaagaaagaaattgatttgaaatatataccacaagaagtcccgtgtcctgtcaaactgtcagtattttataaataaacttttttttttgg

SEQ ID NO: 56674 - DNA, 82 bp, Artificial Sequence
  derived and/or modified sequence
gcaatctcaggatacaaaatcaatgtgcaaaaatcacaagcattctcatacaccaataacagacaaacagagccaaatcatg

SEQ ID NO: 56675 - protein, 731 aa, Artificial Sequence
  derived and/or modified sequence
MAAPDGRVVSRPQRLGQGSGQGPKGSGACLHPLDSLEQKETQEQTSGQLVMLRKAQEFFQTCDAEGKGFIARKDMQRLHKELPLSLEELEDVFDALDADGNGYLTPQEFTTGFSHFFFSQNNPSQEDAGEQVAQRHEEKVYLSRGDEDLGDMGEDEEAQFRMLMDRLGAQKVLEDESDVKQLWLQLKKEEPHLLSNFEDFLTRIISQLQEAHEEKNELECALKRKIAAYDEEIQHLYEEMEQQIKSEKEQFLLKDTERFQARSQELEQKLLCKEQELEQLTQKQKRLEGQCTALHHDKHETKAENTKLKLTNQELARELERTSWELQDAQQQLESLQQEACKLHQEKEMEVYRVTESLQREKAGLLKQLDFLRERNKHLRDERDICFQKNKAAKANTAASRASWKKRSGSVIGKYVDSRGILRSQSEEEEEVFGIPRRSSLGLSGYPLTEEEPGTGEPGPGGPYPRPLRRIISVEEDPLPQLLDGGFEQPLSKCSEEEEVSDQGVQGQIPEAPPLKLTPTSPRGQPVGKEALCKEESSPSAPDRLFKIVFVGNSAVGKTSFLRRFCEDRFSPGMAATVGIDYRVKTLNVDNSQVALQLWDTAGQERYRCITQQFFRKADGVIVMYDLTDKQSFLSVRRWLSSVEEAVGDRVPVLLLGNKLDNEKEREVPRGLGEQLATENNLIFYECSAYSGHNTKESLLHLARFLKEQEDTVREDTIQVGHPAKKKSCCG

SEQ ID NO: 56676 - DNA, 2196 bp, Artificial Sequence
  derived and/or modified sequence
atggccgccccagacggccgagtggtaagcagacctcagcgcttgggccagggctctggccaggggccaaaagggtcaggggcctgtctacacccgctcgactcattagagcagaaggagactcaagagcagaccagcggacagttggtcatgttaagaaaagcccaggaattttttcaaacgtgtgatgccgaaggcaaaggtttcattgctaggaaggatatgcaacggctgcataaagagctgccattaagcctggaagaactggaggacgtgttcgacgcactggatgccgatggaaatggctacctgacccctcaggaatttactacaggattctcacacttcttcttcagtcaaaacaacccatcgcaggaggacgcaggcgagcaggtcgcacagcgacacgaagaaaaggtgtacctctcccgcggcgacgaggatctgggggacatgggcgaagacgaagaggctcaatttagaatgctcatggataggctcggagcccagaaagtcctcgaggacgagtccgacgtcaaacagctttggctacaactgaaaaaggaggaacctcacctgctgtcaaactttgaggactttctaacacggattatttcccagttacaggaggcacacgaggaaaaaaacgagctcgagtgcgcactgaaaagaaagattgccgcttatgatgaagagatacagcatctgtacgaagagatggagcagcaaattaagtctgagaaggagcagtttttactgaaagatacagagcgttttcaggcccgctcccaggagctcgaacagaagttactttgtaaggaacaggagctggagcagcttacgcagaagcaaaaacgcctagagggtcagtgcactgccttgcatcacgacaagcacgagacgaaagccgagaacaccaagctgaaattgacaaatcaggagttagcccgggagctggagaggacgtcttgggagctgcaggatgcacagcagcagctggagtcattacagcaggaggcctgcaaactgcatcaggagaaggagatggaggtatacagagtgaccgaatcactgcaaagagagaaagcgggactgctcaagcaactcgacttcctgagggaacgcaataagcatctccgcgatgagagggacatttgttttcaaaaaaataaggccgccaaggctaacacggctgcttcccgtgcatcatggaagaagcggagtgggtctgtgatcggtaaatacgtcgactctcggggcatcctgcggtctcaaagtgaagaagaagaggaggtttttggcatccctcggagaagctctctgggactttccggatatcccctgaccgaagaagaacctgggaccggggagccgggccctggaggaccctaccccagacctttgaggcgcatcataagtgtggaggaggatccactccctcagcttctggacggtggctttgaacaaccattgagtaaatgcagtgaggaggaagaagttagtgaccagggtgtgcaggggcaaattccagaggcaccacctttgaaactgactccaaccagtccacggggccagcccgttgggaaggaggctctgtgcaaggaagaatctagcccttccgctcccgataggctcttcaaaatcgtgttcgttggaaacagcgctgtgggaaaaacctcctttttgagaaggttttgcgaggatcggtttagtcctggcatggccgcaaccgtcggaatagattatcgagtcaaaactcttaacgtcgataattcccaagtggcactccagttgtgggatacagccgggcaggagcgctatcggtgtattacacagcagttttttaggaaggcggatggtgtaatcgtaatgtatgatttgacggacaaacaaagcttcctgagcgtgagacgttggctgtcttccgtggaagaggcggtcggcgatcgggttcccgtgctgttgctcgggaataagttagataacgagaaggagagagaggtcccccgcgggctgggggagcagctagctactgagaataatctgattttctacgagtgttccgcttactctggccacaacacgaaagaatccttgctgcacctcgcgcgattcctcaaggagcaggaagatacagtgcgggaagataccattcaggtaggccaccccgccaaaaagaagagttgttgcggatag

SEQ ID NO: 56677 - DNA, 1389 bp, Artificial Sequence
  derived and/or modified sequence
atggcggcccccgatggacgggtggtaagtcgaccacaacggcttgggcaagggtctgggcagggacccaagggctctggtgcctgcctgcatccgctcgactctttggaacagaaagaaacgcaggagcagacatctggtcagttagtcatgctgcgcaaggcccaggagttctttcagacatgcgatgctgagggaaagggattcatcgcgcgtaaggatatgcagaggcttcacaaggaactcccattgagcttggaggaactcgaggacgtgttcgatgcactcgacgcagacgggaatggatacctgactcctcaggaattcaccactggatttagtcatttcttcttcagtcaaaacaaccctagccaggaagatgccggagagcaggtggctcagagacatgaggagaaagtctatctctcccgcggcgatgaagacctgggtgatatgggggaagacgaggaggcgcagttccgcatgctgatggaccgccttggtgcacaaaaggtactcgaggatgagtcggacgtgaaacagttgtggctgcagctgaagaaagaggagcctcacctgttgtccaactttgaggactttctcactcgtatcatcagccagctccaggaggctcatgaggaaaagaacgagttagaatgcgcactaaaacggaagattgctgcctacgatgaggagatacaacacttgtacgaggaaatggaacagcagatcaagagtgagaaggagcaatttcttctgaaagacactgagcgattccaagcccgatcgcaagagttggagcagaaacttctttgcaaagaacaggaattggagcagctcacacagaagcagaagagactggaaggacagtgtacagccctccatcatgataagcacgagactaaggcggagaacacaaagttgaaactgaccaatcaggagctcgcgcgcgagttggaaaggacctcttgggaactgcaagacgctcagcaacagctcgagtccctgcagcaggaggcttgtaagctccaccaggagaaagaaatggaggtctatagagtcacagaatcattacaaagggaaaaagccggcctgcttaagcagctcgatttcctgcgggagagaaataaacacctgcgcgatgagagagacatctgtttccagaaaaacaaggctgccaaggctaacaccgctgcatccagggcttcctggaagaagagatctggaagtgtgattgggaagtacgtagatagtagggggatcctgcgccggtggcctcagcgggaccggggtattccaactttgcagtaccagacccagagggatctagaggattgcaaacatgagatgaaaaagatctgtaaagccgaggttaccctcgaaatgtag

SEQ ID NO: 56678 - DNA, 2196 bp, Artificial Sequence
  derived and/or modified sequence
atggccgccccagatggccgggtggtgtcccggccccagaggctgggccagggcagcggccagggccccaagggcagcggggcctgcctgcaccccctggacagcctggagcagaaggagacccaggagcagaccagcggccagctggtgatgctgaggaaggcccaggagttcttccagacctgtgatgctgagggcaagggcttcatcgccaggaaggacatgcagaggctgcacaaggagctgcccctgagcctggaggagctggaggatgtgtttgatgccctggatgctgatggaaatggctacctgaccccccaggagttcaccaccggcttcagccacttcttcttcagccagaacaaccccagccaggaggatgctggggagcaggtggcccagagacatgaggagaaggtgtacctgagcagaggagatgaggacctgggggacatgggagaagatgaggaggcccagttcaggatgctgatggaccggctgggcgcccagaaggtgctggaggatgaaagtgatgtgaagcagctgtggctgcagctgaagaaggaggagccccacctgctgagcaactttgaggacttcctgacccgcatcatcagccagctgcaggaggcccacgaggagaagaatgagctggagtgtgccctgaagaggaagattgctgcctatgatgaggagatccagcacctgtatgaggagatggagcagcagatcaagtctgagaaggagcagttcctgctgaaggacacagagcgcttccaggcccggagccaggagctggagcagaagctgctgtgcaaggagcaggagctggagcagctgacccagaagcagaagaggctggagggccagtgcacagccctgcaccacgacaagcatgagaccaaggccgagaacaccaagctgaagctgaccaaccaggagctggcccgggagctggagaggacctcctgggagctgcaggatgcccagcagcagctggagagcctgcagcaggaggcctgcaagctgcaccaggagaaggagatggaggtgtacagagtgacagagagcctgcagcgggagaaggccggcctgctgaagcagctggacttcctgcgggagaggaacaagcacctgagagatgagcgggacatctgcttccagaagaacaaggccgccaaggccaacacagctgccagccgggcctcctggaagaagaggagcggcagcgtcatcggcaagtatgtggacagccggggcatcctgcggagccagagcgaggaggaggaggaggtgtttggcatccccaggaggagcagcctgggcctgagcggctaccccctgacagaggaggagcccggcactggagagcccggccctgggggcccctacccccggcccctgcggcgcatcatctctgtggaggaggaccccctgccccagctgctggatggcggctttgagcagcccctgagcaaatgttctgaggaggaggaggtgtctgaccagggcgtgcagggccagatccctgaggccccacccctgaagctgacccccaccagcccccggggccagcctgtgggcaaggaggccctgtgcaaggaggagagcagccccagcgccccagacaggctcttcaagatcgtgtttgtgggcaacagcgctgtgggcaagaccagcttcctgcggcgcttctgtgaagatcgcttcagccctggcatggccgccaccgtgggcatcgactacagagtgaagaccctgaatgtggacaacagccaggtggccctgcagctgtgggacacagctggccaggagcgctaccgctgcatcacccagcagttcttcaggaaggcagatggagtcatcgtgatgtatgacctgacagacaagcagagcttcctgtctgtgcggcgctggctgagctctgtggaggaggccgtgggggacagagtgcctgtgctgctgctgggcaacaagctggacaatgagaaggagcgggaggtgccccggggcctgggggagcagctggccacagagaacaacctgatcttctatgagtgcagcgcctacagcggccacaacaccaaggagagcctgctgcacctggcccgcttcctgaaggagcaggaggacacagtgcgggaggacaccatccaggtgggccacccagccaagaagaagagctgctgcggctag

SEQ ID NO: 56679 - DNA, 1389 bp, Artificial Sequence
  derived and/or modified sequence
atggccgccccagatggccgggtggtgtcccggccccagaggctgggccagggcagcggccagggccccaagggcagcggggcctgcctgcaccccctggacagcctggagcagaaggagacccaggagcagaccagcggccagctggtgatgctgaggaaggcccaggagttcttccagacctgtgatgctgagggcaagggcttcatcgccaggaaggacatgcagaggctgcacaaggagctgcccctgagcctggaggagctggaggatgtgtttgatgccctggatgctgatggaaatggctacctgaccccccaggagttcaccaccggcttcagccacttcttcttcagccagaacaaccccagccaggaggatgctggggagcaggtggcccagagacatgaggagaaggtgtacctgagcagaggagatgaggacctgggggacatgggagaagatgaggaggcccagttcaggatgctgatggaccggctgggcgcccagaaggtgctggaggatgaaagtgatgtgaagcagctgtggctgcagctgaagaaggaggagccccacctgctgagcaactttgaggacttcctgacccgcatcatcagccagctgcaggaggcccacgaggagaagaatgagctggagtgtgccctgaagaggaagattgctgcctatgatgaggagatccagcacctgtatgaggagatggagcagcagatcaagtctgagaaggagcagttcctgctgaaggacacagagcgcttccaggcccggagccaggagctggagcagaagctgctgtgcaaggagcaggagctggagcagctgacccagaagcagaagaggctggagggccagtgcacagccctgcaccacgacaagcatgagaccaaggccgagaacaccaagctgaagctgaccaaccaggagctggcccgggagctggagaggacctcctgggagctgcaggatgcccagcagcagctggagagcctgcagcaggaggcctgcaagctgcaccaggagaaggagatggaggtgtacagagtgacagagagcctgcagcgggagaaggccggcctgctgaagcagctggacttcctgcgggagaggaacaagcacctgagagatgagcgggacatctgcttccagaagaacaaggccgccaaggccaacacagctgccagccgggcctcctggaagaagaggagcggcagcgtcatcggcaagtatgtggacagccggggcatcctgcggcgctggccccagagggaccggggcatccccaccctgcagtaccagacccagagggacctggaggactgcaagcatgagatgaagaagatctgcaaggccgaggtgaccctggagatgtag

SEQ ID NO: 56680 - DNA, 2196 bp, Artificial Sequence
  derived and/or modified sequence
atggccgcccccgacggccgggtggtgagccggccccagcggctgggacagggttctggtcagggacctaaaggctccggggcttgcctgcatcccctcgactcactcgagcagaaagagacacaggagcagacttcaggacagcttgtgatgttgcggaaggcccaggagttttttcagacttgcgatgcggagggtaaaggattcatcgcccggaaagacatgcagcggctgcacaaagaattgcccctcagtcttgaagagctggaggacgtctttgacgccctggatgccgatggcaatggataccttacccctcaggagttcactacgggattcagccatttcttctttagccaaaataacccatcacaggaggacgcaggggaacaagtggcccagagacatgaggagaaagtgtacctaagccggggcgacgaagaccttggagacatgggcgaggacgaggaggcgcagttcagaatgcttatggatcgtctgggtgcgcaaaaggttcttgaagacgaaagcgatgtcaaacagctgtggctccaactgaaaaaggaggaaccacacctcctgtcaaactttgaagactttctgacacggatcatttcacaactgcaggaggcacacgaggagaagaacgaactcgagtgtgcgttgaaacgtaagatcgctgcatatgacgaggaaatccagcacctgtacgaagagatggaacagcagatcaaaagtgagaaagaacaattcctgcttaaagacacggaaaggttccaggctcggtctcaggagttggaacagaagctgttatgtaaggaacaggagttagaacaactaacccagaagcaaaaaaggctcgagggccagtgcacagcattacaccacgacaagcacgaaacaaaagctgagaatactaagctgaagctgacaaaccaagagctggctagggagctggaaaggacgtcttgggaactccaggatgctcaacagcagctggaatctctgcagcaggaagcgtgcaaattacatcaagagaaagagatggaggtgtaccgagtgaccgaatctttgcagagagagaaagccggccttttgaagcagctggattttctgcgggagaggaacaagcaccttcgagatgaacgggacatctgtttccagaagaacaaagctgcaaaagcgaacacagccgctagtcgggcctcctggaagaagcggagcggcagcgtgattgggaaatatgtagacagtcgaggcattctgagatcccagtctgaggaggaagaggaggtgtttggcatcccccgtaggtccagcctcggtctatctggttacccacttactgaggaagaaccaggcactggagagccgggtcctgggggaccgtacccaagacctctcagaaggatcatctcagtcgaggaagaccctctgccgcaactgctagacggtggattcgagcagcccctctctaaatgcagcgaggaagaggaggtttccgaccagggggtgcaggggcaaattcccgaggctccaccactaaaattgaccccgacttccccgagagggcagccggtcggaaaagaggcactgtgcaaggaggagtcctccccctctgcccccgaccgattgtttaagattgtgtttgttgggaacagcgctgtcggcaagactagctttctgcggaggttctgcgaggaccggttttcgcccggcatggcggccacggtgggcatcgattacagagtgaagacgctcaacgttgataacagccaagtggcattgcagttgtgggacacagcaggccaggaaaggtataggtgcataacccagcagttcttcagaaaggcagatggcgtcattgtgatgtatgacttgacggacaagcagagttttctaagcgtgcgtcgctggttgtcaagtgttgaggaggccgtgggcgacagggtgcccgtgctgttgctcggtaataagctggacaatgagaaggaacgggaagtgccaaggggattgggcgagcagctggcaaccgagaataatttgattttttatgagtgctccgcttacagcggtcacaacaccaaagagagcctactgcacttggcccgatttctgaaagagcaagaagatactgtccgggaagataccatccaagtcggtcacccggccaagaagaaatcatgctgcggctag

SEQ ID NO: 56681 - DNA, 1389 bp, Artificial Sequence
  derived and/or modified sequence
atggccgcccccgacggccgggtggtgagccggccccagcggctgggacaggggagcggacagggacccaagggttctggtgcatgcctccacccccttgatagcctggagcagaaggagactcaggaacagacttccggccagctcgttatgctgagaaaggcccaggagttttttcagacgtgcgatgccgagggcaagggatttattgcacggaaggacatgcaacgccttcataaagagctgcccctctccctggaggagctagaggacgtgtttgacgccttagatgccgacggtaacggttacctgactccccaggaattcaccaccggcttttcacacttcttcttcagccaaaataatcccagccaggaggacgccggcgagcaggtggcacagaggcacgaggaaaaggtttatctgtctcggggcgatgaagatctgggtgatatgggggaagatgaagaggcccagttcaggatgctaatggacaggcttggggcccagaaagtccttgaggatgaatccgatgtcaagcagttatggttacagctgaaaaaagaagaaccccacctcctgtccaatttcgaggacttcctgaccagaatcatctcacagttgcaggaagctcacgaggaaaaaaacgagctggaatgcgccctgaagagaaagattgccgcctatgatgaggagattcagcacctgtatgaggaaatggagcagcagattaagtctgaaaaggagcagttcctcctgaaagataccgaaaggttccaggctagatcgcaggaacttgagcagaaacttctctgtaaggagcaggagttagaacaactgactcaaaaacaaaagcgattggagggtcaatgcacagccctccaccatgataaacacgagacgaaagcagaaaatactaaactgaagctgactaaccaggagctagcgcgggagctggagagaacatcttgggagctgcaggatgcccagcaacaactagagtctctgcaacaagaagcctgcaaactgcaccaagagaaggaaatggaggtatatcgggtgacagagtctcttcagcgtgagaaggctggccttctgaagcagctggacttcctccgcgagcgtaataagcacctgcgcgatgaacgggatatttgtttccaaaagaataaggcggcaaaagctaatactgccgctagtcgggcttcctggaagaagaggtccggttccgtcatcggtaagtacgtggatagccggggaatcttgcgccgctggcctcagagagatagaggaatccctacgcttcaataccagacccagcgggatctggaggactgcaagcacgagatgaaaaaaatctgcaaggccgaggtgactctggagatgtag

SEQ ID NO: 56682 - DNA, 2196 bp, Artificial Sequence
  derived and/or modified sequence
atggcagctcccgatggcagggtcgtgtcccggccacaaagactcggccaaggttccggacagggtccaaaaggctcaggcgcttgcctgcatccccttgactccctcgaacagaaggagacccaggaacagaccagtggccagctggtgatgctcagaaaggcccaggagtttttccagacctgcgatgccgaaggaaaaggctttatcgcccgtaaggatatgcagcggctgcacaaggagttaccacttagtctggaagagctggaagacgttttcgatgcactagacgctgacggcaacggatatcttacaccccaagagtttactactggattctcacactttttcttttcccagaacaatccttcacaggaggacgctggcgagcaagttgcccagcgccacgaagagaaggtatatctcagtcgcggtgacgaagacctgggtgatatgggtgaagacgaggaagcccaattcaggatgctgatggaccggctgggggcacagaaagtgctcgaagacgaatccgacgtaaaacagttgtggctgcaattgaagaaagaagagccacatctattgtccaacttcgaagattttcttacgcgaattatatctcagttgcaggaggcgcacgaggagaaaaacgagttggagtgtgctcttaagcgcaagattgcagcatacgatgaagagatccaacacctgtacgaagaaatggagcagcaaatcaaatccgagaaagaacagttccttcttaaagatacagaacgttttcaagcccgaagccaggaactggagcagaagctgctgtgtaaggagcaagagctggaacagctcactcagaagcagaaaagactggaaggccagtgcacagctctccaccatgataagcacgagacgaaggccgagaataccaaactcaaacttaccaatcaggagcttgccagggagttagagagaacgagctgggagctgcaggatgcccagcaacagctggagtctctccagcaggaggcttgtaagcttcatcaggagaaggaaatggaggtgtacagagtcaccgaaagcctgcagagggagaaggccggtctcctgaaacagttggacttcctccgcgagagaaataaacacctcagagacgagcgggacatctgctttcaaaagaataaggcagcaaaggcgaacacggccgctagtcgcgcaagttggaagaaaagatcgggatcagttattgggaagtacgttgattctcgaggaatccttcggtcccaatcagaggaagaggaagaagtcttcgggatcccgcgacgttcttcactgggcctgagcggttacccacttactgaggaggaacccggaaccggtgaacccggacctgggggtccgtatcccagaccgctccgccgaatcatttccgtcgaggaagacccactcccacaactcctggacggtgggtttgagcagcccctgtcaaaatgctcagaggaggaagaggtgagcgatcagggcgtccagggacagatccctgaagcaccacccctcaagctgacacccacttcccccagggggcagccggtgggcaaagaggcactctgcaaagaggagagctctccctccgcacccgacagattgtttaaaatcgtattcgtcgggaatagcgcggtgggcaaaaccagcttcttgaggcggttttgtgaggatcgattcagtcccggtatggccgcaaccgtaggaatcgactacagagtgaaaacactcaatgtggataactcacaggtggccttgcagctctgggacacagcaggtcaggagcgatacaggtgcatcacccagcaattcttccgcaaggccgacggagtgatagtcatgtacgacttaacagataaacagagcttcctgagcgtgcgcaggtggttatccagtgtggaggaagctgttggagaccgcgtgcctgttctgcttcttggcaacaagctcgacaatgagaaagaaagggaagttccccgaggactgggggagcaactggccaccgaaaacaatctgattttctacgaatgctctgcttatagtgggcataatacgaaagagagcctgctccatcttgccagatttctcaaggagcaggaagatacagtaagggaggatactatccaagtaggtcatcccgcaaagaaaaaaagctgttgcgggtag

SEQ ID NO: 56683 - DNA, 1389 bp, Artificial Sequence
  derived and/or modified sequence
atggctgcccctgacggccgagtcgtgtctcgtccacagcgccttgggcagggcagtggacaggggccaaagggaagcggagcctgcttgcaccccctagattctctggaacaaaaggaaacacaggaacagacatccggccagctggttatgttacgcaaggcacaggaatttttccagacatgtgatgcagaaggcaagggcttcattgcgagaaaggacatgcagaggctacataaagagctgccactgtcacttgaggagctagaagacgttttcgatgctctggatgccgacgggaacggctacctgacccctcaggagtttactactggcttcagccatttcttctttagtcagaacaacccaagccaggaagatgctggcgaacaggttgcccagcgtcatgaggagaaggtctacctctcccggggtgacgaagatctcggagatatgggcgaggacgaagaggcacagtttcgaatgctcatggacaggctgggcgctcaaaaggtactagaagatgaaagcgacgttaagcagctttggctgcagctcaagaaagaggagcctcaccttctcagcaacttcgaggacttcctcactaggatcatttcccagctccaggaggcacatgaagagaaaaatgagttagagtgcgcgctgaagagaaaaattgcagcgtatgacgaagaaattcaacacctgtatgaagagatggagcagcagattaaaagtgagaaggagcaattcctattgaaagatacggaacgcttccaagcacgcagccaggagctcgaacagaaactcttgtgcaaggagcaggaactggagcagttaacacagaaacagaagaggctcgagggccagtgtaccgctcttcaccatgacaagcatgaaacaaaggctgaaaacaccaagctgaagctgactaaccaggagctggccagagaattagagaggacttcctgggaactgcaggacgcccagcagcaattagaatctctgcaacaggaggcttgtaagttgcaccaggagaaggagatggaggtgtatcgggtgaccgagtctctacagagggagaaagccggtctcctgaagcagttggattttctgcgcgaacggaataaacaccttagggatgagcgagatatctgcttccaaaagaacaaggcagccaaagccaatactgcagcctcccgggcaagttggaaaaagcggtcaggctcagtcattggcaagtatgttgattcccggggaatactgaggcgatggccacagagagacagaggaatccctactctccaatatcagacacagcgggatctggaagattgcaagcatgaaatgaagaaaatctgcaaagcggaggtaacattggagatgtag

SEQ ID NO: 56684 - DNA, 2196 bp, Artificial Sequence
  derived and/or modified sequence
atggccgcccccgacggcagagtggtgagcagaccccagagactgggccagggcagcggccagggccccaagggcagcggcgcctgcctgcaccccctggacagcctggagcagaaggagacccaggagcagaccagcggccagctggtgatgctgagaaaggcccaggagttcttccagacctgcgacgccgagggcaagggcttcatcgccagaaaggacatgcagagactgcacaaggagctgcccctgagcctggaggagctggaggacgtgttcgacgccctggacgccgacggcaacggctacctgaccccccaggagttcaccaccggcttcagccacttcttcttcagccagaacaaccccagccaggaggacgccggcgagcaggtggcccagagacacgaggagaaggtgtacctgagcagaggcgacgaggacctgggcgacatgggcgaggacgaggaggcccagttcagaatgctgatggacagactgggcgcccagaaggtgctggaggacgagagcgacgtgaagcagctgtggctgcagctgaagaaggaggagccccacctgctgagcaacttcgaggacttcctgaccagaatcatcagccagctgcaggaggcccacgaggagaagaacgagctggagtgcgccctgaagagaaagatcgccgcctacgacgaggagatccagcacctgtacgaggagatggagcagcagatcaagagcgagaaggagcagttcctgctgaaggacaccgagagattccaggccagaagccaggagctggagcagaagctgctgtgcaaggagcaggagctggagcagctgacccagaagcagaagagactggagggccagtgcaccgccctgcaccacgacaagcacgagaccaaggccgagaacaccaagctgaagctgaccaaccaggagctggccagagagctggagagaaccagctgggagctgcaggacgcccagcagcagctggagagcctgcagcaggaggcctgcaagctgcaccaggagaaggagatggaggtgtacagagtgaccgagagcctgcagagagagaaggccggcctgctgaagcagctggacttcctgagagagagaaacaagcacctgagagacgagagagacatctgcttccagaagaacaaggccgccaaggccaacaccgccgccagcagagccagctggaagaagagaagcggcagcgtgatcggcaagtacgtggacagcagaggcatcctgagaagccagagcgaggaggaggaggaggtgttcggcatccccagaagaagcagcctgggcctgagcggctaccccctgaccgaggaggagcccggcaccggcgagcccggccccggcggcccctaccccagacccctgagaagaatcatcagcgtggaggaggaccccctgccccagctgctggacggcggcttcgagcagcccctgagcaagtgcagcgaggaggaggaggtgagcgaccagggcgtgcagggccagatccccgaggccccccccctgaagctgacccccaccagccccagaggccagcccgtgggcaaggaggccctgtgcaaggaggagagcagccccagcgcccccgacagactgttcaagatcgtgttcgtgggcaacagcgccgtgggcaagaccagcttcctgagaagattctgcgaggacagattcagccccggcatggccgccaccgtgggcatcgactacagagtgaagaccctgaacgtggacaacagccaggtggccctgcagctgtgggacaccgccggccaggagagatacagatgcatcacccagcagttcttcagaaaggccgacggcgtgatcgtgatgtacgacctgaccgacaagcagagcttcctgagcgtgagaagatggctgagcagcgtggaggaggccgtgggcgacagagtgcccgtgctgctgctgggcaacaagctggacaacgagaaggagagagaggtgcccagaggcctgggcgagcagctggccaccgagaacaacctgatcttctacgagtgcagcgcctacagcggccacaacaccaaggagagcctgctgcacctggccagattcctgaaggagcaggaggacaccgtgagagaggacaccatccaggtgggccaccccgccaagaagaagagctgctgcggctag

SEQ ID NO: 56685 - DNA, 1389 bp, Artificial Sequence
  derived and/or modified sequence
atggccgcccccgacggcagagtggtgagcagaccccagagactgggccagggcagcggccagggccccaagggcagcggcgcctgcctgcaccccctggacagcctggagcagaaggagacccaggagcagaccagcggccagctggtgatgctgagaaaggcccaggagttcttccagacctgcgacgccgagggcaagggcttcatcgccagaaaggacatgcagagactgcacaaggagctgcccctgagcctggaggagctggaggacgtgttcgacgccctggacgccgacggcaacggctacctgaccccccaggagttcaccaccggcttcagccacttcttcttcagccagaacaaccccagccaggaggacgccggcgagcaggtggcccagagacacgaggagaaggtgtacctgagcagaggcgacgaggacctgggcgacatgggcgaggacgaggaggcccagttcagaatgctgatggacagactgggcgcccagaaggtgctggaggacgagagcgacgtgaagcagctgtggctgcagctgaagaaggaggagccccacctgctgagcaacttcgaggacttcctgaccagaatcatcagccagctgcaggaggcccacgaggagaagaacgagctggagtgcgccctgaagagaaagatcgccgcctacgacgaggagatccagcacctgtacgaggagatggagcagcagatcaagagcgagaaggagcagttcctgctgaaggacaccgagagattccaggccagaagccaggagctggagcagaagctgctgtgcaaggagcaggagctggagcagctgacccagaagcagaagagactggagggccagtgcaccgccctgcaccacgacaagcacgagaccaaggccgagaacaccaagctgaagctgaccaaccaggagctggccagagagctggagagaaccagctgggagctgcaggacgcccagcagcagctggagagcctgcagcaggaggcctgcaagctgcaccaggagaaggagatggaggtgtacagagtgaccgagagcctgcagagagagaaggccggcctgctgaagcagctggacttcctgagagagagaaacaagcacctgagagacgagagagacatctgcttccagaagaacaaggccgccaaggccaacaccgccgccagcagagccagctggaagaagagaagcggcagcgtgatcggcaagtacgtggacagcagaggcatcctgagaagatggccccagagagacagaggcatccccaccctgcagtaccagacccagagagacctggaggactgcaagcacgagatgaagaagatctgcaaggccgaggtgaccctggagatgtag

SEQ ID NO: 56686 - DNA, 2697 bp, Artificial Sequence
  derived and/or modified sequence
aaagagtcgggcggagcaggcggctgcttgacagctgagagccgagcgggcggcgcgggcaggtccacgggaagcctacacgcccaaggtcatgccctgaccacagctgcccttcaggaggctggcacggagccacctggggccattgggctgtttgtcaagggtggggcagcagcaacttgccactcttcctccatgagcccagccagagcctccactgggcacttagcacaagaaaaaccctgcaggagccggatccagagcgctgggattcagcaggagtgccaggagaattcaacacaggtgtgctgcctcctctcctgccaggtgtgtggctgcacaggagtcttgctgatggtggaattcaagtcaccagtggccaaagtaccctccaggtgtgaagagttgcaggtcctccgaggagccgggagctgcaaggttctgaaaaagacttcaagaaactgactaatcgcgatggctgcccctgacgggagggtagtctccagaccccagagacttggtcaggggtctggccaggggccaaaggggagtggagcctgcctgcatcccctggacagcctggagcagaaggagactcaggagcaaacgtcgggccagctagtcatgctgaggaaggcacaggagttctttcagacctgtgatgctgaaggcaagggcttcatcgccaggaaggatatgcagaggctgcataaggagctaccgctcagcctggaggaactggaggatgtgtttgatgccctggatgctgatggcaatggctatctgaccccacaggagttcactactggatttagtcacttcttcttcagccagaataacccaagtcaggaagatgcaggtgaacaggtggcccagcgccatgaagagaaggtgtatctgtccagaggggatgaggatctgggcgacatgggcgaagatgaggaagcccagttccggatgctgatggacagacttggagcccaaaaggtgttggaagatgaaagtgatgtcaagcagctctggttgcagctgaagaaggaggaacctcatttactgtccaactttgaagacttcctgaccagaatcatctcccagctccaagaagcccatgaggagaagaatgaactggagtgtgccctaaaaaggaaaattgctgcttatgatgaagaaatccagcatctctatgaggagatggaacaacaaatcaaaagtgagaaggagcagtttctcctgaaggacacagagaggtttcaagcccgcagtcaagagctggagcagaaactgttatgtaaggagcaggagctggagcagctcacccagaagcagaaaaggctggaaggtcagtgcacagccctgcatcatgacaagcatgagaccaaggctgagaataccaagctgaaactcactaaccaggagctggcccgggagctggagcggacttcctgggagctccaggatgctcagcagcagttggaaagcctccagcaagaggcctgcaaactccaccaagagaaggagatggaagtgtaccgtgtgacggagagtctacagcgtgagaaggccgggctcctcaagcagctggatttcctaagggaaaggaacaagcaccttcgggatgaacgggacatatgttttcagaaaaataaggcagccaaggcaaacacagctgcttccagggcaagttggaaaaagagatctggctctgtgataggcaaatatgtggacagcagagggattcttaggagccagtcagaggaggaggaggaggtgtttggcatcccaaggagaagctccctgggcctgagtggatatcccctaacagaagaggagccaggaaccggggagccagggcctgggggtccgtacccccggccgctccgcagaatcatctccgttgaagaagaccccctgccccagctcctggatggtggctttgagcaacccctgagcaaatgctcagaagaggaagaggtctctgaccagggggtacagggacaaatcccggaggccccacccttgaaactcacccccacatccccccgagggcagcctgttggaaaagaagccctgtgtaaggaggaaagctctccctctgcccctgaccggctcttcaagattgtgttcgtgggcaattccgcggtggggaagacatccttcctgaggagattctgtgaggaccggttctccccaggcatggcggccactgtgggcattgattaccgtgtgaagacgttgaatgtggacaactctcaggtggccctgcagctgtgggacacggctgggcaggagaggtaccggtgcatcacccagcagttcttcagaaaggcagatggtgtcatcgtcatgtacgatctcacagacaagcagtcgttcctgtcggtccggcggtggctgagcagcgtggaggaagctgtgggagaccgggtgcctgttcttctgctgggtaataagcttgacaacgagaaggagcgggaagtcccccggggcctcggagagcagcttgccacggagaacaatctgatcttctatgaatgcagcgcctactctggtcacaacaccaaagagtccctgctccatctggccaggttcctcaaggagcaagaagacacagtgagagaggacaccattcaggtcggccaccctgctaagaagaaatcctgctgtggctgatagggtcctacaaggactgcccccagc

SEQ ID NO: 56687 - DNA, 2228 bp, Artificial Sequence
  derived and/or modified sequence
accgcttggcgcgcgcacgtcccggagggcgtccagggggcgccgcttcccgttcagctccgctgaggggctggtccagcccgcgcggctcggagcggaaagagtcgggcggagcaggcggctgcttgacagctgagagccgagcgggcggcgcgggcaggtccacgggaagcctacacgcccaaggtcatgccctgaccacagctgcccttcaggaggctggcacggagccacctggggccattgggctgtttgtcaagggtggggcagcagcaacttgccactcttcctccatgagcccagccagagcctccactgggcacttagcacaagaaaaaccctgcaggagccggatccagagcgctgggattcagcaggagtgccaggagaattcaacacaggtgtgctgcctcctctcctgccaggtgtgtggctgcacaggagtcttgctgatggtggaattcaagtcaccagtggccaaagtaccctccaggtgtgaagagttgcaggtcctccgaggagccgggagctgcaaggttctgaaaaagacttcaagaaactgactaatcgcgatggctgcccctgacgggagggtagtctccagaccccagagacttggtcaggggtctggccaggggccaaaggggagtggagcctgcctgcatcccctggacagcctggagcagaaggagactcaggagcaaacgtcgggccagctagtcatgctgaggaaggcacaggagttctttcagacctgtgatgctgaaggcaagggcttcatcgccaggaaggatatgcagaggctgcataaggagctaccgctcagcctggaggaactggaggatgtgtttgatgccctggatgctgatggcaatggctatctgaccccacaggagttcactactggatttagtcacttcttcttcagccagaataacccaagtcaggaagatgcaggtgaacaggtggcccagcgccatgaagagaaggtgtatctgtccagaggggatgaggatctgggcgacatgggcgaagatgaggaagcccagttccggatgctgatggacagacttggagcccaaaaggtgttggaagatgaaagtgatgtcaagcagctctggttgcagctgaagaaggaggaacctcatttactgtccaactttgaagacttcctgaccagaatcatctcccagctccaagaagcccatgaggagaagaatgaactggagtgtgccctaaaaaggaaaattgctgcttatgatgaagaaatccagcatctctatgaggagatggaacaacaaatcaaaagtgagaaggagcagtttctcctgaaggacacagagaggtttcaagcccgcagtcaagagctggagcagaaactgttatgtaaggagcaggagctggagcagctcacccagaagcagaaaaggctggaaggtcagtgcacagccctgcatcatgacaagcatgagaccaaggctgagaataccaagctgaaactcactaaccaggagctggcccgggagctggagcggacttcctgggagctccaggatgctcagcagcagttggaaagcctccagcaagaggcctgcaaactccaccaagagaaggagatggaagtgtaccgtgtgacggagagtctacagcgtgagaaggccgggctcctcaagcagctggatttcctaagggaaaggaacaagcaccttcgggatgaacgggacatatgttttcagaaaaataaggcagccaaggcaaacacagctgcttccagggcaagttggaaaaagagatctggctctgtgataggcaaatatgtggacagcagagggattcttaggagatggccacagagagatagaggcatcccgactcttcagtatcagacccagagagaccttgaagactgcaagcatgaaatgaaaaagatatgcaaagcggaagtgactctggagatgtaaatcagctcatcagtaaaacctttgggcctgatcatcatgaattcttgttctaaatagctgaataatgagatacaatttgggagccaaatctctgcaatagtggttggcctgttggttcctcagaatggaatggattgattgattgattcagcagacgtttactgattacctactgtgtaccagacattcttttgagttctgtaaagcctccaaaaataaattagacatgaggtcctaccattaatctccattattaaatgctcactt

SEQ ID NO: 56688 - protein, 366 aa, Artificial Sequence
  derived and/or modified sequence
MSNPSPQVPEEEASTSVCRPKSSMASTSRRQRRERRFRRYLSAGRLVRAQALLQRHPGLDVDAGQPPPLHRACARHDAPALCLLLRLGADPAHQDRHGDTALHAAARQGPDAYTDFFLPLLSRCPSAMGIKNKDGETPGQILGWGPPWDSAEEEEEDDASKEREWRQKLQGDASHETQEPESFSAWSDRLAREHAQKCQQQQREAEGSRRPPRAEGSSQSWRQQEEEQRLFRERARAKEEELRESRARRAQEALGDREPKPTRAGPREEHPRGAGRGSLWRFGDVPWPCPGGGDPEAMAAALVARGPPLEEQGALRRYLRVQQVRWHPDRFLQRFRSQIETWELGRVMGAVTALSQALNRHAEALK

SEQ ID NO: 56689 - protein, 366 aa, Artificial Sequence [sequence omitted]

SEQ ID NO: 56690 - DNA, 1101 bp, Artificial Sequence
  derived and/or modified sequence
atgtctaacccaagcccacaggtgcccgaagaagaagcatctacctccgtgtgccggcctaaatccagtatggcttctaccagtaggcgtcagaggcgcgaaaggaggttccgacgataccttagtgcaggtcgacttgttcgtgcacaagcgcttttgcagagacaccccggactggacgtcgacgctggccagcccccccctctgcaccgcgcttgcgcccggcatgacgcacctgctctgtgtctcctgctacgattgggcgccgatcccgcgcaccaagatcggcacggggataccgcactgcacgccgctgctagacagggacccgacgcttatacagacttctttctgccacttctttcccggtgtccctccgcaatggggattaagaacaaggacggtgagacgccagggcagattttgggctgggggcccccgtgggactcagccgaggaggaagaagaagatgatgcttccaaggagagagaatggcgccaaaaattacagggggatgcctcccacgagacacaggagccagaaagtttctcggcctggtcggatcggctagcaagagagcatgctcagaaatgtcaacaacaacaaagagaggccgaggggtctaggcgccctccaagggcggagggaagttctcagagctggcggcagcaggaggaggaacagcggctgttccgcgagcgcgctcgtgcgaaagaagaggagctcagggagtcccgggcacgccgagcccaggaagctctaggggaccgcgagccgaaacccacacgcgccggcccgcgcgaggagcacccccggggtgcaggtcggggctccctctggcggtttggcgatgttccctggccatgccccgggggaggtgacccagaagcaatggccgccgccttagtggctagaggaccacctctcgaagagcagggtgccctcaggcgctacctacgcgttcaacaagttcggtggcacccagatagattcttgcaacgctttagatctcaaatcgaaacttgggagctcggccgcgtcatgggtgctgttaccgccctgtctcaggctctcaacaggcatgccgaggctttaaaatag

SEQ ID NO: 56691 - DNA, 1101 bp, Artificial Sequence
  derived and/or modified sequence
atgtccaacccgtcaccccaggttccagaagaggaggcatcaacatctgtgtgccgccccaagtcatctatggcctcaacctcaagaaggcaaaggcgtgagcggagatttcggcgctaccttagcgccggacgcctggtgcgggcccaagcattactccagcgccaccccggactcgatgttgacgcaggccagcctccccctctccacagggcttgcgctcggcacgatgccccggcactgtgtcttttacttcgcctgggcgctgacccggcccatcaggaccggcacggagacactgcacttcacgccgcagcacgacagggtccggacgcatacactgatttcttcctgcctttactgagcagatgtccttctgcaatgggaatcaaaaataaagacggcgagacaccggggcaaattttgggatggggtcccccatgggactctgctgaggaggaggaggaggacgacgcttctaaagagcgcgagtggcgacaaaaattgcaaggggacgcttctcatgaaactcaggagccagagagctttagcgcttggagtgacaggctggcacgtgagcatgctcaaaagtgccagcagcagcagcgtgaggctgaggggagctgccggccacctagagctgagggctcgagtcagtcttggaggcaacaggaggaggagcagcgcttatttcgagaacgggcccgggccaaagaggaagaacttagagagtctagagcccggagggcccaggaggccctcggcgatcgggaaccaaagcctacaagggccgggccccgcgaagaacaccctaggggtgccggccgggggtcactgtggcgttttggtgacgtgccttggccctgcccagggggcggtgacccagaagctatggcagcagcactggtggcacgcggccccccactggaggagcagggcgcactgcgcaggtacctcagagtccagcaagtgcggtggcaccccgatagattcctacagcggtttagatcccagatagagacctgggaacttgggcgcgtgatgggggcagtcacggccttgagtcaggccctcaaccgacatgccgaagctctcaaatag

SEQ ID NO: 56692 - DNA, 1101 bp, Artificial Sequence
  derived and/or modified sequence
atgagcaatccgtcccctcaggtcccagaggaggaggcatctacaagcgtgtgcaggccgaagagttccatggcctcgacctcacgcaggcagcgccgcgagaggcggttcagaaggtacctctctgcagggcgattggtcagagcccaggccctcttgcagcgccaccccggcctggatgtagacgccggccagcctccccctctccatcgggcatgtgcaagacatgacgccccagctttatgcctactcctcagattaggagccgatccggcacatcaagacagacatggtgacaccgccctccatgcagctgcccgacagggacccgatgcgtacactgactttttcctccccttgctcagtaggtgcccatccgccatgggcattaagaacaaggacggagaaacacctggccagatcctgggatgggggcctccttgggatagcgcagaggaggaagaagaggacgatgcatctaaggagcgggagtggaggcaaaagctccaaggcgacgccagccatgagacacaggagcccgagtctttttccgcgtggagcgatcgtctagcccgcgagcatgcccagaagtgccagcagcagcaacgggaagcggagggaagttgcagaccccccagagctgagggctctagccagtcatggagacagcaggaagaggaacagcgattgtttcgtgaaagggccagggccaaagaagaagaactgcgcgaaagtagagctaggcgcgctcaagaggccctgggcgaccgagaacctaaaccgacaagggcggggccaagagaggaacacccacgtggagccggcaggggcagcctatggcggttcggagacgtgccatggccctgcccagggggcggggatccggaggccatggcagctgcccttgttgccaggggtcctcctttagaggaacagggcgctctgagacgctaccttcgggttcagcaggttagatggcatccagaccggtttctccaaagatttagatcccagatagagacctgggagttaggtagggtcatgggcgcagtgacagcgctgagtcaggccctgaatcgccacgccgaagcccttaagtag

SEQ ID NO: 56693 - DNA, 1101 bp, Artificial Sequence
  derived and/or modified sequence
atgtctaaccctagtccacaggtacccgaagaggaggccagcacctcggtgtgtaggcctaagtcctccatggcatccacgagccggcggcagagacgggaacggagattccggaggtatctcagtgccgggagactggttcgggcgcaagcccttctgcagagacatcccggtctcgatgtagatgccggtcagccccctccgctccatcgcgcttgcgcacgccatgacgccccagccctgtgcctgctgctgcgcctcggtgctgacccagcacatcaggacagacacggagataccgcccttcacgccgccgcccgccagggtccagatgcctacacagactttttcttgccattgttaagccgctgccctagcgctatgggaattaaaaacaaagatggcgaaactcccggccagatcctcggatggggacctccatgggatagcgccgaggaagaggaagaggacgacgctagcaaagagcgcgaatggcggcagaagctgcagggtgacgccagccatgagacacaggagccagaatcctttagtgcttggagtgacaggttggctagggagcacgcacagaagtgtcagcagcaacagagggaggccgaggggtcttgccgccctccacgtgccgaaggaagctctcaatcttggaggcagcaggaagaggagcagaggctgttccgggaacgagctcgcgctaaagaggaggaactgcgggagagccgggcccgccgagcgcaagaggccctcggcgacagggaacccaaacccaccagggctggcccccgcgaagagcaccctcgaggggccgggagagggagtttgtggcgatttggagacgtcccatggccctgtcccggtgggggggacccggaggcaatggctgccgctttggtggctagagggcctcctctggaggaacaaggggctctaagaagatatctgagggtgcagcaggtcaggtggcaccctgaccgcttcctgcaaagatttcgaagtcaaattgagacctgggaattggggagggtgatgggagccgtaacagccttatctcaggcactcaatagacacgctgaggcactgaaatag

SEQ ID NO: 56694 - DNA, 1101 bp, Artificial Sequence
  derived and/or modified sequence
atgtcaaatcctagtccacaggtgcctgaagaagaagcgagcaccagcgtgtgtagacctaagagctcaatggctagcaccagccgccggcagaggcgggaacgacgctttcggcggtacctaagcgcaggacgcctggtgcgtgcccaggccttgttgcagcggcatcccgggcttgacgtcgatgcggggcaaccacctccacttcatcgtgcttgcgccagacatgatgctccggcactgtgtctgctcctgagattaggcgctgatcctgcgcaccaggacagacacggagacacagcactgcatgctgccgcacgacagggtcccgacgcctataccgacttcttccttccactgctgtcccgctgtccctccgctatgggaatcaagaataaggacggggagacacctgggcagatacttggctggggcccaccctgggatagcgccgaagaggaagaagaagacgacgcatctaaagaacgcgaatggcggcaaaaactgcagggagacgcctctcatgaaacacaggaacctgagagtttctctgcttggagcgacagactagctagggaacatgcacaaaaatgccagcaacaacaacgagaagccgaaggaagctgtcggccccctcgagcagagggcagcagccagagttggaggcagcaggaggaggagcagcggctctttagggagagggctcgggcaaaggaggaggagttacgcgagagccgtgcgcgaagggctcaggaggccttaggggatcgagagccaaaaccaacgcgcgccgggcccagagaggagcacccacgcggggccggtagggggtccttatggcgcttcggtgacgtgccctggccatgccccggcggtggcgaccctgaggcgatggccgccgccctcgtggcccgcgggcccccattggaagagcagggcgcgctgaggcgctacctaagggtgcagcaagtgagatggcacccagaccggtttttacagagattccgaagtcagatagaaacctgggagctgggcagggtgatgggcgcagtgactgcactgagccaggcccttaaccggcatgccgaagccctgaaatag

SEQ ID NO: 56695 - DNA, 1101 bp, Artificial Sequence
  derived and/or modified sequence
atgtctaatcctagccctcaggttccggaagaagaagcctcaacttccgtttgccggccaaaatcttctatggcttctactagtaggcggcagcgcagggagaggaggttcaggcggtatctgtctgccgggagacttgtgagagcccaagctcttctgcagaggcatccgggcctggatgtcgacgcaggacagcctcccccattgcacagagcctgcgcacgccacgatgcccctgctctctgtcttctgctccggctcggagcagacccggctcaccaagatcggcacggtgataccgcactgcacgcagcagcaagacagggaccggatgcctacacagatttcttcctccccctattgagtcgctgtcctagcgccatgggtattaagaataaggatggcgagaccccgggccagatcctggggtggggacccccttgggactcagccgaggaggaggaagaggacgacgccagcaaagagagagagtggagacagaagctacaaggcgacgcgagtcatgagactcaggagcccgagtcattttctgcctggagcgacagactcgcgcgagagcatgcccagaagtgccagcaacaacaaagagaggccgaaggctcatgtaggcctccccgcgccgagggaagcagtcagagttggcgccaacaagaggaggaacagagactgttccgagaacgcgcacgagccaaagaagaggagctgcgggagtcccgggcccgcagggcccaggaagccctgggcgatagagagccaaagccaactcgggcggggccccgcgaggagcatccgcgaggggcaggaagaggcagcctatggcggtttggtgacgtgccgtggccttgccccggggggggcgaccctgaggccatggccgctgcattagtggctcgtggacccccgcttgaggaacagggcgcacttcgcaggtatttaagggtgcaacaggtgaggtggcacccagacagatttctgcagagatttaggagtcagattgagacttgggaactcgggcgggtgatgggtgctgtcacggcgctatctcaggcgctcaaccgacatgcagaggcactgaaatag

SEQ ID NO: 56696 - DNA, 1101 bp, Artificial Sequence
  derived and/or modified sequence
atgagcaacccgtctccacaagtgcctgaggaagaagcaagcacatcagtatgtcgtcctaaatcatccatggccagcacttccaggagacagagacgcgaaaggcgctttcggaggtatctcagtgctgggagacttgtgagggctcaggccttgttacagcgccacccagggcttgacgtagacgccggacaacctcccccgctgcaccgcgcttgtgctcgacacgatgcccccgctttgtgcctattgcttcggctgggtgccgatccagcccaccaggatcgccatggcgacacagctctacatgcggctgcgcgccagggaccagacgcatacacagactttttcctcccgcttctgtctcgctgcccctctgccatgggaattaagaacaaggatggtgagactcctggccagatacttggctgggggccaccttgggattcagcagaagaggaagaggaagacgacgccagcaaagagcgtgagtggcgccagaagctgcagggcgacgcaagtcatgagacgcaggagccagagtccttcagtgcttggtctgacagactggctagagaacacgcgcagaagtgccagcagcaacagcgcgaggccgaaggaagctgccgcccccctcgcgccgaaggctcgagtcagtcgtggcgtcagcaggaggaagaacagcgtctgttcagggagagggcgagagccaaagaggaagagctcagggaaagccgcgcacggcgcgcccaggaggcactcggagatagggagcccaaaccaacacgtgcaggacctcgcgaagagcatcccaggggcgctgggaggggcagcctttggagatttggcgatgttccctggccttgccccggaggcggcgatcccgaggccatggcagccgctctggtcgccagagggccccccctcgaggaacagggagcactgagacggtacctgcgggtccagcaagtgcgctggcatccagatcgcttcttgcagcgttttagatcgcagatcgagacttgggaactgggaagggtgatgggcgcagttactgccctctcacaagccttgaacaggcacgccgaggcactgaaatag

SEQ ID NO: 56697 - DNA, 1101 bp, Artificial Sequence
  derived and/or modified sequence
atgagcaaccccagcccccaggtgcctgaggaggaggccagcacctctgtgtgccggcccaagagctccatggccagcaccagccggcggcagaggcgggagcggcgcttccgccgctacctgtctgctggccgcctggtgcgggcccaggccctgctgcagaggcaccctggcctggatgtggatgctggccagcccccacccctgcaccgggcctgtgcccggcatgatgccccagccctgtgcctgctgctgcggctgggcgctgaccctgcccaccaggacagacatggagacacagccctgcacgccgccgcccggcagggcccagatgcctacacagacttcttcctgcccctgctgagccgctgccccagcgccatgggcatcaagaacaaggatggagagaccccaggccagatcctgggctggggccccccctgggacagcgctgaggaggaggaggaggatgatgccagcaaggagcgggagtggaggcagaagctgcagggagatgccagccatgagacccaggagcctgagagcttcagcgcctggagcgaccggctggcccgggagcacgcccagaagtgccagcagcagcagcgggaggccgagggcagcagaagaccacccagggctgagggcagcagccagagctggaggcagcaggaggaggagcagaggctcttccgggagcgggcccgggccaaggaggaggagctgcgggagagccgggcccggcgggcccaggaggccctgggggaccgggagcccaagcccacccgggccggcccccgggaggagcaccccaggggggccggccggggcagcctgtggaggtttggagatgtgccctggccctgccctgggggcggggaccctgaggccatggccgccgccctggtggcccggggcccccccctggaggagcagggcgccctgcggcgctacctgcgggtgcagcaggtgcgctggcacccagaccgcttcctgcagcgcttccgcagccagatcgagacctgggagctgggccgggtgatgggcgctgtgacagccctgagccaggccctgaacagacatgctgaggccctgaagtag

SEQ ID NO: 56698 - DNA, 1101 bp, Artificial Sequence
  derived and/or modified sequence
atgagcaaccccagcccccaggtgcctgaggaggaggccagcacctctgtgtgccggcccaagagctccatggccagcaccagccggcggcagaggcgggagcggcgcttccgccgctacctgtctgctggccgcctggtgcgggcccaggccctgctgcagaggcaccctggcctggatgtggatgctggccagcccccacccctgcaccgggcctgtgcccggcatgatgccccagccctgtgcctgctgctgcggctgggcgctgaccctgcccaccaggacagacatggagacacagccctgcacgccgccgcccggcagggcccagatgcctacacagacttcttcctgcccctgctgagccgctgccccagcgccatgggcatcaagaacaaggatggagagaccccaggccagatcctgggctggggccccccctgggacagcgctgaggaggaggaggaggatgatgccagcaaggagcgggagtggaggcagaagctgcagggagatgccagccatgagacccaggagcctgagagcttcagcgcctggagcgaccggctggcccgggagcacgcccagaagtgccagcagcagcagcgggaggccgagggcagctgcaggcctcccagggctgagggcagcagccagagctggaggcagcaggaggaggagcagaggctcttccgggagcgggcccgggccaaggaggaggagctgcgggagagccgggcccggcgggcccaggaggccctgggggaccgggagcccaagcccacccgggccggcccccgggaggagcaccccaggggggccggccggggcagcctgtggaggtttggagatgtgccctggccctgccctgggggcggggaccctgaggccatggccgccgccctggtggcccggggcccccccctggaggagcagggcgccctgcggcgctacctgcgggtgcagcaggtgcgctggcacccagaccgcttcctgcagcgcttccgcagccagatcgagacctgggagctgggccgggtgatgggcgctgtgacagccctgagccaggccctgaacagacatgctgaggccctgaagtag

SEQ ID NO: 56699 - DNA, 1101 bp, Artificial Sequence
  derived and/or modified sequence
atgagcaaccccagcccccaggtgcccgaggaggaggccagcaccagcgtttgccggcccaagagcagtatggcttctacaagcagaaggcagagaagggagaggaggttccggagatacctgagcgccggaaggttggttcgcgcccaagcactgctccagcgccaccccggactggatgtggacgcgggtcaacctcctcctctgcatcgggcatgtgcgcgccacgacgcccctgccctctgcctgcttcttagactcggtgccgatcctgcccaccaagacagacatggggatactgcccttcacgcagctgccaggcagggacccgatgcctacaccgactttttcctgcccctgttaagcaggtgtccaagcgctatgggaatcaaaaacaaagacggagaaacccctggacaaatcctagggtggggccctccttgggacagcgcagaagaagaagaagaggatgatgcctcgaaggagagagaatggagacagaaactgcagggcgatgctagtcatgaaacccaggagcccgagtccttcagcgcatggtccgataggctcgctcgggagcatgcccagaaatgtcagcagcaacagcgcgaggcagaaggcagtcggaggccacctagagcagagggaagtagccaaagctggaggcagcaagaggaagagcagcggctgttcagggagagagcgcgagcaaaggaggaagagttgagagaatccagggcccggagggcgcaggaagcgctcggagaccgggaacctaaaccaacacgcgcgggcccccgtgaggagcatccaaggggggccggcagaggatctctgtggcggtttggagacgtgccatggccttgcccaggcggtggcgatccagaggctatggctgccgctttagttgctcggggtcctccactggaggaacagggtgccttacgacggtacttgcgagtccagcaggtgcgatggcaccctgaccggtttctgcagcggttcaggtctcagattgagacctgggaactcggcagggtgatgggcgctgtgacggccctctcccaggccctgaatagacacgcagaagccctgaagtag

SEQ ID NO: 56700 - DNA, 1101 bp, Artificial Sequence
  derived and/or modified sequence
atgagcaaccccagcccccaggtgcccgaggaggaggccagcacctctgtttgcagacctaagtcaagtatggcttccacatcacgccggcaacggcgcgaacggaggtttcgacggtacctgagcgctgggaggctggtacgtgcccaagctcttctgcaacggcaccctgggctggacgtagacgcgggccagcctccaccgttacatagggcctgtgcgaggcacgacgccccggccctttgcttgcttctgaggttgggcgccgatcccgcccaccaggacaggcacggggatacagcgcttcacgcagcggccagacagggccctgacgcctacaccgacttctttctccccctgctgagccgctgcccttctgccatgggcattaagaataaggatggtgagacccccggacagattctaggttgggggccaccgtgggattccgctgaggaggaggaagaggacgacgcctcaaaagaacgcgagtggaggcaaaagctccaaggggacgccagtcacgaaacccaggagcctgagtcctttagcgcctggtctgacagactcgctagagagcacgctcaaaaatgccagcagcagcagagagaagccgaggggtcatgtcgcccccctcgcgccgaagggtcttcccagtcctggagacagcaggaagaggagcagagactttttcgagaacgagccagagccaaggaggaggaactccgggagtctagagcccggagggctcaggaagctcttggggatcgtgaacccaagcccacccgcgcgggcccgagagaggaacatccacgtggtgccggccggggaagcctttggcgctttggagacgttccgtggccctgtccgggcgggggggaccccgaagccatggctgccgcgttggtggctaggggaccacccttagaagagcagggggccctaaggcgctacttgcgggtccagcaagttcggtggcaccccgatcgatttctgcaacgctttcgatcacagatagaaacgtgggagctgggtcgggttatgggcgccgtgaccgccctatcacaggcactgaacagacacgccgaggctttaaaatag

SEQ ID NO: 56701 - DNA, 1101 bp, Artificial Sequence
  derived and/or modified sequence
atgagcaaccccagcccccaggtgcccgaggaggaggccagcacctctgtgtgccgtccaaagagttctatggcttcaacatctcgcagacagcgtagagaacgccgattccgacgatatttatcggcaggtcgcctggtgcgcgcccaggccctgttacagagacaccccggactcgacgttgacgcaggccagcctcctccactgcatagggcctgtgcgaggcacgacgcgcctgcgctctgtttactgttacgactcggggcagacccagctcatcaggatcggcacggtgacactgccctgcatgcagcagcaaggcagggtcccgacgcctatacggacttcttcctacctctcctgagtcgatgcccttctgctatgggaatcaagaacaaggatggggaaacaccgggccagattctaggatggggacctccctgggactcagccgaggaggaggaagaggacgatgctagtaaggaaagggaatggagacaaaagctgcagggcgatgctagccacgagacccaggaaccggaatcctttagtgcctggtcggataggctcgccagagaacacgcgcaaaagtgtcagcagcagcaacgggaggctgagggaagctgccggccacctcgggccgagggcagttcacaaagctggagacagcaggaggaggaacagaggctgttccgcgaaagagcacgcgctaaggaggaagaactaagggagtcccgagcccgccgagcacaggaagctcttggggaccgggaacctaagcctacccgggccggccctcgcgaggagcaccctcgcggtgcaggaagaggctccctgtggcggtttggagatgtaccctggccatgtcccggaggtggagatccagaagcaatggctgcagctctggtagcccgcggtccacccctcgaagaacagggcgcactgcgccgatatttgagagtgcagcaggtacggtggcacccagatcgctttctgcagcgtttccgatctcagatcgaaacatgggaattagggcgcgtcatgggcgcggtgacagcactgagtcaggcattgaaccgacacgccgaggcgctcaagtag

SEQ ID NO: 56702 - DNA, 1101 bp, Artificial Sequence
  derived and/or modified sequence
atgagcaaccccagcccccaggtgcccgaggaggaggccagcacctcggtgtgtcgaccaaagagcagtatggccagtacctctcgtcgccagaggcgagagcgcaggtttcgcaggtatctgtctgccggccgccttgtcagggcccaagccttgctgcaacggcatcctggcctagatgtggacgctggccagcctcctccgttgcacagagcatgtgccaggcacgacgcaccagccttatgtctgttactgcgcttgggcgcggatcctgcacaccaggaccggcacggagacaccgcattgcacgccgccgcccggcagggtccagatgcttatacagattttttcctgccattgttgtcacgttgtccgtctgcaatgggcattaagaataaagacggggagacaccggggcaaatccttggctggggcccaccctgggacagcgcagaagaggaggaggaagacgacgcgtctaaggaacgcgagtggcggcagaagttacagggggatgcttcacacgaaacacaagagccagaaagtttttcggcatggagcgaccgacttgctcgagaacatgcacaaaagtgccagcagcagcagcgcgaagctgagggatcttgcaggcctccccgcgcagaagggagcagccagagctggcggcaacaggaagaagagcagagactttttagagagagggcccgtgctaaagaggaagagctgcgggaatctcgggccaggcgggcacaggaggcacttggagacagggaaccaaaaccaacccgggccggcccacgggaagagcatccacggggtgccggcaggggcagcctgtggagatttggtgacgtgccttggccctgtcccggcggaggggacccagaggccatggcagctgccttggtggccaggggacccccactcgaggagcagggtgccctgagacggtatctaagagtgcaacaagtacgatggcaccccgatcggtttttacaacgcttccgctctcagatagagacttgggaactgggtcgggtgatgggggctgtgactgccctgtcacaggccctgaataggcatgctgaagcactcaagtag

SEQ ID NO: 56703 - DNA, 1101 bp, Artificial Sequence
  derived and/or modified sequence
atgagcaaccccagcccccaggtgcccgaggaggaggccagcacctctgtgtgtcggccgaagagcagcatggcgtccaccagcagacggcaacgccgggagcgccgattccgacggtatttaagcgctggaagactggtgagggcccaggccctcctgcagcgccacccagggctggatgtggacgctggtcaaccgcctcctcttcatagggcatgtgccagacatgacgcccctgcactctgtcttctcctgcggctgggcgcagaccccgcccatcaggatcggcatggcgataccgcactgcacgccgcagctagacagggccctgatgcctataccgacttcttcctcccacttctctcgagatgtccctcagcaatggggatcaaaaacaaagatggcgagacacctggccagatcttagggtgggggcctccctgggactcggccgaagaggaggaagaagatgatgcgtcaaaagaaagagagtggagacagaagttacagggagatgcgagtcacgagacccaggagcccgaatcgttttcggcctggtcagacagactggccagggagcatgcgcaaaagtgtcagcagcaacagcgggaagccgaaggctcgtgtaggcctccaagggctgagggatcatctcagtcttggagacagcaggaggaagaacagagactatttcgggagagggcaagggccaaggaggaggaattaagagagagtcgtgccagacgcgcacaggaagcactcggggacagggagcccaaaccaactcgggcaggaccgagagaagagcacccgcgcggcgcaggacgtgggagtctgtggagattcggcgacgtgccctggccctgccctggtggaggcgaccctgaggcaatggccgccgctctagtagcacgcggtccgccactggaggaacagggtgcacttcgcaggtatcttcgagtgcagcaggtccggtggcaccctgacagattcctccaacgttttaggagccagatcgagacttgggagctgggtcgtgtgatgggggccgtgaccgcattgagccaggctctgaataggcatgcagaggctctcaagtag

SEQ ID NO: 56704 - DNA, 1101 bp, Artificial Sequence
  derived and/or modified sequence
atgagcaaccccagcccccaggtgcccgaggaggaggccagcacctccgtgtgcaggccgaagagctccatggccagcacctcgcgtcgccagcgccgggaacggagattcaggcgatacctgagtgctggacggcttgtcagagcgcaagcgttattgcagaggcacccgggcctggacgtagatgccggacagcctcccccactacaccgcgcctgtgcacggcacgacgccccagccttatgtcttcttctgagattgggggccgatcctgctcaccaggatcggcatggggacacggccctccacgcagccgccaggcaaggcccagacgcctacacagatttctttctgcccctactgtctaggtgcccaagcgctatgggtatcaagaacaaagatggcgagacacccggtcagatcctggggtgggggccaccttgggactcggctgaagaggaagaggaggacgatgcctccaaagagcgggaatggagacagaagttgcagggcgatgcttcacatgagactcaggaaccagaaagcttttccgcgtggtcagaccgactcgctagagaacatgcgcagaagtgtcagcagcagcaaagagaggccgagggttcttgtagaccaccacgggctgaaggcagcagccagtcctggaggcagcaggaagaggagcaacgactcttccgtgaaagagccagagccaaagaggaagagctgcgggagtcccgcgcacggagagcacaagaggcactcggagaccgcgagccaaagcctacacgcgcgggcccccgggaggaacacccacggggagctggtcgcgggtccctatggagatttggtgatgtgccatggccatgccctggcgggggcgaccctgaggccatggctgccgctttagtcgccagaggcccccctctcgaagaacaaggagcactccggcgatatttgagggtgcagcaagttcgctggcacccggatcgttttttgcagcggttcaggagtcaaattgagacatgggagctgggccgggttatgggggcagtgacagcgctgtcacaagcgctgaataggcatgctgaggccctgaaatag

SEQ ID NO: 56705 - DNA, 1101 bp, Artificial Sequence
  derived and/or modified sequence
atgagcaaccccagcccccaggtgcccgaggaggaggccagcaccagtgtgtgcagacccaaaagctcgatggcctcaacatctcggcgacagaggcgggagagacgattccgccgatatttgtctgccgggcggttggtgagggcccaagccctattgcaacgacaccctggactggatgtcgatgcaggacagcctccgccgctgcatagggcctgcgccagacatgatgcaccagccctctgtctgctgctccgcttgggcgccgatcctgcccatcaggatcggcatggagatacagccctccacgctgctgcacgccaaggtccggacgcttacactgatttctttctgccattactgagccgatgcccatcagccatggggatcaaaaataaggacggagaaactccgggtcagatactgggctggggcccaccctgggattccgcagaggaggaagaagaggacgacgcttcaaaggaacgcgagtggaggcagaagctgcaaggcgacgcttcccatgaaactcaggaacccgaaagtttctctgcctggagcgatcggttggctagagagcacgcccagaagtgccagcagcagcagagggaggccgagggcagctgtcgcccacctagggctgagggatccagccagtcctggagacagcaagaggaggagcaaagactcttcagagagcgggctcgagccaaggaggaagagttacgggagtcccgcgcccgaagggcgcaagaggcccttggagacagggaacccaagcccactcgagccggcccccgcgaggaacatccacggggcgcaggacgggggtctctttggcgctttggcgatgtgccctggccctgtccaggtgggggagacccagaggccatggccgcagctctggttgcaagaggccctcctctggaagagcagggggcgctcagacgctatctccgtgttcagcaagtccggtggcaccccgatagatttcttcagagatttagatctcagatagagacttgggaattgggtagggtgatgggtgccgtgaccgccctgagccaggccctgaacagacacgcggaagccttgaaatag

SEQ ID NO: 56706 - DNA, 1401 bp, Artificial Sequence
  derived and/or modified sequence
ccgcctcccgtctccgagcttcttaaacacaggccttgggcctacggctctgggggtacttgggggggcgggggcaggtctgatgagtaacccctccccccaggttccagaggaagaagcctccacatctgtctgccggcccaagagttccatggcctccacttcccgccgccaacgccgagaacgtcgctttcgtcgttacttgtctgcaggacggctggtccgggcccaggccctcctccagcgacacccaggcctcgatgtagatgctgggcagcccccaccactgcaccgggcctgtgcccgccacgatgcccctgccctgtgcctgctgcttcggctcggggctgaccctgcccaccaggaccgccatggggacacggcactgcatgctgctgcccgccagggcccagatgcctacaccgatttcttcctcccgctgctaagccgctgtccctccgccatgggaataaagaataaggatggggagacccctggccaaattttgggctggggacccccctgggattctgctgaagaggaggaagaagatgatgcctccaaggagcgggaatggagacagaagctccagggtgatgcctcccatgaaacccaggaacctgagtccttctcagcctggtcagatcgcctggcccgggaacatgcccagaagtgccagcagcagcagcgagaagcagagggatcccgtcgacccccacgtgctgagggctccagccagagctggcgacagcaggaggaggagcagcggctcttcagggagcgagcccgggccaaggaggaagagctgcgtgagagccgagccaggagggcgcaggaggctctaggggaccgagaacccaagccaaccagggccgggcccagggaagagcaccccagaggagcggggaggggcagcctctggcgatttggtgatgtgccctggccctgccctgggggaggggacccagaggccatggctgcagccctggtggccaggggcccccctttggaggaacagggggctctgaggaggtacttgagggtccagcaggtccgctggcaccctgaccgcttcctgcagcgattccgaagccagattgagacctgggagctgggccgtgtgatgggagcagtgacagccctttctcaggccctgaatcgccatgcagaggccctcaagtgaccctagggaagaagcaagaaacttcggggctgcagcctcaggatgaggcagaaggaagggtaagggaaaggatggggaccacaaggaagagccaggtgctgctcagcagaggatatgggtgggagcgaaagttgtaacaagtgggggtggggggtgcgggccgccaccactgctccttgactctgccgtttcctaataagacctggttccacatctca

SEQ ID NO: 56707 - DNA, 1401 bp, Artificial Sequence
  derived and/or modified sequence
ccgcctcccgtctccgagcttcttaaacacaggccttgggcctacggctctgggggtacttgggggggcgggggcaggtctgatgagtaacccctccccccaggttccagaggaagaagcctccacatctgtctgccggcccaagagttccatggcctccacttcccgccgccaacgccgagaacgtcgctttcgtcgttacttgtctgcaggacggctggtccgggcccaggccctcctccagcgacacccaggcctcgatgtagatgctgggcagcccccaccactgcaccgggcctgtgcccgccacgatgcccctgccctgtgcctgctgcttcggctcggggctgaccctgcccaccaggaccgccatggggacacggcactgcatgctgctgcccgccagggcccagatgcctacaccgatttcttcctcccgctgctaagccgctgtccctccgccatgggaataaagaataaggatggggagacccctggccaaattttgggctggggacccccctgggattctgctgaagaggaggaagaagatgatgcctccaaggagcgggaatggagacagaagctccagggtgatgcctcccatgaaacccaggaacctgagtccttctcagcctggtcagatcgcctggcccgggaacatgcccagaagtgccagcagcagcagcgagaagcagagggatcctgtcgacccccacgtgctgagggctccagccagagctggcgacagcaggaggaggagcagcggctcttcagggagcgagcccgggccaaggaggaagagctgcgtgagagccgagccaggagggcgcaggaggctctaggggaccgagaacccaagccaaccagggccgggcccagggaagagcaccccagaggagcggggaggggcagcctctggcgatttggtgatgtgccctggccctgccctgggggaggggacccagaggccatggctgcagccctggtggccaggggcccccctttggaggaacagggggctctgaggaggtacttgagggtccagcaggtccgctggcaccctgaccgcttcctgcagcgattccgaagccagattgagacctgggagctgggccgtgtgatgggagcagtgacagccctttctcaggccctgaatcgccatgcagaggccctcaagtgaccctagggaagaagcaagaaacttcggggctgcagcctcaggatgaggcagaaggaagggtaagggaaaggatggggaccacaaggaagagccaggtgctgctcagcagaggatatgggtgggagcgaaagttgtaacaagtgggggtggggggtgcgggccgccaccactgctccttgactctgccgtttcctaataagacctggttccacatctca

SEQ ID NO: 56708 - DNA, 1401 bp, Artificial Sequence
  derived and/or modified sequence
ccgcctcccgtctccgagcttcttaaacacaggccttgggcctacggctctgggggtacttgggggggcgggggcaggtctgatgagtaacccctccccccaggttccagaggaagaagcctccacatctgtctgccggcccaagagttccatggcctccacttcccgccgccaacgccgagaacgtcgctttcgtcgttacttgtctgcaggacggctggtccgggcccaggccctcctccagcgacacccaggcctcgatgtagatgctgggcagcccccaccactgcaccgggcctgtgcccgccacgatgcccctgccctgtgcctgctgcttcggctcggggctgaccctgcccaccaggaccgccatggggacacggcactgcatgctgctgcccgccagggcccagatgcctacaccgatttcttcctcccgctgctaagccgctgtccctctgccatgggaataaagaataaggatggggagacccctggccaaattttgggctggggacccccctgggattctgctgaagaggaggaagaagatgatgcctccaaggagcgggaatggagacagaagctccagggtgatgcctcccatgaaacccaggaacctgagtccttctcagcctggtcagatcgcctggcccgggaacatgcccagaagtgccagcagcagcagcgagaagcagagggatcctgtcgacccccacgtgctgagggctccagccagagctggcgacagcaggaggaggagcagcggctcttcagggagcgagcccgggccaaggaggaagagctgcgtgagagccgagccaggagggcgcaggaggctctaggggaccgagaacccaagccaaccagggccgggcccagggaagagcaccccagaggagcggggaggggcagcctctggcgatttggtgatgtgccctggccctgccctgggggaggggacccagaggccatggctgcagccctggtggccaggggcccccctttggaggaacagggggctctgaggaggtacttgagggtccagcaggtccgctggcaccctgaccgcttcctgcagcgattccgaagccagattgagacctgggagctgggccgtgtgatgggagcagtgacagccctttctcaggccctgaatcgccatgcagaggccctcaagtgaccctagggaagaagcaagaaacttcggggctgcagcctcaggatgaggcagaaggaagggtaagggaaaggatggggaccacaaggaagagccaggtgctgctcagcagaggatatgggtgggagcgaaagttgtaacaagtgggggtggggggtgcgggccgccaccactgctccttgactctgccgtttcctaataagacctggttccacatctca

SEQ ID NO: 56709 - DNA, 1101 bp, Artificial Sequence
  derived and/or modified sequence
atgagcaacccctcccctcaggtgcctgaagaggaggctagtacgagcgtctgccgaccgaagagcagtatggcatcgacgtcaagacgccagcggagagagcggagatttagaaggtatctgtccgccggacggctggtgagggcccaggccctcctacagagacaccctggactggacgtggacgccggtcagccccctccgctgcatcgcgcatgcgctcgccatgatgcccctgccctgtgcctgttactgcgactcggcgcagacccagcccatcaggatcgccatggggacacggccctgcacgccgctgcccgacaaggtcctgatgcctataccgacttcttcctacctcttctctcccgatgccctagtgctatgggtatcaaaaataaagacggggagacccccggacagattctcggatggggtccaccatgggattcggccgaggaggaagaggaggacgatgcatctaaggagcgtgagtggcgccagaagctgcaaggcgacgcctcacacgaaacgcaggagcccgaatctttcagcgcttggagcgaccgactggctcgggaacatgcacagaaatgtcagcagcagcaaagagaagccgagggcagcaggcgcccacctcgggctgaaggctcgagccagtcgtggcgtcagcaggaagaggagcaaagactgtttcgcgagcgggcaagggcgaaagaagaggagctgcgagaatcccgagcccgtcgggcacaagaggcattgggggaccgcgagcctaaacccaccagagccggaccacgcgaggagcacccaagaggtgccggaagggggtcattgtggagatttggggacgttccctggccatgccccggaggcggagacccggaggctatggctgcagccttggtggcacgtgggcctccactggaagaacagggcgctctgcgcaggtatctgcgggtgcagcaggtcagatggcatcctgatcgttttctgcagaggttccggagccagattgaaacatgggaactgggacgcgttatgggagccgtgactgctctgtcacaggcattgaatcgacacgcagaggcgctgaaatag

SEQ ID NO: 56710 - DNA, 1101 bp, Artificial Sequence
  derived and/or modified sequence
atgtcgaacccatccccccaagtgcccgaagaagaggcatcaacgagcgtgtgccgccctaagtcaagcatggctagtacatctcggaggcaacgacgtgagcgtcgctttaggcggtatctcagcgccggtagactggtccgggctcaggcactccttcagagacacccaggattggatgtggatgccggtcagcctcctcccctgcatagagcatgtgctcgccatgacgccccagctctgtgtctgctgcttcggttgggagcagatccagcgcaccaggacaggcacggggatacagctctccatgctgccgcaaggcagggtccagatgcctatacggatttttttctacctctcctgtctagatgcccatccgccatgggcatcaaaaataaagacggagagacccccggacagattttaggatgggggcctccgtgggacagcgcagaggaggaggaggaagatgacgctagtaaggagcgggaatggcgtcagaagctgcagggggatgccagtcacgaaactcaggagccggaaagttttagcgcttggtccgaccgtttggctcgggaacacgcccaaaagtgccagcagcaacaaagggaggcggagggctcctgtagaccgccacgggcagaaggtagttcacagtcgtggagacagcaggaggaggaacaaagactgttcagagagcgcgcaagagccaaggaagaagaactcagagaatcgcgcgctcgaagggcacaggaggccctaggcgatcgcgagccgaagccaacacgggcaggccctcgggaagaacaccccagaggggcagggaggggttcactgtggcggtttggcgatgtgccatggccctgcccaggaggcggagaccctgaggcaatggccgctgcactcgtagctagaggccctccccttgaagagcagggtgctcttcggagatatctgagagtgcagcaggttagatggcatcctgacagattcctgcagaggtttcgcagccaaatagagacttgggagctgggccgtgtaatgggggctgtgacagcgctgtcacaggctctcaacagacacgctgaagccctgaaatag

SEQ ID NO: 56711 - DNA, 1101 bp, Artificial Sequence
  derived and/or modified sequence
atgtccaatccgtccccgcaggttcctgaagaggaggctagcaccagtgtatgtagacctaaaagctccatggcttccacatcccggagacaaagaagggaacgcagattcagacgatatctctcagccggaagactggtgcgggcacaggctctccttcagaggcatcctggactggacgtcgatgcgggtcaacctcccccactgcacagagcctgtgctagacacgacgcaccagccctgtgcctactgctccgtcttggcgctgaccccgctcaccaggataggcatggcgacacagccttacacgccgcagcccgacaaggacccgacgcgtatactgattttttccttcctctgctcagtagatgtccaagtgctatgggaatcaagaacaaggacggggagacccccggacagattctaggctggggccctccctgggattctgcagaggaggaggaggaggatgatgcttcaaaagagcgcgagtggcgccagaagttacagggggacgctagtcacgaaacccaggagcccgaatccttttctgcttggtcagacaggctcgctagggagcatgctcagaaatgccagcaacagcagcgcgaggctgaggggtcttgtagacccccaagagctgagggcagtagccagagctggcgtcagcaagaggaggagcagcgcctgttcagggagagagcaagggcaaaagaggaagaacttcgtgagtcaagagccaggagggcccaagaggccctcggcgatagagaacccaagcctacacgagccggtcccagggaagagcacccgaggggcgcaggtcggggttcgctctggcggtttggggatgtgccgtggccttgtccgggtggtggcgacccggaggctatggccgcagctctggtggcacgcggtccccctttagaagaacaaggcgcactcaggcgttatctgagggtacagcaggtccggtggcatccggaccgattcctccagcggtttcgatctcaaatcgaaacctgggaactgggcagagttatgggggctgtcacggcactgagccaagctctcaatcggcatgcagaagccctcaagtag

SEQ ID NO: 56712 - DNA, 1101 bp, Artificial Sequence
  derived and/or modified sequence
atgagcaacccttcaccacaggtcccggaggaagaagcttctacgagcgtgtgtcggcctaaaagtagtatggcatccacatccagacgacagcgacgagaacgccgattcaggcggtacttgagcgcaggcagactcgtgagagctcaagccctgctccagagacatcccggactggacgtcgacgcaggccagcctccacccttgcatcgcgcatgcgcgaggcatgacgctcctgccctctgtctgctgctgcgattaggcgcagatccggcacatcaggatcgacacggtgatacagccttgcatgccgcagctcgccaagggccagacgcctacaccgacttctttctgcctctcttgtcaaggtgtccatctgctatggggattaagaacaaagacggagagacaccaggtcaaattttgggctgggggcctccatgggattccgccgaagaagaagaggaggacgatgcttccaaggaacgagaatggcgacagaagctccagggagacgcatcccatgagacccaagaaccagagtccttctcagcatggtccgacagactcgccagagagcacgcccagaagtgccagcagcagcaaagagaggcagagggctcctgtcgtcccccacgggcagagggcagcagccagtcttggcggcagcaggaggaagagcagcgccttttccgggagagagcgagggctaaagaggaggagctgagggaatccagggcaagacgggctcaagaagctcttggggacagggaaccaaagcctacccgggctggtccccgagaggaacatcctagaggggctggaagggggagtctgtggcgcttcggtgatgtcccatggccttgtccaggcggtggcgaccccgaggcaatggcagccgcactggtggccagagggccacccctggaagagcagggcgctctccggcgttatctacgggtacagcaggtccgatggcaccccgacagatttctccagagatttcggagtcaaattgaaacctgggaattaggaagagtcatgggggctgtgactgccctctcacaggccctcaatagacatgctgaagcattgaaatag

SEQ ID NO: 56713 - DNA, 1101 bp, Artificial Sequence
  derived and/or modified sequence
atgagcaatccaagtccgcaggtaccagaagaggaagctagtacatcggtttgccgtcctaagtccagcatggcctcaaccagccggcgtcagcgcagagagcgcagattccggcgttatctgagtgctggcaggctcgtgagggcccaggccctcctgcagaggcatccaggactggacgtggatgctggtcagcctccaccattacatagggcttgcgccaggcatgacgctcccgctctttgcttgcttctgaggctgggcgcagatcccgcacaccaggaccgccatggagacaccgccctgcacgccgcagcgcgacagggccctgatgcgtatacagattttttcttaccacttttgagccggtgcccgtcagcgatgggtattaagaacaaggatggagagacccctggccaaatcttagggtgggggccaccctgggattctgctgaagaagaggaggaggacgacgcctcaaaggagagggaatggcgacagaaactgcaaggcgatgcgagccacgaaacccaggagccagaatccttcagcgcctggagcgaccgactggccagagaacacgcgcagaaatgtcagcagcagcagcgagaggcagaagggtcttgccgtcctccaagagctgagggcagcagccagtcttggcgccagcaggaggaggagcagcgtcttttccgcgaaagagcgagggctaaggaggaggagttgcgggagtctagagctagacgagctcaagaggcacttggcgaccgcgagcctaaaccaactagagcaggccctcgggaggagcatccccgaggggcaggtcgtgggtctctctggcgctttggggatgtgccatggccctgtccaggcggtggtgatcctgaggcgatggccgcagccctagtggctcgcggtccacctttggaggaacagggcgctctgcggaggtatttgcgagtgcagcaggtgcgatggcacccggataggttccttcaacgcttcaggtcccaaattgaaacatgggagctgggtcgagtgatgggcgcagttaccgccctgtcacaggcgctgaatcggcacgcggaagccctcaaatag

SEQ ID NO: 56714 - DNA, 1101 bp, Artificial Sequence
  derived and/or modified sequence
atgtctaatccctctccacaggtacctgaagaggaagcatcaacctctgtgtgtcggccaaagagttccatggcatctacctcccgcagacagagaagggagaggaggttccgaaggtacctgtccgcaggaagactggtcagggctcaggcattgctccagcgacatcccggtctggatgtggacgcaggtcaaccgcctccgctgcaccgagcttgtgctcgccatgatgctccggctctctgcttactcctgagactcggagccgaccccgctcatcaggaccgccatggagacaccgctctgcatgctgctgctcggcagggcccagatgcgtatacagatttttttcttcctcttctatcaagatgccctagcgcgatgggcattaagaataaggatggggagaccccaggacagatccttggctgggggccaccctgggactccgccgaagaagaggaagaggatgatgcaagcaaggagagggaatggcgccagaagctccagggggacgcttctcacgagactcaggagcccgaaagcttctctgcctggagtgacaggcttgcccgagaacatgcccagaagtgtcaacagcagcagagggaggccgagggctcctgtcggccacctcgtgctgaggggtcgagtcagtcctggcgacagcaagaagaagaacaaaggttgttcagagagcgtgctcgcgcaaaggaagaggaactccgcgaatccagagctaggagagcccaggaggctctaggagacagagaacccaagcctactcgcgctggccctcgcgaagaacacccgcgtggggctggcagaggtagtctttggcgtttcggtgatgtgccttggccatgccctggcggaggggatcctgaggctatggccgctgctctggtcgcaagggggcctcctttggaagagcagggagccctccgcaggtacctccgggtgcagcaggtgagatggcacccagatagattcctgcagagattcaggagtcagattgaaacatgggaactcggaagggtgatgggggctgtgactgcactgtcccaggcgctgaaccgccatgccgaggcactgaagtag

SEQ ID NO: 56715 - DNA, 1101 bp, Artificial Sequence
  derived and/or modified sequence
atgagcaatccatcaccccaggtgccggaggaagaggcttccacgtccgtctgccggccaaaaagtagtatggccagcacaagtcgccgacagcgccgagagagacggtttagacggtacctgtcagcgggacggctcgtaagggcacaggccctcctccagcgtcacccgggactcgacgttgatgctggtcagcctccccctttacatcgtgcgtgtgcgaggcatgacgctccagccttgtgcctgctcctgagactaggggctgaccccgctcatcaggaccgccatggtgacactgctctccatgccgctgccagacagggacctgacgcctacactgacttcttcttgcccctgctgagcaggtgtccttcagccatgggtattaaaaataaagatggtgagacacctggccagattctcggctggggaccaccatgggacagtgcagaggaagaagaggaagacgatgcctccaaggaacgtgagtggcggcagaaactccagggggacgcaagccatgaaacccaggagcccgaatctttcagtgcttggagcgaccggctggctcgggagcacgcccaaaagtgtcaacagcagcagagggaagctgaaggttcatgccgcccacccagggcagaagggagctcccaatcttggcggcagcaggaggaggagcagagactctttcgcgaaagggccagggctaaagaagaggagctccgggaatctagagccagacgtgcccaggaggccctcggggacagggaacctaaacccacccgcgctggacccagagaagaacatccacggggagccggacggggttctctctggagatttggtgacgtcccctggccttgcccaggagggggagatcctgaggcaatggccgcagccctggtcgcgagaggccctccactggaagagcagggcgcattgcggagataccttagagtgcagcaggttaggtggcatcctgaccgttttctccagcggttcagatctcaaatcgaaacttgggaactcggtagggtgatgggagcagtgaccgccttatcacaggcgctgaataggcacgctgaggcgctgaaatag

SEQ ID NO: 56716 - DNA, 1101 bp, Artificial Sequence
  derived and/or modified sequence
atgagcaaccccagcccccaggtgcccgaggaggaggccagcaccagcgtgtgcagacccaagagcagcatggccagcaccagcagaagacagagaagagagagaagattcagaagatacctgagcgccggcagactggtgagagcccaggccctgctgcagagacaccccggcctggacgtggacgccggccagcccccccccctgcacagagcctgcgccagacacgacgcccccgccctgtgcctgctgctgagactgggcgccgaccccgcccaccaggacagacacggcgacaccgccctgcacgccgccgccagacagggccccgacgcctacaccgacttcttcctgcccctgctgagcagatgccccagcgccatgggcatcaagaacaaggacggcgagacccccggccagatcctgggctggggccccccctgggacagcgccgaggaggaggaggaggacgacgccagcaaggagagagagtggagacagaagctgcagggcgacgccagccacgagacccaggagcccgagagcttcagcgcctggagcgacagactggccagagagcacgcccagaagtgccagcagcagcagagagaggccgagggcagcagaagaccccccagagccgagggcagcagccagagctggagacagcaggaggaggagcagagactgttcagagagagagccagagccaaggaggaggagctgagagagagcagagccagaagagcccaggaggccctgggcgacagagagcccaagcccaccagagccggccccagagaggagcaccccagaggcgccggcagaggcagcctgtggagattcggcgacgtgccctggccctgccccggcggcggcgaccccgaggccatggccgccgccctggtggccagaggcccccccctggaggagcagggcgccctgagaagatacctgagagtgcagcaggtgagatggcaccccgacagattcctgcagagattcagaagccagatcgagacctgggagctgggcagagtgatgggcgccgtgaccgccctgagccaggccctgaacagacacgccgaggccctgaagtag

SEQ ID NO: 56717 - DNA, 1101 bp, Artificial Sequence
  derived and/or modified sequence
atgagcaaccccagcccccaggtgcccgaggaggaggccagcaccagcgtgtgcagacccaagagcagcatggccagcaccagcagaagacagagaagagagagaagattcagaagatacctgagcgccggcagactggtgagagcccaggccctgctgcagagacaccccggcctggacgtggacgccggccagcccccccccctgcacagagcctgcgccagacacgacgcccccgccctgtgcctgctgctgagactgggcgccgaccccgcccaccaggacagacacggcgacaccgccctgcacgccgccgccagacagggccccgacgcctacaccgacttcttcctgcccctgctgagcagatgccccagcgccatgggcatcaagaacaaggacggcgagacccccggccagatcctgggctggggccccccctgggacagcgccgaggaggaggaggaggacgacgccagcaaggagagagagtggagacagaagctgcagggcgacgccagccacgagacccaggagcccgagagcttcagcgcctggagcgacagactggccagagagcacgcccagaagtgccagcagcagcagagagaggccgagggcagctgcagaccccccagagccgagggcagcagccagagctggagacagcaggaggaggagcagagactgttcagagagagagccagagccaaggaggaggagctgagagagagcagagccagaagagcccaggaggccctgggcgacagagagcccaagcccaccagagccggccccagagaggagcaccccagaggcgccggcagaggcagcctgtggagattcggcgacgtgccctggccctgccccggcggcggcgaccccgaggccatggccgccgccctggtggccagaggcccccccctggaggagcagggcgccctgagaagatacctgagagtgcagcaggtgagatggcaccccgacagattcctgcagagattcagaagccagatcgagacctgggagctgggcagagtgatgggcgccgtgaccgccctgagccaggccctgaacagacacgccgaggccctgaagtag

SEQ ID NO: 56718 - DNA, 1077 bp, Artificial Sequence
  derived and/or modified sequence
atggctagcacctcccggaggcagcggcgagaacggcgatttcgaagataccttagcgccggccgcttggttcgtgctcaggcccttctacagcggcatcctggcctggatgtggatgccggccagccaccacccctgcacagggcgtgtgccaggcacgatgcccctgccctttgcctgcttttgcgcctcggggccgatcctgcccatcaggatcgacatggagatactgcacttcatgccgctgcaagacagggtcctgacgcgtacacggatttttttttgcccctgctctccagatgcccgagtgctatgggaatcaagaataaggatggcgaaacgcctggacagattctcggatggggaccaccatgggactctgcagaggaagaggaagaggatgacgcctctaaagaaagagagtggagacagaaacttcagggagaattggaagacgagtggcaggaggttatgggccgcttcgaaggagacgcctctcacgagacccaggagcctgagtctttctctgcatggtccgaccgtcttgctcgggagcatgcacagaagtgccagcagcaacagagggaagccgaggggagccgcagacctccgcgtgcagagggaagctcacagtcatggcgccagcaggaggaggagcagcggctgttcagagagcgagccagggctaaggaagaagaactacgagagagcagagccaggcgcgcccaagaggccctgggagatagagaacctaagccgacccgtgcaggaccacgcgaggaacaccccaggggggccggccgaggaagcctatggagatttggtgatgtcccatggccatgccctgggggcggcgaccccgaggcaatggctgcagccttggtggcgagggggccccctctcgaagaacaaggtgccctgcgcaggtatctgcgagtccagcaggtgcgctggcaccctgaccgctttctccagagatttcgcagccagatcgaaacttgggagctaggacgcgttatgggtgccgtcactgccctgagccaggctcttaacaggcacgccgaggctctaaaatag

SEQ ID NO: 56719 - DNA, 1077 bp, Artificial Sequence
  derived and/or modified sequence
atggcgtccacttcccgcaggcaaaggagggaacggcgattccggaggtacctgagtgccggcaggctggtgagagcacaggccctattacagcgccatcccgggttggacgtcgacgctggtcagccacctccactacaccgggcttgcgcaaggcacgacgcacctgcactgtgtctgctgctgagattaggggccgatcccgctcatcaggaccgccatggggataccgccctgcatgcagccgcccgccaaggccccgacgcatataccgacttctttttgcccctgctgtcacggtgtccaagtgccatgggaatcaaaaataaagacggcgaaacaccagggcaaatactcgggtggggtccaccctgggacagtgccgaggaggaggaagaagacgacgccagtaaggagcgcgagtggcgccagaagttgcagggcgaactggaggacgagtggcaggaggtaatgggacggtttgaaggggacgcttcacacgaaacacaggagcccgagtcctttagcgcttggtcagacaggcttgcgcgcgagcacgctcagaagtgccagcagcagcagcgggaagccgagggcagctgtcgtcctcctcgggctgaagggagtagccagtcttggaggcaacaggaggaggagcaaagattatttcgcgagagagcccgcgcaaaggaggaagagcttagggaaagcagggcccggagggctcaggaggctctgggcgatagagaacccaaacctacgcgagctggtcctagagaagagcatccccgcggcgcaggtaggggaagcctatggaggtttggagacgttccatggccctgcccaggtggaggcgaccctgaagctatggctgctgccttagtggcacgtggcccacctctggaggagcaaggcgccctcagaaggtatctacgggtgcagcaagtgagatggcaccccgaccggttcttgcagcgcttcagatctcagattgaaacttgggagctaggtagggtcatgggagcagttaccgccctttcccaggccctgaataggcatgctgaagccctaaaatag

SEQ ID NO: 56720 - DNA, 1077 bp, Artificial Sequence
  derived and/or modified sequence
atggcttctacgagtagaagacagcggcgggaacggagattcaggagatacctatccgccgggcgcttagtcagggctcaggcgctgttacagcgccacccgggtttagatgtcgacgcgggccagcctcctcccttgcaccgggcatgtgcacggcacgatgctccagcgctgtgcctgctattgcgcctgggtgcagaccccgcgcatcaggataggcatggagacactgccttgcatgcagcagccagacaaggccccgacgcttacacagactttttcctccccctgctctctagatgccccagcgctatgggcataaaaaacaaagacggcgagactcctgggcagatcctaggatggggtccaccctgggacagcgccgaggaggaggaggaagatgatgcttctaaggaacgcgagtggcgccagaagttgcagggagaactcgaggatgaatggcaggaggtgatgggacgctttgagggagacgccagccacgaaacacaggagcctgaatctttttccgcatggtcagacagacttgcaagagagcacgcacagaagtgtcagcagcagcagcgagaggctgagggatcctgcagacctccacgggccgaaggcagtagtcagagttggcgccagcaggaagaagagcagaggctcttccgggaaagagcaagagccaaggaggaagaattacgagagagcagggcgaggcgggcacaggaagcgttgggcgacagggaaccaaagcctacccgggcgggacccagggaggagcatcccaggggcgccggccgcggcagtctgtggcgtttcggagacgttccatggccatgtcccggggggggcgaccctgaggctatggctgccgccttggtagcccgcggacctccgctcgaggagcagggtgcccttagaaggtacctgcgagtacagcaagtgcggtggcacccagacaggtttcttcagcggttccgctcccagatcgaaacgtgggaactcgggagagttatgggtgcagtcaccgcgttatctcaggccctgaacagacatgccgaggccctgaagtag

SEQ ID NO: 56721 - DNA, 1077 bp, Artificial Sequence
  derived and/or modified sequence
atggcaagcacatctcgccgccagaggcgtgaaaggcgattccgccggtatctgagcgccgggcgcctcgtccgcgcccaggctctccttcagcgccacccggggctggacgtggacgcagggcagccgcctccattgcatcgtgcctgcgcgcgccatgacgcccccgcactgtgtctgttgctcagactgggggctgatccagctcatcaagatcgccatggagacacagctctgcacgcagctgcaagacagggacctgacgcttacacagacttttttctgccactgctgagtagatgtccgagcgccatgggcatcaagaacaaggacggggagactcctggacaaattcttggatggggaccgccgtgggattcagcggaggaagaggaagaggacgacgcatctaaggaacgggagtggcgtcaaaaactgcagggggagctggaagatgagtggcaggaagtgatgggacgctttgaaggggatgcttctcacgaaactcaggagcccgagtcatttagcgcgtggtccgatcgtctcgctcgcgagcacgcccaaaaatgtcagcagcaacaacgtgaggccgagggctcctgtagacccccgagggctgaaggttcctctcaatcttggcgtcagcaagaagaggaacaaaggctttttagagagagggcccgggcaaaagaagaagagctccgcgaaagtagggcacgaagagcccaggaggccctcggcgaccgcgaacccaagcccacccgggctggccccagggaggagcatcctcgcggcgcaggaaggggctcactgtggcggtttggcgatgtcccctggccttgtcccggcggtggcgatccagaggcaatggctgctgcactggtggcccggggacccccgctcgaagagcaaggcgctctacgccggtacctgcgagtccagcaggttaggtggcatcctgacaggtttcttcagcggtttaggagccagatcgaaacttgggagttgggaagagtcatgggagctgtgacagcgctttcacaggccctgaatcggcacgccgaagctcttaagtag

SEQ ID NO: 56722 - DNA, 1077 bp, Artificial Sequence
  derived and/or modified sequence
atggcaagcacctcgagacgtcagaggcgagagagacgtttccggcggtatctaagtgccggcagacttgtgcgcgcccaggccctgctccagcgccatcctggtttagacgttgacgccggccaacctccgcctttgcacagggcatgcgctcgccacgacgctcctgccctgtgcttgctgttgaggctgggggcggatcccgcccatcaggatcgacatggcgataccgccctccatgctgctgcacgccagggtccagatgcctacaccgatttcttccttccactactaagccggtgccctagtgccatggggattaagaacaaggatggggagacccctggccagatcctgggatggggaccgccctgggattccgcagaagaggaagaggaggacgatgccagcaaggagagagagtggagacagaagctccagggcgaactggaagatgaatggcaggaggtcatgggccgctttgagggagacgcctctcatgagacccaggagcccgaaagctttagtgcatggagcgataggctcgctcgcgaacacgcccagaaatgccagcagcaacaacgggaggctgaaggctcgtgccgcccgcctagagccgagggctcctcacaatcctggagacagcaagaagaggagcagcgcttgttccgtgaacgcgcccgggctaaggaggaagaacttcgtgaaagccgcgctaggcgagcccaggaggccctcggggacagagagccaaagcccacccgtgcagggcctagggaggagcatccaagaggtgctggaagagggtcactttggcggttcggcgatgtgccatggccgtgtcctgggggaggggatcctgaagcaatggctgccgcgctggtggccagggggcctccactggaggagcaaggagcattgaggagatacttgcgggtgcagcaagtccgctggcatcccgatcgttttctacagagattccggtcccaaatcgagacatgggagctcgggcgggtgatgggcgctgttactgctttgagccaagccctcaatcggcatgccgaggctttgaaatag

SEQ ID NO: 56723 - DNA, 1077 bp, Artificial Sequence
  derived and/or modified sequence
atggcttcaacctcacgccggcaacggcgggagcgtcgtttccgtcgatacctatcagcgggtcggcttgtccgggcccaggctcttttgcagcggcacccgggcctggacgtcgacgctggccagccccctccccttcatagagcatgtgcacgccatgatgcccccgccctgtgcctgctgttaagactgggagcagacccagcacaccaggaccggcacggggataccgcccttcacgctgccgcccggcaagggccagacgcctacactgacttttttttacccctcctgtctcggtgcccctcggctatgggaattaagaacaaggatggcgagaccccgggccagattctgggctggggtcccccatgggactccgccgaagaagaggaagaagacgacgcatccaaggagagagagtggcggcagaagcttcaaggagaactcgaagacgaatggcaagaggtgatgggcagattcgaaggcgacgcatcccacgaaacccaggagcctgagtcgtttagtgcgtggagcgacagactggcccgagaacacgcccagaaatgtcaacagcagcagcgggaggcagagggttcctgtagaccaccacgagctgaggggagcagccaatcctggcggcaacaagaagaagagcagagactcttcagagaacgagcccgggcgaaagaggaggagttgagggaaagtcgcgctcgaagggcccaggaagctctgggagatagggaacctaagccaacccgagctggacctagggaagagcatcccagaggggcaggtaggggatccctgtggagatttggcgatgtcccttggccttgcccaggaggaggcgatcccgaagccatggcagcagctctcgtagcccgaggacctccattggaggaacagggagcactgcggagatatttgagagtccagcaagtgcgatggcatcccgataggttcctgcagcgctttaggtcccagattgagacttgggaactggggagagttatgggtgctgtgacggccctcagccaggcactgaatcggcacgcagaggccctcaagtag

SEQ ID NO: 56724 - DNA, 1077 bp, Artificial Sequence
  derived and/or modified sequence
atggctagcacttcccgtagacaacggcgcgaacgccggttcagaagataccttagcgccggaaggcttgtgcgtgcccaggcacttctgcagcggcatccaggcttagatgtggatgcggggcagccaccacctctccatcgcgcatgtgccagacacgacgccccagccctttgcctcctgctgcgcttaggcgccgacccagcacaccaggaccgccacggcgacacagcactgcacgcagctgctagacagggcccagatgcttatactgatttcttcctgcctctgctttccaggtgcccgtccgcaatgggtatcaaaaacaaagatggcgagacacctggacagattctgggctggggacctccctgggacagcgccgaggaggaagaagaagatgacgcctccaaggaaagggaatggaggcaaaaactgcagggagaattggaagacgagtggcaggaggtgatgggaaggttcgagggcgacgcgtctcatgaaacccaggagccagaatcgtttagcgcatggtccgaccggctggcccgtgaacacgctcagaagtgccagcagcaacagcgtgaggctgagggatcatgcaggccacctcgcgcagaaggatcatcacagtcttggcgccaacaggaagaagagcagagattatttagagagagggccagagctaaagaagaggagcttagggaatccagagcccggagggcccaagaagcacttggcgacagagagcccaagcctaccagggccgggccacgcgaggaacaccctcggggcgccggacgaggcagcctgtggcgctttggtgacgtgccttggccgtgtcctgggggcggggacccagaagcgatggccgccgcccttgtggctaggggaccaccactggaagaacaaggtgcccttagacgttatttgagagtgcagcaggtgcggtggcatcctgataggttcctgcagagatttagatcccaaatagaaacctgggaacttggaagagtcatgggagcagttactgctcttagccaggccctgaatcggcacgctgaggctctgaaatag

SEQ ID NO: 56725 - DNA, 699 bp, Artificial Sequence
  derived and/or modified sequence
atggcgtctacttctcggcgccagaggcgggagcgccgttttagacgatacctttcagccggaagactggtacgagctcaagctcttcttcagcggcaccccggactggatgtcgacgctgggcaaccacctccgttgcatcgcgcatgcgcccggcatgacgctccagctctgtgcttgctcctcaggctgggtgccgaccctgcccatcaggatcgccatggggataccgccctgcacgcggctgcaaggcagggtcctgacgcctacactgattttttcttacctctgctctccagatgtcccagcgctatgggtataaagaacaaggacggcgagactcccggacagatattgggctggggtcctccttgggattccgccgaggaggaagaggaggacgatgccagtaaagaacgagaatggagacagaaattgcagggtgagctagaggatgagtggcaggaagtgatggggaggtttgagggcgacgcaagccatgagactcaggaacccgagtccttttccgcctggtcggatcggctggcccgggagcatgcccagaaatgtcagcagcaacagcgggaggctgaaggcagcagacggcctccacgcgccgaaggaagttcgcagtcctggcgacagcaggaagaagagcagaggctcttccgggagagagccagagctaaggaggaatag

SEQ ID NO: 56726 - DNA, 699 bp, Artificial Sequence
  derived and/or modified sequence
atggcttctacatcacgcagacaaagaagggagcgcaggttcaggcgctacctgtcagcaggccgacttgtccgcgcccaggctctgctgcagagacaccccggcctggatgtggacgccggacagccgccacccttacaccgcgcttgtgctcggcacgacgcaccagcgctgtgtctgctgctgcgattgggcgctgatcccgcacatcaagacaggcatggcgataccgccctgcatgctgccgcacgccaggggcctgacgcctataccgatttcttcctgccgctgttgtctagatgtcccagcgctatgggtataaagaacaaggatggggagacaccggggcaaatcttaggttggggacccccctgggattcagcggaggaagaagaagaagacgatgcctcaaaggaacgggagtggagacaaaaactccagggtgagctggaggatgagtggcaggaagtgatgggccggtttgaaggtgacgcatctcacgaaactcaggagcccgagtccttttccgcctggagtgatagactggcacgagaacacgctcagaagtgtcagcagcaacagagggaggcagagggatcatgtagaccacctcgggcagagggctcttcccagtcctggagacagcaagaggaggaacaacgacttttcagagagcgagcccgcgccaaagaggaatag

SEQ ID NO: 56727 - DNA, 699 bp, Artificial Sequence
  derived and/or modified sequence
atggcgagcacctccaggcgccagagaagggaacgtagattccgccgctacctttccgcagggcgcctcgtcagagcacaagccctgctgcaacggcacccagggctggacgtcgacgctggccagccaccacctcttcatagagcatgcgctaggcacgacgcccctgccctgtgtctgctgctgagactgggcgctgatcctgcccatcaggatcggcatggcgataccgcgctgcacgctgctgctcggcagggacccgatgcatatactgacttcttccttcctctgctgagccggtgcccgagcgcaatggggatcaagaataaagacggggagactccaggccaaatcctcggatgggggccgccatgggattctgcagaagaggaagaggaggatgatgccagtaaggaacgcgagtggaggcaaaagctgcagggggagcttgaagacgaatggcaggaagtgatgggcagatttgaaggcgatgcaagccatgagactcaggaacctgagtcattctcggcctggtccgacaggctcgcaagagaacacgcccagaagtgccagcagcaacagagggaggccgaaggttcttgccggccacctagggctgagggcagttcccagtcctggcggcagcaggaggaggagcagagacttttcagggagcgagccagagcaaaggaggagtag

SEQ ID NO: 56728 - DNA, 699 bp, Artificial Sequence
  derived and/or modified sequence
atggcatctacgtcgcgacgacagaggagagagcgtcggtttcgtcgttacctctcagccggacgcctcgtccgcgctcaggctctcctgcaacgtcatccgggcctggatgtggacgcggggcagcctcctcctcttcacagagcatgcgcccggcatgatgcccctgctttgtgtctgcttttgaggttgggtgcggatcccgcccatcaggaccgccatggggacacagctcttcacgcggccgccagacagggcccagatgcctatactgatttctttctacccttgctgtctagatgcccatcggcaatgggcattaaaaataaggatggcgagacgcccggccaaatcctagggtggggaccaccttgggacagcgctgaagaggaagaagaggacgatgccagtaaggaacgagaatggcgacagaagctgcaaggcgaactcgaagatgagtggcaggaagtgatgggtcgattcgagggcgatgcctcacacgaaactcaggaacccgaatcattttccgcttggtctgaccgcttagccagggagcatgcccagaaatgccaacagcagcagagggaagccgaaggttcttgtcgaccaccgcgggctgagggatcttcccaatcctggcgccagcaggaggaagaacaaaggctcttcagggaaagagctcgggccaaggaggagtag

SEQ ID NO: 56729 - DNA, 699 bp, Artificial Sequence
  derived and/or modified sequence
atggctagcacatcgagaaggcagaggcgggaacggcggtttagaaggtacctgagcgccgggaggctagttagggcccaagccctgttacagcggcaccccggcttggacgtggacgcaggtcagccgcctcccttgcatcgagcttgcgcacggcatgacgcgcccgccctgtgcctactgctgcggctaggggcagatccagcacaccaagaccgacacggcgataccgcactgcatgctgccgccaggcagggccccgatgcatacaccgacttcttcctgcccctgctaagccggtgcccttcagccatgggcatcaagaacaaggacggagagacacccggccagatcctgggctggggaccgccatgggatagcgccgaggaggaggaagaagatgacgctagcaaggagcgcgaatggcgccagaagcttcaaggggagttagaggacgaatggcaggaggtgatgggcaggttcgagggagacgcttctcacgagacccaagaacctgagtctttttccgcttggtccgatcggttggctcgggaacatgcacagaaatgccagcagcagcagcgtgaggccgaaggaagctgcagaccaccccgtgcggaaggctcttctcagagctggagacagcaggaggaggagcaaagactgtttcgggagcgcgctcgtgccaaggaggagtag

SEQ ID NO: 56730 - DNA, 699 bp, Artificial Sequence
  derived and/or modified sequence
atggcgtcaacctctagacgccaacggagagagcgccggtttcgtcgttatctgagcgcaggccgacttgtgcgagcacaggcgctgctgcaacggcaccctgggctggatgtggatgcaggccagcccccgcctttgcaccgcgcctgtgcacgtcacgacgcgcccgctctgtgcctgttgcttagactcggggcagatccagctcaccaagatcggcacggcgacacagcgcttcatgccgcagcgcgacaagggcccgatgcatatacagacttctttctccccctcctcagcaggtgccccagtgctatgggcattaaaaacaaagacggtgagacgcctggacagatcctcgggtggggacccccttgggacagtgcagaagaggaggaagaggatgacgcaagcaaagaaagagagtggcggcagaagttgcaaggtgagctggaagatgagtggcaggaagtgatgggcagattcgagggagacgcctcgcacgagacccaggaaccggagtcattctccgcctggtctgacaggctggccagagaacatgcccaaaaatgccagcagcagcaacgtgaagcggaagggtcttgcagaccccctcgggctgagggatcctcacagtcatggaggcagcaagaagaggagcagcggttattcagagagagagctagggccaaggaagagtag

SEQ ID NO: 56731 - DNA, 699 bp, Artificial Sequence
  derived and/or modified sequence
atggcatcaactagcaggcgacaaaggcgagagcggcggttccgcagatacctcagcgcgggcagactcgtgcgggcccaagccttactgcagcgacatcccggcctcgacgtggacgcgggccaaccccccccacttcatcgggcttgcgctcgtcacgatgcccctgccttatgtttgctactcagattgggcgccgaccccgcccaccaggatcgccacggggacaccgcactgcatgccgccgcaaggcagggcccagacgcctacactgatttttttctgcccctactatcgcgatgcccgtctgccatggggatcaagaataaggacggggagaccccgggacagatccttggctgggggccaccatgggatagcgccgaggaggaggaggaggacgatgcatctaaggaacgagagtggcggcagaagcttcaaggagaactcgaggacgagtggcaggaggtgatgggccggttcgagggcgatgcctcccacgaaacccaggaacccgagtcattttctgcttggtctgacaggctggctagagaacacgcccaaaagtgtcagcagcagcagcgcgaggcggagggcagctgcaggccaccgagagcagaggggtctagccagagctggcgccaacaggaagaagagcaaagactattccgggaaagggcaagggccaaggaggagtag

SEQ ID NO: 56732 - DNA, 1077 bp, Artificial Sequence
  derived and/or modified sequence
atggccagcaccagccggcggcagaggcgggagcggcgcttccgccgctacctgtctgctggccgcctggtgcgggcccaggccctgctgcagaggcaccctggcctggatgtggatgctggccagcccccacccctgcaccgggcctgtgcccggcatgatgccccagccctgtgcctgctgctgcggctgggcgctgaccctgcccaccaggacagacatggagacacagccctgcatgctgctgcccggcagggcccagatgcctacacagacttcttcctgcccctgctgagccgctgccccagcgccatgggcatcaagaacaaggatggagagaccccaggccagatcctgggctggggccccccctgggacagcgctgaggaggaggaggaggatgatgccagcaaggagcgggagtggaggcagaagctgcagggcgagctggaggatgagtggcaggaggtgatgggccgctttgaaggagatgccagccatgagacccaggagcctgagagcttcagcgcctggagcgaccggctggcccgggagcacgcccagaagtgccagcagcagcagcgggaggccgagggcagcagaagaccacccagggctgagggcagcagccagagctggaggcagcaggaggaggagcagaggctcttccgggagcgggcccgggccaaggaggaggagctgcgggagagccgggcccggcgggcccaggaggccctgggggaccgggagcccaagcccacccgggccggcccccgggaggagcaccccaggggggccggccggggcagcctgtggaggtttggagatgtgccctggccctgccctgggggcggggaccctgaggccatggccgccgccctggtggcccggggcccccccctggaggagcagggcgccctgcggcgctacctgcgggtgcagcaggtgcgctggcacccagaccgcttcctgcagcgcttccgcagccagatcgagacctgggagctgggccgggtgatgggcgctgtgacagccctgagccaggccctgaacagacatgctgaggccctgaagtag

SEQ ID NO: 56733 - DNA, 1077 bp, Artificial Sequence
  derived and/or modified sequence
atggccagcaccagccggcggcagaggcgggagcggcgcttccgccgctacctgtctgctggccgcctggtgcgggcccaggccctgctgcagaggcaccctggcctggatgtggatgctggccagcccccacccctgcaccgggcctgtgcccggcatgatgccccagccctgtgcctgctgctgcggctgggcgctgaccctgcccaccaggacagacatggagacacagccctgcatgctgctgcccggcagggcccagatgcctacacagacttcttcctgcccctgctgagccgctgccccagcgccatgggcatcaagaacaaggatggagagaccccaggccagatcctgggctggggccccccctgggacagcgctgaggaggaggaggaggatgatgccagcaaggagcgggagtggaggcagaagctgcagggcgagctggaggatgagtggcaggaggtgatgggccgctttgaaggagatgccagccatgagacccaggagcctgagagcttcagcgcctggagcgaccggctggcccgggagcacgcccagaagtgccagcagcagcagcgggaggccgagggcagctgcaggcctcccagggctgagggcagcagccagagctggaggcagcaggaggaggagcagaggctcttccgggagcgggcccgggccaaggaggaggagctgcgggagagccgggcccggcgggcccaggaggccctgggggaccgggagcccaagcccacccgggccggcccccgggaggagcaccccaggggggccggccggggcagcctgtggaggtttggagatgtgccctggccctgccctgggggcggggaccctgaggccatggccgccgccctggtggcccggggcccccccctggaggagcagggcgccctgcggcgctacctgcgggtgcagcaggtgcgctggcacccagaccgcttcctgcagcgcttccgcagccagatcgagacctgggagctgggccgggtgatgggcgctgtgacagccctgagccaggccctgaacagacatgctgaggccctgaagtag

SEQ ID NO: 56734 - DNA, 699 bp, Artificial Sequence
  derived and/or modified sequence
atggccagcaccagccggcggcagaggcgggagcggcgcttccgccgctacctgtctgctggccgcctggtgcgggcccaggccctgctgcagaggcaccctggcctggatgtggatgctggccagcccccacccctgcaccgggcctgtgcccggcatgatgccccagccctgtgcctgctgctgcggctgggcgctgaccctgcccaccaggacagacatggagacacagccctgcatgctgctgcccggcagggcccagatgcctacacagacttcttcctgcccctgctgagccgctgccccagcgccatgggcatcaagaacaaggatggagagaccccaggccagatcctgggctggggccccccctgggacagcgctgaggaggaggaggaggatgatgccagcaaggagcgggagtggaggcagaagctgcagggcgagctggaggatgagtggcaggaggtgatgggccgctttgaaggagatgccagccatgagacccaggagcctgagagcttcagcgcctggagcgaccggctggcccgggagcacgcccagaagtgccagcagcagcagcgggaggccgagggcagcagaagaccacccagggctgagggcagcagccagagctggaggcagcaggaggaggagcagaggctcttccgggagcgggcccgggccaaggaggagtag

SEQ ID NO: 56735 - DNA, 699 bp, Artificial Sequence
  derived and/or modified sequence
atggccagcaccagccggcggcagaggcgggagcggcgcttccgccgctacctgtctgctggccgcctggtgcgggcccaggccctgctgcagaggcaccctggcctggatgtggatgctggccagcccccacccctgcaccgggcctgtgcccggcatgatgccccagccctgtgcctgctgctgcggctgggcgctgaccctgcccaccaggacagacatggagacacagccctgcatgctgctgcccggcagggcccagatgcctacacagacttcttcctgcccctgctgagccgctgccccagcgccatgggcatcaagaacaaggatggagagaccccaggccagatcctgggctggggccccccctgggacagcgctgaggaggaggaggaggatgatgccagcaaggagcgggagtggaggcagaagctgcagggcgagctggaggatgagtggcaggaggtgatgggccgctttgaaggagatgccagccatgagacccaggagcctgagagcttcagcgcctggagcgaccggctggcccgggagcacgcccagaagtgccagcagcagcagcgggaggccgagggcagctgcaggcctcccagggctgagggcagcagccagagctggaggcagcaggaggaggagcagaggctcttccgggagcgggcccgggccaaggaggagtag

SEQ ID NO: 56736 - DNA, 1077 bp, Artificial Sequence
  derived and/or modified sequence
atggccagcaccagccggcggcagcggcgggagcggcggttccggagatacctgagtgccggaagactagtgcgagctcaggcgcttctgcagagacacccggggctggacgtggatgctggccagccgccgccactgcatagggcctgcgctagacatgacgcccccgccctgtgtttgctgcttcgtctgggcgccgatcccgcccaccaggaccggcacggagatacggctctccacgctgccgcgaggcaagggcccgatgcctacacagatttttttctgccgctactgtctcgctgtccttctgccatgggcatcaaaaataaagacggagagacaccaggccagatattggggtggggtcccccctgggactctgctgaggaggaagaggaggatgacgcttcaaaagagcgcgaatggcgtcagaaattgcaaggggagctagaagacgagtggcaagaagtaatgggaaggttcgaaggggacgcctcccatgagactcaggagcccgaatcttttagcgcttggtcagataggctcgccagagaacacgctcagaagtgtcaacagcagcagagagaagccgaagggtccaggcggccaccacgggccgaaggatcaagtcaatcttggaggcaacaagaggaggagcagcgcttgtttcgggaacgggctcgggccaaggaagaggagcttagagaatcacgcgcccgcagggcccaggaggccctaggcgatcgggagccgaagcccacccgggccggtccacgcgaagaacatccacggggagctggtcgcgggtcattgtggaggttcggagacgttccatggccttgtcctggcggtggtgatcccgaggcgatggctgcagccctggttgcaagaggaccgcccctcgaggaacagggagccctcaggcggtacctccgcgttcaacaggtccggtggcatccggatcgattcttacagcgttttagatcccagattgagacttgggagttaggcagagtcatgggggcagtaacagccttgagtcaagccctaaataggcacgccgaggcactaaagtag

SEQ ID NO: 56737 - DNA, 1077 bp, Artificial Sequence
  derived and/or modified sequence
atggccagcaccagccggcggcagcggcgggagcggcggttccggaggtacttgtccgccggtcgtctggtgcgggctcaggctctcctgcagcggcatcctggcctcgatgtcgatgcgggccagcccccccccctgcacagagcgtgcgctcgtcacgacgcgcctgcactgtgtcttctgctgcgactgggcgctgaccccgcccaccaggatcgccacggggatactgcacttcacgctgcggcccgccagggacctgacgcctataccgacttcttcctcccgttgctgtcacggtgtccatccgctatggggattaagaacaaagatggagaaacgcccggtcagattcttggttggggccccccatgggattctgcggaggaggaagaagaggatgacgcatccaaggagcgtgagtggcgccaaaaactccagggcgagcttgaggacgaatggcaggaggtaatgggacgctttgagggtgacgccagtcatgagacacaggaaccagagtcattctcagcgtggtctgaccgcctggcacgggaacatgctcagaagtgtcagcagcagcagcgggaggctgaagggtcttgccggcccccccgtgcagaaggcagttctcagagttggcgccaacaggaggaagaacagcgcctgtttcgggagagagcacgggctaaggaagaggaactcagggagtcccgcgctcgacgcgcgcaagaggctctgggtgaccgggagcctaagccaactcgggcgggtccgagggaggagcatccaaggggtgctggacggggcagtctgtggcgctttggggacgtcccatggccatgtccaggcggcggcgaccccgaagctatggccgcagccttggttgcccgcggaccacccctggaagaacaaggcgctcttagaaggtacctgcgggtccagcaggtacgctggcatccagaccggttcctccagagattccgctcccagatcgaaacatgggagctggggcgcgtcatgggcgccgtcacagctctgtctcaagccctgaatcgacacgccgaagcccttaaatag

SEQ ID NO: 56738 - DNA, 1077 bp, Artificial Sequence
  derived and/or modified sequence
atggccagcaccagccggcggcagcggcgggagcggcggttccggagatatcttagcgcaggacgcctggtacgtgcccaggcattactccaaaggcatcccggcctggatgtggacgccggccagccaccccccctccaccgggcctgtgcccgccacgacgcccctgccttgtgcctgctactaaggctcggggcagatccagcccaccaggatcggcatggggatacggccctgcatgctgcagcccgacagggccccgacgcttataccgacttttttctgccactcctttcacggtgtccctctgccatgggcattaagaataaggacggagaaactcccgggcagattctgggctggggaccaccatgggactcagccgaggaggaagaggaggacgatgcttctaaggaacgtgagtggaggcagaaactgcaaggcgaattggaggacgaatggcaagaggtcatgggcagattcgagggggatgcctcacacgagacacaggagcctgaaagcttcagcgcctggtcagaccgactggcccgagaacatgcacagaaatgccaacagcaacaacgcgaagccgaagggagctgccgtccaccgcgggctgagggcagttcgcagtcatggcggcagcaggaggaagagcaaagactgttcagggaaagggcccgtgcgaaggaagaggagctgagggaatccagggctaggcgggcccaggaggcactgggggatcgcgagcctaagccgaccagggccggtccacgagaggaacacccaagaggagctgggagaggatccctctggcggttcggagatgtgccatggccatgtccaggagggggggatccggaagcaatggccgccgcactggtagcgcgagggcccccactagaggagcagggagccctcaggagatatctgagagttcaacaggtgagatggcaccctgacaggttcctgcagagattccgcagtcagattgagacctgggagttagggcgggtgatgggagccgtaacagctttgtctcaggcacttaatcgccacgccgaagcactgaagtag

SEQ ID NO: 56739 - DNA, 1077 bp, Artificial Sequence
  derived and/or modified sequence
atggccagcaccagccggcggcagcggcgggagcggcggttccggcgatacctctccgctgggcggctggtgcgcgctcaggcactgctgcaacggcacccaggactggacgtggacgccggacagcccccacctcttcatagagcatgcgcaagacatgatgcccctgctttgtgcctgctgctgcgcctcggagccgaccccgcccaccaggatcggcatggggacaccgctctccacgcggccgcacgtcagggtcccgatgcatacactgatttttttttacctctacttagtaggtgcccgtccgccatgggaattaaaaacaaggacggagagactcctggtcagattcttgggtgggggcccccctgggatagtgctgaagaggaggaggaggatgacgcttccaaggagagagagtggcgtcagaagctgcaaggtgagttggaggatgaatggcaggaggtgatgggtagattcgaaggcgatgcgtctcatgagactcaagagccagagtctttttccgcctggtccgatagattggcccgggaacacgcacagaagtgccagcaacaacagcgcgaagctgaggggtcctgccgccctcccagggccgagggctcctcgcagtcctggcgccagcaggaggaggaacagcggctgtttagggagagagcacgggctaaggaggaagagctccgagagagcagagcaagaagagcccaggaggccctcggcgatcgtgagcccaaaccaacccgggccggccctagagaggagcatcctagaggcgccggccggggctctttatggaggtttggtgatgtaccctggccatgcccaggtggcggagacccagaggctatggccgccgcccttgtcgcaagggggccacccctcgaagaacagggcgcactgaggcggtatttacgagtgcaacaggttcgctggcatcccgaccggttcctgcaacgctttcgctcacagatcgagacctgggagctggggagggtgatgggcgcggtgaccgctcttagtcaggcactgaatcggcacgccgaggcacttaaatag

SEQ ID NO: 56740 - DNA, 1077 bp, Artificial Sequence
  derived and/or modified sequence
atggccagcaccagccggcggcagcggcgggagcggcggttccggcgatacctttctgctggtcgcctcgtgagggctcaggcgctgctccagcgtcatccaggtctggacgtcgatgccgggcagcctccccctctgcacagggcctgtgcccgccatgacgcaccagccctgtgcctgctgctgagactcggcgccgatccagctcatcaagacagacacggcgatacagctctgcatgcagcagcccgacaaggcccagacgcctacacagacttctttctccctttgcttagtaggtgcccctctgcgatgggcatcaaaaataaggatggcgaaacaccaggtcagatattaggttgggggcctccgtgggattcagcagaggaggaagaagaggatgacgcatccaaggagagagaatggcgccagaagctgcagggagaactcgaggatgaatggcaggaagtgatgggcagattcgagggggacgcctcacacgagacccaagaacctgaatctttcagcgcatggagtgacaggctggcccgcgaacacgcacagaagtgccagcagcagcagcgcgaggcagaaggaagttgccggcctcccagggcggagggttccagccagtcttggcgccagcaggaagaggagcagagattgttccgggaacgggcccgggcaaaagaagaggaactccgggaaagcagggcccgtagagctcaagaagcccttggtgatcgcgaacctaaaccaacccgcgctggcccccgggaggaacacccacgaggtgctgggagaggatcattatggcggtttggcgacgtcccatggccctgccccggagggggcgatcccgaagcaatggctgcggcgttggtcgcacgaggccctccattggaagagcagggcgccctccggcgctacttacgggttcagcaggtgcgatggcacccagataggttcttgcaaagatttcgatctcagatcgaaacatgggaactgggtcgagtgatgggggcagtgaccgctctatcgcaagccctgaacaggcacgctgaagccctgaagtag

SEQ ID NO: 56741 - DNA, 1077 bp, Artificial Sequence
  derived and/or modified sequence
atggccagcaccagccggcggcagcggcgggagcggcggttccggagatatctctccgcaggtcgcctagttcgcgcccaggcactccttcagaggcatcctggtctggacgtggatgccggtcagcctccacccctgcatcgggcatgcgccaggcacgacgcaccagcactgtgcttattattgagactcggtgcagatccagcacaccaggataggcacggtgataccgccttgcacgcagccgcccgacagggacccgatgcttacaccgatttcttcttacctttgctgtcccgctgcccaagtgcgatgggtattaagaataaagacggggaaactcccggtcaaatcctaggttggggccctccatgggatagcgccgaagaagaggaggaggatgacgccagtaaagaaagggagtggaggcagaaacttcaaggtgagttggaggatgagtggcaggaagtgatgggtagatttgagggggatgctagccacgagacacaggaacctgagtctttctctgcctggagcgatcgtctagctagggagcatgcccagaagtgtcagcagcagcaacgcgaagctgagggctcctgccgcccgccccgagcagaagggagctcccagagttggcggcagcaggaagaggagcagcggctcttccgcgaacgtgctcgtgccaaggaggaggagcttcgcgagtctagggccagaagagcacaagaggcacttggagatagggagcccaagccaactagggctgggccccgtgaggagcatccacgcggcgccggacgcggctcactgtggaggtttggcgacgttccttggccctgcccgggcgggggagatcctgaggccatggccgcagctctcgtggcccgcgggcccccactggaagaacagggcgccctgcgacgatacctgagagtccagcaggtgagatggcaccccgatcggtttttacaacgctttagatctcaaattgagacctgggagctgggccgggtcatgggagcagttactgctctatcccaggcacttaaccggcacgccgaagccctcaagtag

SEQ ID NO: 56742 - DNA, 1077 bp, Artificial Sequence
  derived and/or modified sequence
atggccagcaccagccggcggcagcggcgggagcggcggttccggcgatatctgtcagcaggcaggctggtgagagcccaggctttgttgcagcggcatcccggacttgatgtagatgccgggcagccaccccccttgcacagagcctgcgcccgccatgacgcacccgcgctgtgcttgcttctgcgtctgggagctgacccggcacatcaggataggcacggagataccgcactccatgcagctgcacggcagggccccgatgcatacaccgacttctttctccctcttctgagtagatgtccgtccgccatgggcattaaaaataaggatggcgagacaccgggccaaattctcggctgggggccaccttgggactctgcagaggaagaggaagaagatgacgcaagtaaagagagagaatggaggcagaagcttcagggtgagctggaggacgagtggcaagaggtcatgggccgattcgaaggcgacgcatcacacgagacccaggaacctgagagttttagtgcttggtctgatcgactcgcaagggagcatgctcagaagtgccagcaacagcaacgtgaggccgaaggaagctgtagaccaccacgggccgaagggtctagccagagctggaggcagcaggaggaagagcagcgcttgttcagggaaagggcccgtgccaaagaggaggagcttcgggagagccgcgcccgacgcgcacaggaggcgctgggcgatcgagagcccaagcccacgcgtgcaggaccccgggaggagcatccccggggggctggccgtggatccctgtggaggttcggcgatgttccatggccttgtcccgggggaggggacccagaagcaatggccgccgccctcgtcgcaaggggcccaccccttgaggagcagggcgcccttcgcaggtatctgcgtgtgcagcaagtgagatggcaccccgacagatttctacagcgcttcaggagccaaatagagacatgggagctcggtcgtgtcatgggggccgtcacagccctgagtcaggctctgaataggcatgctgaggctctgaaatag

SEQ ID NO: 56743 - DNA, 699 bp, Artificial Sequence
  derived and/or modified sequence
atggccagcaccagccggcggcagcggcgggagcggcggttccggagatacctgtccgctggcagacttgttagggcacaggcattgctgcagaggcaccctggactggatgtcgatgcgggccagccacctcccttacacagagcgtgcgccagacacgacgcccctgctctgtgtctgttgttgcggctcggtgccgatccagctcaccaagatcgtcatggtgacaccgctctgcatgctgccgcaaggcaggggcccgatgcctacactgacttcttcctccccttactctcccgctgcccttcggccatggggattaagaacaaagatggtgaaacacccggtcagatcctcgggtggggacccccttgggatagcgccgaggaggaggaggaagacgacgcgtccaaggagagggagtggcgccagaagctccaaggcgaacttgaagacgagtggcaggaagttatggggcgtttcgagggtgatgcatctcatgaaacccaggagccggagagcttctctgcgtggagtgaccgactcgctcgtgaacacgctcaaaagtgtcagcagcagcagcgcgaagctgaaggctctaggagaccaccccgggccgagggcagcagccagtcttggcggcagcaggaggaggagcagagactgtttagggaacgcgccagagcaaaggaggaatag

SEQ ID NO: 56744 - DNA, 699 bp, Artificial Sequence
  derived and/or modified sequence
atggccagcaccagccggcggcagcggcgggagcggcggttccggcgctacctgagcgccgggagattggtgagggctcaagccctgttgcaacggcaccccggtttggacgtagacgccggccagccgcccccacttcatagagcttgcgcacgccacgatgcaccagccctgtgcctcctccttcgcttaggcgccgaccctgcccaccaggaccgacacggcgatacagcactacatgcggctgctagacagggacctgacgcttatactgacttctttttgcctctgctgtcccggtgcccgtccgctatgggtatcaagaataaggacggagagaccccagggcagatcctcggctggggccctccatgggactcagctgaggaggaggaagaagacgacgcaagtaaggaaagggagtggcggcagaaacttcagggagaactcgaagacgagtggcaggaagtaatgggtagattcgagggggatgccagtcatgagacacaggagccagagtccttctccgcatggtccgacaggttggcaagggagcatgctcagaagtgtcagcagcagcagagagaggcagaaggctcttgtagacccccccgggccgaaggttcttcacagagttggcgccagcaggaagaggagcaaagactctttagggaaagggcccgggcgaaagaagagtag

SEQ ID NO: 56745 - DNA, 699 bp, Artificial Sequence
  derived and/or modified sequence
atggccagcaccagccggcggcagcggcgggagcggcggttccggcggtatctctccgccggtagacttgtgcgcgctcaggcgttgctgcagagacatccggggctagatgtcgacgccggtcagccacctccactacatcgtgcatgtgcgagacacgacgctccagctctgtgtctgctgctcagactgggggccgatcctgcccatcaggacagacacggcgacactgctcttcacgccgccgctcggcaaggaccagatgcatacacggactttttcctgcctctcctgtctcgctgcccatcagccatgggcatcaagaacaaggacggggaaacacctggtcagatcctgggttgggggcctccatgggactcggccgaggaggaggaagaggacgacgcatctaaggagcgcgaatggaggcagaagctgcagggggagcttgaagacgaatggcaggaagtaatggggcgctttgagggagacgccagccatgagacccaggaaccagagtctttctctgcgtggagtgatcggcttgcaagagagcacgcccagaagtgtcaacaacagcaacgcgaggcagaaggttcatgtagaccccctcgggccgagggctccagtcaatcgtggcggcagcaggaggaggagcagcgtttatttagagaacgtgctcgggcgaaggaggagtag

SEQ ID NO: 56746 - DNA, 699 bp, Artificial Sequence
  derived and/or modified sequence
atggccagcaccagccggcggcagcggcgggagcggcggttccggcggtatctctctgcgggtagactggttcgggcccaggctctcctccagagacaccctggcttggacgtggacgctggacagcctcccccactgcatcgtgcgtgtgcacgacacgatgcccccgctttatgtctgctcttgagactaggtgcagacccagcccaccaagataggcacggggacaccgctctgcacgcagccgcccggcagggcccagatgcctatacagattttttcctacccctgctttcacgctgcccatccgctatgggcatcaaaaataaagacggggaaacccccggccagattctgggctgggggcctccttgggacagcgcagaagaggaggaggaagacgacgccagcaaagagcgagagtggcggcagaaattgcaaggcgagctggaagatgagtggcaggaagtgatggggaggtttgagggagacgcctcgcatgagactcaagagcccgaatctttctctgcctggagtgacagactggcccgggagcacgcacagaaatgtcaacagcagcagagggaggccgagggatcgtgtcgtccacccagagccgaaggctcatcccaatcttggcggcagcaggaggaggagcagcgactgtttcgcgagagagctcgggccaaagaggaatag

SEQ ID NO: 56747 - DNA, 699 bp, Artificial Sequence
  derived and/or modified sequence
atggccagcaccagccggcggcagcggcgggagcggcggttccggagatatctgtctgctggacgcctggtgagggcccaggctttgctgcagcggcaccccggattagacgttgatgccggccaacctcccccgctgcaccgggcttgcgcgagacacgacgcaccagcactgtgcttactcctgcgacttggagctgacccggcgcaccaggaccggcacggggacacagcgctgcatgccgcagcaagacagggccccgacgcctatactgatttttttcttcctctgctgagtcggtgccccagcgccatggggataaagaataaggatggcgaaacacccggtcagattcttggatggggcccaccctgggattccgctgaagaggaagaggaggatgatgctagcaaagagagagagtggagacagaaattgcagggtgaactcgaggatgaatggcaggaagtaatgggtcgctttgaaggcgatgcgagtcatgagacacaggaacccgagtccttctcggcctggtcagataggcttgcaagggaacatgcgcaaaaatgccagcagcaacaaagggaagctgaaggcagctgtcgccctcctcgagccgaggggagtagtcagtcttggagacagcaggaggaagaacagcgcctgtttcgtgagagggcaagggcgaaagaggagtag

SEQ ID NO: 56748 - DNA, 699 bp, Artificial Sequence
  derived and/or modified sequence
atggccagcaccagccggcggcagcggcgggagcggcggttccggcgttatctgtccgcaggccgccttgtgcgcgctcaggccctgctgcagaggcatcccggactggacgttgatgccggccagccacctccactgcaccgggcttgtgctagacacgatgccccagcactctgcttgctgctcaggctgggtgccgacccggctcaccaagaccgacatggtgacaccgccctgcacgcggctgcacgacagggaccagacgcatatacggacttctttcttcccttgttgagcaggtgtcccagcgcaatggggatcaaaaataaggatggggaaacccctggacaaattctaggctggggtcctccttgggactctgctgaagaggaggaggaggacgatgcaagcaaagagagagagtggcgccagaagctgcagggggagctggaagacgagtggcaggaggtgatgggccggttcgagggagacgcttcacacgaaacacaggaacctgaaagttttagcgcctggtctgacaggctggcaagagaacacgcacagaagtgtcaacaacagcagagagaggccgagggtagttgcaggccaccacgcgccgaagggtcttcccaatcatggagacagcaggaagaagagcaaaggctgttcagggaaagggcccgggctaaggaggaatag

SEQ ID NO: 56749 - DNA, 699 bp, Artificial Sequence
  derived and/or modified sequence
atggccagcaccagccggcggcagcggcgggagcggcggttccggaggtatctctccgccggaagactagttcgcgcccaggctcttcttcaaagacatcccggcctcgacgttgatgcagggcagccacccccactgcatcgagcctgcgccaggcacgatgcacccgccctttgtctgttgctcagactgggcgccgaccccgcccaccaggacagacacggcgacactgctctgcacgcggccgcccgtcagggtccagacgcgtacaccgatttctttttaccactcctgtctagatgtcctagcgccatgggcataaagaacaaagacggggaaacacccggacagattctgggttgggggcccccatgggatagcgctgaagaagaggaggaggacgatgcgtctaaggagcgcgaatggagacagaagctccagggggagctggaagacgaatggcaggaggtgatgggtcgcttcgagggggatgccagccacgagacccaagagcccgaaagcttctcggcctggagcgaccgattggccagagagcatgcacagaaatgtcagcagcagcaaagagaagccgagggtagctgtagacctcctcgagccgagggttcgagccagtcctggcggcagcaagaggaggagcagcggctgttcagggaacgcgcaagggccaaggaagaatag

SEQ ID NO: 56750 - DNA, 1077 bp, Artificial Sequence
  derived and/or modified sequence
atggcctctacgtcaagacggcagcgtcgggagaggcgatttcggagatacctctctgcaggacgtctggtccgggctcaggctctactccagcgccatcccggtcttgacgttgacgctggccagcctcccccattgcacagagcctgtgcccgtcacgatgccccagccctctgtctcttacttcgactcggcgctgacccagctcatcaggataggcacggcgataccgccctgcacgcggctgccaggcaaggccctgacgcctacaccgatttcttcttgcccctcctgtctagatgcccatcggccatgggaattaagaacaaggacggagagacaccgggacagatcctgggctggggacctccgtgggattctgcagaggaggaggaagaagacgacgcaagcaaagagcgcgaatggcggcagaagcttcagggagagttagaggatgagtggcaggaggtgatgggacggttcgagggggatgcctcacacgaaacacaggagcctgaatcattctctgcttggtcagacaggctggccagggagcatgcccagaaatgccagcaacaacagcgcgaggccgaaggaagccgaaggcccccacgtgcagaaggttccagtcaatcctggcgccagcaagaagaggagcagagactcttccgcgagcgggctagggcaaaggaggaggaactacgcgaatctcgggcacgtcgagctcaggaggctcttggggatagggaacctaagcccacgcgggcagggcctagggaagaacacccacgaggcgcaggcagaggctctttatggcgtttcggggatgtgccttggccttgtcccggaggtggagacccagaagctatggcagcagcactcgtcgccagaggccctccactcgaagagcagggagcactcaggcggtaccttagagtccaacaggttcgctggcaccctgacagatttctacagcgctttaggagtcagatcgaaacttgggagctgggcagagtgatgggggcagtcacagctctatctcaagccctgaaccgccacgccgaagctctgaaatag

SEQ ID NO: 56751 - DNA, 1077 bp, Artificial Sequence
  derived and/or modified sequence
atggctagtacttcgaggcgccagaggagggagcgcaggtttcggaggtaccttagcgctgggcgtcttgtgagagcgcaagcgctgctgcagcgacaccctggactggatgttgacgcagggcagccgcctcccttgcacagggcctgcgctcggcacgatgctccagcgctgtgcctactccttcgcctgggagctgatccagcgcatcaggataggcacggagacaccgcactccatgccgctgccagacagggacctgacgcatatactgacttctttctccccctccttagcagatgtccgagtgcaatgggaatcaagaataaggacggggaaacccctggacagattctaggatggggccctccctgggattctgcggaggaagaggaggaggacgacgccagcaaggagagggaatggcggcagaaactgcaaggcgagttggaggacgaatggcaggaggtcatgggcagattcgagggtgatgcctcccatgaaactcaagaacccgaatcattctctgcatggtcggacagattagcccgtgagcatgcacagaagtgtcagcagcagcagagagaagcagaggggagctgccgcccaccaagagccgaagggagctcccagagctggcgccaacaggaagaggaacagaggctgttccgcgagagggccagagccaaggaagaagaacttagggagagccgcgcaaggagggctcaggaggccctgggagatcgcgaacctaagccaacccgcgcagggcctagagaggaacaccctagaggcgctgggagaggtagcctttggcgctttggagatgtcccttggccatgtccaggaggcggagaccctgaagcaatggcagcggcactggtggctagagggccaccattagaagaacagggagctttgcgtagatacttaagagtccagcaggtcagatggcaccccgaccggttccttcagcgatttaggagccaaatcgaaacatgggaactcggaagagtaatgggagccgtaacagccctgagccaggcgttgaaccgacatgccgaggccctcaagtag

SEQ ID NO: 56752 - DNA, 1077 bp, Artificial Sequence
  derived and/or modified sequence
atggcctctacctcacggaggcaacggagggaacgccgtttcaggagatatttatctgccggtcggctggtgagagcccaggcgctactgcagaggcacccgggtttagacgttgatgctggacaaccccctcccctgcaccgggcttgcgcccgtcacgatgcccctgccctatgcctcctgctacgattgggagctgatccagctcatcaggacaggcacggagatactgctctccacgccgcagcacggcagggtcccgacgcatacactgacttctttctgccactactgtccagatgtccatccgccatggggatcaaaaataaagatggggaaacccccggacagatcctcgggtgggggcctccttgggatagcgctgaggaagaagaggaggacgatgcatcaaaagaacgagagtggagacagaaactgcagggcgagcttgaagacgaatggcaggaagtaatgggtagattcgagggagacgcatcacacgagacccaggaacccgagagcttttctgcttggtcagatcggctggcaagagaacacgcacaaaagtgccagcagcagcagcgcgaggcagaaggctcgtgccgtccccctcgcgctgaaggttcctcccagtcctggaggcagcaagaagaggagcagcgcctctttcgggaacgagcacgcgctaaagaagaagagctacgtgaaagccgcgctagaagagcccaggaagcgctgggcgaccgcgagcccaagcctacaagagccggacccagagaggaacatcccagaggtgcaggcaggggcagtctctggaggttcggggatgtgccttggccgtgtccgggtggcggtgaccctgaagccatggctgcagcgctggtcgccaggggacctcctttggaagagcagggggcactgagacgatatttgagagtccagcaggttcgttggcaccccgaccgtttcctgcaacggttcaggagccaaattgagacctgggagctcgggcgagtcatgggcgcagtcaccgccttgtcgcaggcccttaatcggcacgccgaagccttgaaatag

SEQ ID NO: 56753 - DNA, 1077 bp, Artificial Sequence
  derived and/or modified sequence
atggcttccacatcacggcgtcagagacgcgagcgtcgcttcaggcgttatctctcagctgggcgtctggtgcgggctcaggcgttactgcagcgccaccccggtctggacgtggacgccggacagcctccacccctgcacagggcctgcgccagacacgacgcacccgcattatgtctgctgctgagactaggtgcagacccggctcatcaagatcgacacggtgatacagctctgcatgcagccgcaagacagggaccagatgcttataccgatttctttctgcctttgctcagccgctgtccaagtgccatgggtatcaagaataaggacggcgagactccaggccagatactggggtggggaccaccttgggactcagccgaggaggaagaagaagacgacgcttctaaagagagggaatggagacagaagttgcagggagagctggaagacgaatggcaggaagtgatgggtcggttcgagggtgacgcctcacacgagactcaagagcctgaatctttttcggcctggagcgacaggttggcccgagaacacgcccagaaatgccagcaacagcagcgagaggccgaaggctcatgtagacctcctagggcagagggcagttctcaatcctggcgccagcaggaggaagagcagcgtctgttcagagaacgggcacgcgctaaggaagaagagttaagggaatcacgggcacggagagctcaggaagcactgggtgaccgagagccaaagcccacaagggctggtcctcgtgaggagcacccacgcggtgccggaagaggctctctttggaggttcggggacgttccatggccctgcccaggcggaggagatcccgaggctatggcagccgcacttgttgcccgtggaccacctcttgaggaacaaggcgcactcaggcggtacctgcgggttcagcaggtgagatggcacccagaccggttcctgcagcgattccggtctcagattgagacatgggaactcggacgggtgatgggtgcggtgactgccctctctcaagcccttaacagacatgccgaggcccttaagtag

SEQ ID NO: 56754 - DNA, 1077 bp, Artificial Sequence
  derived and/or modified sequence
atggcctccacatcacgcaggcaacgaagggagcgtcgctttcgtcgctatttgtcagccggacgacttgtgcgagctcaggccctcctgcagaggcacccgggtctggatgtggatgcaggtcagcccccacctctccatagagcgtgcgcacgccacgacgctcccgcattgtgtctactgcttagattgggagccgatcccgctcatcaagaccggcacggggacactgccctgcacgccgctgcacgccaggggccagacgcttacaccgatttcttcctccccctgctctcccgatgtccctccgctatgggtataaagaataaagacggggagactccaggacaaatcctgggctgggggcctccctgggacagtgccgaagaagaggaggaggatgacgcttcaaaggagcgagaatggaggcaaaaactgcagggcgagctggaggacgagtggcaggaagtgatgggtcgttttgagggggatgcaagccacgagacacaggaaccagagagtttctcagcatggtctgaccgcttagcaagagaacatgctcagaagtgccagcagcagcagcgagaggcggaaggctcctgtagaccaccacgagcagagggcagttctcaatcatggcggcagcaagaagaagagcaacgcctgtttcgcgagcgagcacgggctaaagaggaggaactgcgggagtcccgagcgaggcgcgcacaggaagccctgggcgatcgcgagcctaaaccaacacgggcaggtcccagagaggagcaccctcggggagccggtagaggctcactatggcggtttggcgacgtaccctggccctgtcccggagggggagatcccgaagcgatggctgccgctctggtcgctcgcggaccaccactagaagagcagggagcactgcggaggtacctgagagtgcagcaagtgagatggcacccagaccgtttcctgcagagattccgctctcaaattgagacttgggaattgggacgcgtgatgggcgctgtgaccgcactaagtcaggccctgaataggcatgctgaagcactaaagtag

SEQ ID NO: 56755 - DNA, 1077 bp, Artificial Sequence
  derived and/or modified sequence
atggcttctacatctcgcagacaacgtagggaaaggcgcttcaggaggtacctttcggccggaaggctggtgagggctcaggccctgcttcaaaggcatcctggcctggatgtcgatgctggacaacctcctccattgcatcgcgcttgcgcacgccacgacgcaccggctctgtgcctcctcctgcggctgggggctgatcccgctcaccaagaccggcatggcgacactgctctacatgcagcggctcgacaggggccagacgcttataccgacttcttcctgcccctgctctcacggtgtccatccgccatgggaatcaaaaataaagacggtgagacacctgggcagattttgggatggggtcctccctgggattctgcagaggaggaggaggaggatgacgcttccaaagagagagagtggcggcagaagttgcaaggagaactcgaagatgaatggcaagaggttatgggacgcttcgagggagacgcctcccacgagacccaggagcccgaaagctttagtgcctggagcgacagactcgcacgggaacacgctcaaaagtgccagcagcagcagcgtgaagcagagggttcttgtcgccctccgcgagccgaaggatctagtcagtcttggcgccagcaggaggaggaacagagactcttccgggagagggccagagctaaggaagaggaactacgcgagtcccgcgctcggagggctcaggaagccctgggcgaccgcgaacccaagcctacccgggctggaccacgcgaagaacatcctcgcggagctgggaggggttcactgtggcgatttggggacgtaccctggccttgccccggaggtggcgacccggaagccatggccgcagccctggtcgcaagagggccacctctcgaagaacaaggcgctctacgtaggtatctgcgcgttcagcaggtaagatggcatccagatcgattcctgcagagatttcgttcgcagattgaaacatgggagcttggtagggtgatgggcgcagtgacggccctgtcgcaggcgctcaataggcacgctgaggctctcaaatag

SEQ ID NO: 56756 - DNA, 1077 bp, Artificial Sequence
  derived and/or modified sequence
atggcgtctacaagccgcaggcaaaggcgcgagcgtcggtttcggaggtatctatctgctggcaggctggtgagagcgcaagcactcttgcagcgacaccccggtttggatgtcgacgccggacaaccgccacctttacaccgagcctgcgcccgacatgacgctcctgcactctgtcttcttctgcgactgggcgctgaccctgcccatcaggacagacacggcgatacggctctgcacgcagcggctcggcagggccctgacgcttataccgatttttttctgccacttctcagcagatgtccttccgccatgggaatcaagaataaagacggcgagacccccggacagatcctgggttgggggccaccgtgggacagtgccgaggaagaagaggaggacgacgcatccaaagagcgcgagtggcgccaaaaactgcaaggagaacttgaggatgagtggcaggaggtgatgggacgctttgagggcgatgcgtctcatgaaacacaagaaccagaatcttttagcgcctggagcgataggctagctcgagaacacgcacaaaagtgtcagcagcagcagcgggaggctgagggcagttgccggcctccacgcgcagagggaagctcacagagctggaggcagcaggaggaggagcagaggctgtttcgcgagcgggctcgcgcaaaggaggaagagttgagagaatcccgtgccaggcgcgctcaggaggcactgggggatagggaaccaaaacctacccgcgcaggcccacgagaggagcacccaagaggcgcagggcgaggcagtttgtggagatttggcgacgtaccatggccatgcccaggcggtggtgaccctgaggcaatggccgctgccttggtggcaagaggccctcccctagaggaacaaggggctttgagaaggtacctccgagttcaacaggtacgttggcatcctgatcgcttcctgcagcgatttcggtctcagattgagacttgggagctcggccgagtgatgggcgctgtgacagcactgagccaggctttgaaccggcacgcagaggctctcaagtag

SEQ ID NO: 56757 - DNA, 699 bp, Artificial Sequence
  derived and/or modified sequence
atggcctctacatccagacgccagaggagggaaagacgattcagaaggtacctgagtgccggacgccttgtgcgcgctcaggcactgctgcagcgccatccaggtttggacgtggatgccggtcagccccctcctctccatcgggcatgcgcgagacacgacgcgccagcgctttgcctgttactccgtctgggcgctgaccccgctcatcaggatcgtcacggcgatactgctctccacgccgcagctcggcagggacccgatgcgtacaccgacttctttctcccacttctctcaaggtgtcctagcgcgatgggcatcaaaaataaggatggcgaaacccccggacaaatacttggctgggggccaccctgggattcggctgaagaggaagaggaggatgacgctagcaaagagcgcgaatggcgtcagaaactacagggtgaattggaggacgagtggcaggaagtcatggggcgttttgagggtgacgcctctcatgagacccaggaacccgagagtttcagcgcctggtctgacaggttagcaagagaacacgcccagaagtgtcagcagcagcagcgggaagccgagggctctcgcaggccccctcgagccgagggatcaagccagtcctggcggcagcaagaggaggagcagagattgttccgcgagcgcgcaagagccaaagaagagtag

SEQ ID NO: 56758 - DNA, 699 bp, Artificial Sequence
  derived and/or modified sequence
atggcatcaaccagcaggaggcaaaggcgagaaagacgcttccgacgctacctgtctgcaggtcgcttggtgcgagctcaagccctgctgcagagacaccctggtttagacgttgatgcgggtcaacctccacccctccacagggcttgcgccaggcacgatgcacccgctttgtgccttctgctacgtctgggtgctgaccccgctcaccaggaccgccatggagacacggcattacatgcagccgcaagacaaggtcccgatgcctacacagacttttttctgccactcctcagtagatgtccgtccgctatgggaataaaaaacaaggatggggaaacgcccggacaaatcctgggctggggacccccatgggattccgccgaggaggaagaggaggatgatgccagcaaggagcgcgagtggaggcagaaattacagggggagcttgaggacgaatggcaggaggtgatgggccgattcgaaggagatgccagtcacgaaacccaggaacctgagtctttttccgcctggtctgacaggcttgcacgggaacacgcccaaaagtgtcaacagcagcagcgagaggcagagggctcctgccgacctccgagggctgagggatccagccaatcatggagacagcaggaggaagagcaacggctgttcagggagcgtgcaagggctaaggaagagtag

SEQ ID NO: 56759 - DNA, 699 bp, Artificial Sequence
  derived and/or modified sequence
atggctagcacatctaggcgtcaacggcgtgaaaggcgtttccgacgctacctcagtgccggacgcttagtgcgggctcaggcactgctgcagaggcatccaggcttggacgtggatgctgggcagcctccccctctgcaccgcgcatgtgcgagacacgacgctccagctctgtgcctgctcttacgcctgggggctgatccagcccaccaagaccgacacggcgacaccgcgctgcacgctgctgcacgtcagggaccggatgcatacaccgatttttttctgcctctgctctcacgctgtccttctgcaatgggaattaagaacaaagacggagagaccccagggcagatcctggggtggggcccaccatgggatagcgctgaggaggaggaggaggacgacgcgagcaaggaacgcgagtggagacaaaaactgcagggcgagctggaggacgagtggcaagaggttatgggcaggtttgagggtgacgccagtcatgaaacgcaggagcccgagtctttttctgcctggagcgacaggctggcccgagagcatgcgcagaaatgccaacaacagcaacgggaagcagaggggagttgccggccaccacgcgctgagggcagctcgcaaagctggcggcaacaggaggaggagcaaaggttgttcagagaacgcgctagggcaaaggaggaatag

SEQ ID NO: 56760 - DNA, 699 bp, Artificial Sequence
  derived and/or modified sequence
atggcctccacctcaagaagacagcggagagaaagaagatttcgcagatatctcagcgcgggacgtttggttcgggctcaggccctactgcagcgacatcctggattagacgtggacgcgggacagccaccacctctgcacagagcttgcgcaaggcacgacgctccagctctgtgcctgttattacggttaggggctgaccccgcacaccaagatcgccatggagacaccgcactgcacgccgcagctaggcagggaccagacgcttacacagacttcttcttgcctctactgtcccgatgtccatccgccatggggatcaagaataaagatggagagaccccgggacagattctggggtgggggccaccatgggactccgccgaggaagaagaagaagatgacgcttcaaaagagagagagtggcgtcaaaaattacaaggagaactggaagatgaatggcaggaggtcatgggcagattcgagggcgatgcatcacacgaaacacaggagccggagagtttttcagcgtggtccgatcgtctggcacgggaacatgctcaaaagtgccaacagcaacagagggaagccgaagggtcctgtaggccgccaagagccgagggatcctcacagagctggagacagcaagaggaggagcagcggctgtttagagaaagagcacgggctaaagaagagtag

SEQ ID NO: 56761 - DNA, 699 bp, Artificial Sequence
  derived and/or modified sequence
atggcaagtacttcgagaagacaaagaagagaacggagattcaggagatatcttagtgctggacgtctagtcagagctcaggccttgttgcagagacaccctgggctcgacgtcgatgctggccagccaccgcctctgcacagggcctgtgcgaggcatgacgctccagctctgtgtctcctgcttcggttgggagccgacccagctcatcaagataggcatggagatacagcacttcacgctgccgcaaggcagggtcctgatgcctatacagacttctttctccctttgctttccagatgccccagtgctatgggcatcaagaacaaggatggagaaacccctggccaaatattgggctggggaccgccttgggacagcgccgaagaggaggaggaggacgatgcctctaaagaacgggagtggcgccagaagcttcaaggtgagctcgaagacgagtggcaggaggttatgggaaggttcgaaggtgatgcttctcacgagacacaggagccggaatcgttcagcgcttggtcagaccggcttgctcgggagcatgcccagaagtgccaacagcagcagagagaagcagaagggtcatgtcgacctcctcgggctgaaggatcatcacagagttggcggcagcaggaagaggaacaacggctctttcgagagagagcacgagcgaaggaggaatag

SEQ ID NO: 56762 - DNA, 699 bp, Artificial Sequence
  derived and/or modified sequence
atggccagtacatctcgaagacagcgccgagagcgacgcttccgcagatatctcagcgcgggacggctagttagagcgcaggccttgctgcaacggcatccgggactcgatgtagatgctggccagcctcccccactgcacagagcctgtgcgcgtcatgacgcacccgctctgtgtctcctcctccggctcggggctgacccagcacatcaagatcgtcacggagacaccgcgctgcatgccgcagccaggcagggtcccgacgcgtatacagacttctttctgccactcctgtccagatgcccctctgccatgggaattaaaaataaggatggtgaaacaccaggtcagattttaggatgggggccaccatgggactctgctgaggaggaggaagaagacgatgcgtccaaagagagagagtggcgacagaaactccagggagaacttgaggatgaatggcaggaagtcatggggagatttgagggcgacgcctctcatgagacccaggaacccgagtcattctctgcctggagtgacagactggctcgggagcatgcccagaagtgccagcagcaacagagggaggcagaaggcagctgtcgacccccacgtgctgagggctctagccaatcctggcggcagcaggaagaagagcagcggttattcagggagagggcgagggccaaggaagagtag

SEQ ID NO: 56763 - DNA, 699 bp, Artificial Sequence
  derived and/or modified sequence
atggccagcacatcccgacggcagcgcagagaacggaggttccgacggtacttatctgccggtcgcctcgtacgggcacaggctctgctgcagcgccatcccggtctggatgtagacgctgggcagccaccacctctgcaccgtgcctgcgccagacacgacgccccagctttgtgccttcttctgcgactgggggctgatcccgcacaccaggatcggcatggcgatacagcactccacgcagcagccagacagggcccagacgcttacactgacttcttcctccccttgcttagtaggtgcccctccgcgatgggtatcaagaacaaagatggggaaacacccggacagatcctaggctgggggcctccttgggacagcgcagaagaggaggaagaagatgacgcttccaaggaacgcgagtggcggcaaaaactccaaggtgagctggaggacgagtggcaggaggtaatgggcagattcgaaggggatgcaagtcatgaaacccaggaacctgagtcattcagtgcctggtctgaccgcttagccagagagcacgcacagaaatgccaacagcagcagagggaagcggaggggtcttgtcgccctccacgcgctgaaggttcttctcagagctggaggcagcaggaagaagagcaacgcctgtttcgcgagagagccagggcaaaagaggaatag

SEQ ID NO: 56764 - DNA, 1077 bp, Artificial Sequence
  derived and/or modified sequence
atggccagcaccagcagaagacagagaagagagagaagattcagaagatacctgagcgccggcagactggtgagagcccaggccctgctgcagagacaccccggcctggacgtggacgccggccagcccccccccctgcacagagcctgcgccagacacgacgcccccgccctgtgcctgctgctgagactgggcgccgaccccgcccaccaggacagacacggcgacaccgccctgcacgccgccgccagacagggccccgacgcctacaccgacttcttcctgcccctgctgagcagatgccccagcgccatgggcatcaagaacaaggacggcgagacccccggccagatcctgggctggggccccccctgggacagcgccgaggaggaggaggaggacgacgccagcaaggagagagagtggagacagaagctgcagggcgagctggaggacgagtggcaggaggtgatgggcagattcgagggcgacgccagccacgagacccaggagcccgagagcttcagcgcctggagcgacagactggccagagagcacgcccagaagtgccagcagcagcagagagaggccgagggcagcagaagaccccccagagccgagggcagcagccagagctggagacagcaggaggaggagcagagactgttcagagagagagccagagccaaggaggaggagctgagagagagcagagccagaagagcccaggaggccctgggcgacagagagcccaagcccaccagagccggccccagagaggagcaccccagaggcgccggcagaggcagcctgtggagattcggcgacgtgccctggccctgccccggcggcggcgaccccgaggccatggccgccgccctggtggccagaggcccccccctggaggagcagggcgccctgagaagatacctgagagtgcagcaggtgagatggcaccccgacagattcctgcagagattcagaagccagatcgagacctgggagctgggcagagtgatgggcgccgtgaccgccctgagccaggccctgaacagacacgccgaggccctgaagtag

SEQ ID NO: 56765 - DNA, 1077 bp, Artificial Sequence
  derived and/or modified sequence
atggccagcaccagcagaagacagagaagagagagaagattcagaagatacctgagcgccggcagactggtgagagcccaggccctgctgcagagacaccccggcctggacgtggacgccggccagcccccccccctgcacagagcctgcgccagacacgacgcccccgccctgtgcctgctgctgagactgggcgccgaccccgcccaccaggacagacacggcgacaccgccctgcacgccgccgccagacagggccccgacgcctacaccgacttcttcctgcccctgctgagcagatgccccagcgccatgggcatcaagaacaaggacggcgagacccccggccagatcctgggctggggccccccctgggacagcgccgaggaggaggaggaggacgacgccagcaaggagagagagtggagacagaagctgcagggcgagctggaggacgagtggcaggaggtgatgggcagattcgagggcgacgccagccacgagacccaggagcccgagagcttcagcgcctggagcgacagactggccagagagcacgcccagaagtgccagcagcagcagagagaggccgagggcagctgcagaccccccagagccgagggcagcagccagagctggagacagcaggaggaggagcagagactgttcagagagagagccagagccaaggaggaggagctgagagagagcagagccagaagagcccaggaggccctgggcgacagagagcccaagcccaccagagccggccccagagaggagcaccccagaggcgccggcagaggcagcctgtggagattcggcgacgtgccctggccctgccccggcggcggcgaccccgaggccatggccgccgccctggtggccagaggcccccccctggaggagcagggcgccctgagaagatacctgagagtgcagcaggtgagatggcaccccgacagattcctgcagagattcagaagccagatcgagacctgggagctgggcagagtgatgggcgccgtgaccgccctgagccaggccctgaacagacacgccgaggccctgaagtag

SEQ ID NO: 56766 - DNA, 699 bp, Artificial Sequence
  derived and/or modified sequence
atggccagcaccagcagaagacagagaagagagagaagattcagaagatacctgagcgccggcagactggtgagagcccaggccctgctgcagagacaccccggcctggacgtggacgccggccagcccccccccctgcacagagcctgcgccagacacgacgcccccgccctgtgcctgctgctgagactgggcgccgaccccgcccaccaggacagacacggcgacaccgccctgcacgccgccgccagacagggccccgacgcctacaccgacttcttcctgcccctgctgagcagatgccccagcgccatgggcatcaagaacaaggacggcgagacccccggccagatcctgggctggggccccccctgggacagcgccgaggaggaggaggaggacgacgccagcaaggagagagagtggagacagaagctgcagggcgagctggaggacgagtggcaggaggtgatgggcagattcgagggcgacgccagccacgagacccaggagcccgagagcttcagcgcctggagcgacagactggccagagagcacgcccagaagtgccagcagcagcagagagaggccgagggcagcagaagaccccccagagccgagggcagcagccagagctggagacagcaggaggaggagcagagactgttcagagagagagccagagccaaggaggagtag

SEQ ID NO: 56767 - DNA, 699 bp, Artificial Sequence
  derived and/or modified sequence
atggccagcaccagcagaagacagagaagagagagaagattcagaagatacctgagcgccggcagactggtgagagcccaggccctgctgcagagacaccccggcctggacgtggacgccggccagcccccccccctgcacagagcctgcgccagacacgacgcccccgccctgtgcctgctgctgagactgggcgccgaccccgcccaccaggacagacacggcgacaccgccctgcacgccgccgccagacagggccccgacgcctacaccgacttcttcctgcccctgctgagcagatgccccagcgccatgggcatcaagaacaaggacggcgagacccccggccagatcctgggctggggccccccctgggacagcgccgaggaggaggaggaggacgacgccagcaaggagagagagtggagacagaagctgcagggcgagctggaggacgagtggcaggaggtgatgggcagattcgagggcgacgccagccacgagacccaggagcccgagagcttcagcgcctggagcgacagactggccagagagcacgcccagaagtgccagcagcagcagagagaggccgagggcagctgcagaccccccagagccgagggcagcagccagagctggagacagcaggaggaggagcagagactgttcagagagagagccagagccaaggaggagtag

SEQ ID NO: 56768 - protein, 975 aa, Artificial Sequence
  derived and/or modified sequence
MATGLGEPVYGLSEDEGESRILRVKVVSGIDLAKKDIFGASDPYVKLSLYVADENRELALVQTKTIKKTLNPKWNEEFYFRVNPSNHRLLFEVFDENRLTRDDFLGQVDVPLSHLPTEDPTMERPYTFKDFLLRPRSHKSRVKGFLRLKMAYMPKNGGQDEENSDQRDDMEHGWEVVDSNDSASQHQEELPPPPLPPGWEEKVDNLGRTYYVNHNNRTTQWHRPSLMDVSSESDNNIRQINQEAAHRRFRSRRHISEDLEPEPSEGGDVPEPWETISEEVNIAGDSLGLALPPPPASPGSRTSPQELSEELSRRLQITPDSNGEQFSSLIQREPSSRLRSCSVTDAVAEQGHLPPPSAPAGRARSSTVTGGEEPTPSVAYVHTTPGLPSGWEERKDAKGRTYYVNHNNRTTTWTRPIMQLAEDGASGSATNSNNHLIEPQIRRPRSLSSPTVTLSAPLEGAKDSPVRRAVKDTLSNPQSPQPSPYNSPKPQHKVTQSFLPPGWEMRIAPNGRPFFIDHNTKTTTWEDPRLKFPVHMRSKTSLNPNDLGPLPPGWEERIHLDGRTFYIDHNSKITQWEDPRLQNPAITGPAVPYSREFKQKYDYFRKKLKKPADIPNRFEMKLHRNNIFEESYRRIMSVKRPDVLKARLWIEFESEKGLDYGGVAREWFFLLSKEMFNPYYGLFEYSATDNYTLQINPNSGLCNEDHLSYFTFIGRVAGLAVFHGKLLDGFFIRPFYKMMLGKQITLNDMESVDSEYYNSLKWILENDPTELDLMFCIDEENFGQTYQVDLKPNGSEIMVTNENKREYIDLVIQWRFVNRVQKQMNAFLEGFTELLPIDLIKIFDENELELLMCGLGDVDVNDWRQHSIYKNGYCPNHPVIQWFWKAVLLMDAEKRIRLLQFVTGTSRVPMNGFAELYGSNGPQLFTIEQWGSPEKLPRAHTCFNRLDLPPYETFEDLREKLLMAVENAQGFEGVD

SEQ ID NO: 56769 - protein, 854 aa, Artificial Sequence
  derived and/or modified sequence
MERPYTFKDFLLRPRSHKSRVKGFLRLKMAYMPKNGGQDEENSDQRDDMEHGWEVVDSNDSASQHQEELPPPPLPPGWEEKVDNLGRTYYVNHNNRTTQWHRPSLMDVSSESDNNIRQINQEAAHRRFRSRRHISEDLEPEPSEGGDVPEPWETISEEVNIAGDSLGLALPPPPASPGSRTSPQELSEELSRRLQITPDSNGEQFSSLIQREPSSRLRSCSVTDAVAEQGHLPPPSAPAGRARSSTVTGGEEPTPSVAYVHTTPGLPSGWEERKDAKGRTYYVNHNNRTTTWTRPIMQLAEDGASGSATNSNNHLIEPQIRRPRSLSSPTVTLSAPLEGAKDSPVRRAVKDTLSNPQSPQPSPYNSPKPQHKVTQSFLPPGWEMRIAPNGRPFFIDHNTKTTTWEDPRLKFPVHMRSKTSLNPNDLGPLPPGWEERIHLDGRTFYIDHNSKITQWEDPRLQNPAITGPAVPYSREFKQKYDYFRKKLKKPADIPNRFEMKLHRNNIFEESYRRIMSVKRPDVLKARLWIEFESEKGLDYGGVAREWFFLLSKEMFNPYYGLFEYSATDNYTLQINPNSGLCNEDHLSYFTFIGRVAGLAVFHGKLLDGFFIRPFYKMMLGKQITLNDMESVDSEYYNSLKWILENDPTELDLMFCIDEENFGQTYQVDLKPNGSEIMVTNENKREYIDLVIQWRFVNRVQKQMNAFLEGFTELLPIDLIKIFDENELELLMCGLGDVDVNDWRQHSIYKNGYCPNHPVIQWFWKAVLLMDAEKRIRLLQFVTGTSRVPMNGFAELYGSNGPQLFTIEQWGSPEKLPRAHTCFNRLDLPPYETFEDLREKLLMAVENAQGFEGVD

SEQ ID NO: 56770 - DNA, 2928 bp, Artificial Sequence
  derived and/or modified sequence
atggccacaggattaggcgagcctgtgtatggactgtcagaggatgagggagaatcacggatccttagggtcaaggtggtttctggtatcgacttggcaaagaaggacatctttggcgcaagcgatccatatgttaaactgtccctgtatgtcgcagacgaaaatcgagaattagcgttggttcagacaaagaccatcaaaaaaactctcaaccctaagtggaacgaagagttctatttcagagttaatcccagcaaccatagactgctgtttgaggtgtttgatgagaatcgcctgacacgtgacgatttcctcggacaggttgatgtccctctgtcccacctcccaaccgaagatcccacaatggagcgaccatacacctttaaggatttcctgctccgtccgcgctcgcataagagccgagtgaaaggcttcctaaggcttaagatggcgtacatgccaaaaaatggcggacaggatgaggaaaattccgatcagagggacgatatggagcacggttgggaagtggttgactccaatgacagtgcctctcagcaccaggaggaacttccccccccgccgctcccgccaggctgggaagaaaaagtcgataatttaggacgcacttattatgttaaccacaacaaccgaacaactcaatggcacaggccatctcttatggacgttagttccgagagtgacaacaatattcggcagatcaatcaggaggctgcccatcgtaggtttagatctcggagacatatcagcgaggacttagagcctgagccaagtgaggggggcgacgtgcccgagccctgggagaccatcagcgaagaagtgaacattgcgggcgactctttgggcctggctctgccaccaccgcctgcatctccggggagtcgcacaagtccccaggaactgtcagaggaattgtctcgaagacttcagattacaccagattctaatggagagcaatttagcagtctgattcaacgtgagcccagcagcaggctaaggagttgttccgtcacagacgctgtcgccgagcagggccaccttcctccaccaagcgcgcctgctggcagagccagatcatctacagttactgggggggaggaaccaactcccagtgtggcctacgtacataccacacctggtctgccatccggatgggaggagcgaaaggacgccaaaggaaggacatattatgtaaaccacaacaaccgcacgaccacgtggacccgaccaattatgcagctcgcagaggacggcgcctcaggatctgctaccaatagcaataaccatttgatagagccccagatccgacgtcccagaagcttgtcttcccccaccgtgacactgtctgcccctttggaaggcgccaaagactcaccagtacggcgggctgtgaaggatacactatctaaccctcaatccccccagccctctccttacaactctcccaagcctcaacacaaggtgacccagtctttcctgccaccagggtgggagatgagaatagcaccaaacggaagaccattctttatcgaccacaacaccaagacaaccacctgggaggatccaagactcaagttccctgtgcatatgcgctctaaaacgtcacttaaccccaatgatctcggccctctccccccagggtgggaagaacgcattcatttggatgggagaaccttttacattgatcataacagcaaaataacgcagtgggaggacccacgcctacagaatccagccattactggacccgcagtgccttacagccgagagtttaaacagaaatacgactacttccggaagaagctaaaaaaacccgctgatattcccaatcggttcgagatgaagctacaccgaaataatatctttgaagagtcctatcggaggatcatgagcgtgaagaggcccgacgtgctgaaggccagactttggatcgagttcgaatccgaaaaagggcttgactacggaggggtggcacgcgagtggttctttctactatccaaggagatgttcaatccgtattacgggttgttcgaatactcagccactgataactacaccttgcagattaaccccaactctggtttgtgtaatgaagatcatctttcctatttcacattcatcggtagagtagcagggctggctgtctttcatggaaagcttctggatggtttcttcataaggccattctacaagatgatgttgggcaagcaaatcacgctgaatgatatggagagcgtggactccgagtactataacagtctgaaatggatcctggagaatgatcccacagagctggacctcatgttttgcatcgacgaggaaaatttcgggcagacctatcaggtcgatttgaaacctaacggcagtgagattatggtcaccaacgaaaataagcgggaatacatcgatctggttattcaatggcggtttgtgaacagagtgcagaagcagatgaacgcctttctggagggatttacagaattgctgcctattgatctcataaagatcttcgacgagaacgagcttgagcttctcatgtgtggactgggggatgtcgatgttaatgactggaggcagcattccatttataagaacggatattgtccaaaccaccccgtgattcagtggttttggaaggctgttctgttgatggatgctgaaaagaggatcagactgctgcagtttgtcacaggcacaagcagggtgcccatgaacgggttcgccgagctttatgggtccaatgggccacaactctttactatcgagcagtgggggtctcctgaaaaactgcctcgggcccatacgtgttttaaccggcttgacctccccccctatgaaacattcgaggacttacgggagaaattgctaatggcggtggagaatgcccagggattcgaaggcgtagattag

SEQ ID NO: 56771 - DNA, 2928 bp, Artificial Sequence
  derived and/or modified sequence
atggccaccggcctgggggagcctgtgtatggcctgtctgaagatgaaggagagagccgcatcctgcgggtgaaggtggtgtctggcatcgacctggccaagaaggacatctttggagccagtgacccctacgtgaagctgagcctgtatgtggctgatgagaaccgggagctggccctggtgcagaccaagaccatcaagaagaccctgaaccccaagtggaatgaggagttctacttccgggtgaaccccagcaaccaccggctgctgtttgaggtgtttgatgagaaccggctgaccagagatgacttcctgggccaggtggatgtgcccctgagccacctgcccacagaggaccccaccatggagcggccctacaccttcaaggacttcctgctgcggcccaggagccacaagagccgggtgaagggcttcctgcggctgaagatggcctacatgcccaagaatggaggccaggatgaggagaacagcgaccagagagatgacatggagcacggctgggaggtggtggacagcaatgacagcgccagccagcaccaggaggagctgcccccaccacccctgcccccaggctgggaggagaaggtggacaacctgggccgcacctactacgtgaaccacaacaacagaaccacccagtggcaccggcccagcctgatggatgtgtcctctgagagtgacaacaacatccggcagatcaaccaggaggccgcccaccggcgcttccgcagccgccgccacatcagcgaggacctggagcctgagcccagcgagggcggagatgtgcctgagccctgggagaccatcagcgaggaggtgaacattgctggggacagcctgggcctggccctgcccccacctccagccagccctggcagcaggaccagcccccaggagctgtctgaggagctgagccggcggctgcagatcaccccagacagcaatggagagcagttcagcagcctcatccagcgggagcccagcagccggctgcggagctgcagcgtgacagatgctgtggccgagcagggccacctgcccccaccttctgccccagctggccgggcccggagcagcacagtgactggaggagaggagcccaccccatctgtggcctacgtgcacaccaccccaggcctgcccagcggctgggaggagaggaaggatgccaagggccgcacctactacgtgaaccacaacaacagaaccaccacctggacccggcccatcatgcagctggccgaggatggagccagcggcagcgccaccaacagcaacaaccacctgattgagccccagatccggcggcccaggagcctgagcagccccaccgtgaccctgagcgcccccctggagggcgccaaggacagccctgtgagaagagctgtgaaggacaccctgagcaacccccagagcccccagcccagcccctacaacagccccaagccccagcacaaggtgacccagagcttcctgcccccaggctgggagatgagaattgcccccaacggccggcccttcttcatcgaccacaacaccaagaccaccacctgggaggacccccggctgaagtttcctgtgcacatgaggagcaagaccagcctgaaccccaatgacctgggccccctgcccccaggctgggaggagcgcatccacctggatggccgcaccttctacatcgaccacaacagcaagatcacccagtgggaggacccccggctgcagaacccagccatcactggacctgctgtgccctacagccgggagttcaagcagaagtatgactacttcaggaagaagctgaagaagccagctgacatccccaacagatttgagatgaagctgcacaggaacaacatctttgaggagagctaccgccgcatcatgtctgtgaagaggccagatgtgctgaaggcccggctgtggattgaatttgagagcgagaagggcctggactatggaggagtggcccgggagtggttcttcctgctgagcaaggagatgttcaacccctactacggcctgtttgagtacagcgccacagacaactacaccctgcagatcaaccccaacagcggcctgtgcaatgaagaccacctgagctacttcaccttcatcggccgggtggccggcctggccgtgttccacggcaagctgctggatggcttcttcatccggcccttctacaagatgatgctgggcaagcagatcaccctgaatgacatggagagcgtggacagcgagtactacaacagcctgaagtggatcctggagaatgaccccacagagctggacctgatgttctgcattgatgaggagaactttggccagacctaccaggtggacctgaagcccaatggaagtgagatcatggtgaccaatgaaaacaagcgggagtacatcgacctggtgatccagtggaggtttgtgaacagagtgcagaagcagatgaatgccttcctggagggcttcacagagctgctgcccatcgacctgatcaagatctttgatgaaaatgagctggagctgctgatgtgtggcctgggagatgtggatgtgaatgactggaggcagcacagcatctacaagaatggctactgccccaaccaccctgtgatccagtggttctggaaggctgtgctgctgatggatgctgagaagaggatccggctgctgcagtttgtgacaggcaccagccgggtgcccatgaatggatttgctgagctgtatggcagcaatggcccccagctgttcaccatcgagcagtggggcagccctgagaagctgccccgggcccacacctgcttcaaccggctggacctgcccccctatgagacctttgaggacctgcgggagaagctgctgatggctgtggagaatgcccagggctttgaaggagtggactag

SEQ ID NO: 56772 - DNA, 2928 bp, Artificial Sequence
  derived and/or modified sequence
atggccaccggcctgggcgagcccgtgtacggcctgagcgaggacgagggcgagagcagaatcctgagagtcaaggtggtctccggcattgacttggcaaagaaagatatctttggggcgagcgatccatacgtgaagctcagcctttatgtggccgacgaaaaccgcgaactggccctagtacagactaaaactattaaaaagaccttgaaccccaaatggaacgaagaattctactttagggtgaacccctctaatcacagattacttttcgaggttttcgacgaaaacaggttgacaagggacgacttcctcggacaagtggatgtcccactgagtcaccttccgaccgaggatccaacgatggagcgcccatatacctttaaggattttcttctccggcctcggtcacacaagtctcgagtcaaggggttcctgagactgaagatggcatacatgcctaaaaatggcggccaggatgaagagaattcagaccaaagggacgatatggaacacgggtgggaggtggtggattccaacgactcagccagtcagcaccaggaggagttacctccacctcccctgcctcctgggtgggaggaaaaggtggataatttaggtaggacctattatgttaatcacaataaccgcacaacccagtggcaccgcccatcactcatggacgtatcaagcgaatctgataacaacattcggcagataaatcaggaggccgctcatcgccggtttaggagcaggagacacatatcggaggatctggaacctgaaccatctgagggaggcgatgttccagaaccttgggagacgatatccgaggaggtgaacatcgcaggcgattccctggggttagccctacctccgcctccagcaagtccagggagcagaacaagcccccaggaactatctgaggagttgtcccgcagacttcaaattactccggatagtaacggcgaacagttcagtagcctgatccaacgcgaaccctcatcaagactgcgcagctgctcggtaacggacgcagtggctgaacaggggcacttgcctccacccagcgcccctgcagggagagcccgaagtagcaccgtgacagggggggaagaacctacccctagcgtggcttatgttcacactacgcccggattacccagcggctgggaggagcgcaaggacgctaaggggaggacgtactatgtgaaccataacaacaggacaacaacttggactcggccaataatgcagctcgccgaggacggcgcttccggaagtgccacgaatagtaacaaccacctgattgaaccacagattagacggccaaggtctctgagttccccgactgtaactctcagcgccccactcgaaggcgctaaagattctccggtgagacgggccgtcaaggacaccctctctaacccccagtctcctcagccctcgccctataactcccctaagccccagcacaaagtgacacagtccttcttaccacccggatgggagatgcggatcgctccaaatggacgccctttttttattgaccataataccaagaccaccacatgggaagaccccaggcttaagtttcctgtgcatatgcgctcgaagactagtctgaacccaaatgacttgggtcctctcccgcccggttgggaggagcgaatccacctcgacggccggacattctatatcgaccataactctaaaattacccagtgggaggaccctaggctgcagaatcctgctataaccggcccagctgtgccatacagcagggaatttaaacagaagtatgattacttccgaaaaaaactcaaaaagcctgcggatatccctaatcgctttgaaatgaagttacaccgtaataatatattcgaggagtcctaccgacggattatgagcgttaagaggccggacgtactgaaggcccggctatggattgaatttgagtctgaaaaaggtctggactatggaggggtcgcgcgagagtggttttttctgctttctaaggagatgtttaacccctactacggtctcttcgagtattcagccacagacaattacactctgcaaatcaaccccaactcgggcctgtgcaatgaggatcatctctcctactttacattcatcggtagagttgctggcttggcagtgtttcatgggaaactgcttgatggattctttatcaggcctttctacaagatgatgcttgggaaacagataacactgaacgacatggagtcagtggactccgaatactacaattctttgaagtggattctcgaaaatgacccaacagagctggacctgatgttctgtatagacgaggaaaactttggacagacatatcaggtggacctgaagcccaacggcagtgagattatggttacaaatgaaaacaagcgtgagtacattgaccttgtgatccaatggcgcttcgtgaaccgcgtgcagaagcagatgaacgctttcctcgaaggattcactgaactcttacccatcgacctgataaaaatattcgacgagaatgagttggagctgttaatgtgcggcctgggagacgtggacgtcaatgattggcggcaacacagcatttataagaacggatattgtccaaaccatccagtgattcaatggttttggaaggctgtgctgctaatggatgcggagaaaaggatccgcctcctacagttcgtgaccggtacttcgcgggtacctatgaatggcttcgccgaactgtatggcagcaacggaccccagctgttcactatagaacagtggggttcccctgaaaaactgcctcgcgcccacacatgtttcaatcggctggatttacccccatacgagacctttgaggatttgagagagaaattgcttatggctgtcgagaatgcccaaggtttcgagggagtggattag

SEQ ID NO: 56773 - DNA, 8473 bp, Artificial Sequence
  derived and/or modified sequence
gagaggcgccggggctgccgcccggtgctcggcgcgctctcgggagccgcccgcccgctggtcccgcagccttccgggaggaagcggtgccggcagcgtccagggcgcgctctcgggcaccctcacctgccggcgcccggccgcttacccggcagggcgtgcgcagggtagggtgcgggaccggggggacctggaggcagaggggagaaccggccgtccgcgccgcagcacagccgctgggagcgcctcagaccccgcgcggggcgccggctccatggcgaccgggctcggggagccggtctatggactttccgaagacgagggagagtcccgtattctcagagtaaaagttgtttctggaattgatctcgccaaaaaggacatctttggagccagtgatccgtatgtgaaactttcattgtacgtagcggatgagaatagagaacttgctttggtccagacaaaaacaattaaaaagacactgaacccaaaatggaatgaagaattttatttcagggtaaacccatctaatcacagactcctatttgaagtatttgacgaaaatagactgacacgagacgacttcctgggccaggtggacgtgccccttagtcaccttccgacagaagatccaaccatggagcgaccctatacatttaaggactttctcctcagaccaagaagtcataagtctcgagttaagggatttttgcgattgaaaatggcctatatgccaaaaaatggaggtcaagatgaagaaaacagtgaccagagggatgacatggagcatggatgggaagttgttgactcaaatgactcggcttctcagcaccaagaggaacttcctcctcctcctctgcctcccgggtgggaagaaaaagtggacaatttaggccgaacttactatgtcaaccacaacaaccggaccactcagtggcacagaccaagcctgatggacgtgtcctcggagtcggacaataacatcagacagatcaaccaggaggcagcacaccggcgcttccgctcccgcaggcacatcagcgaagacttggagcccgagccctcggagggcggggatgtccccgagccttgggagaccatttcagaggaagtgaatatcgctggagactctctcggtctggctctgcccccaccaccggcctccccaggatctcggaccagccctcaggagctgtcagaggaactaagcagaaggcttcagatcactccagactccaatggggaacagttcagctctttgattcaaagagaaccctcctcaaggttgaggtcatgcagtgtcaccgacgcagttgcagaacagggccatctaccaccgcccagtgccccagctgggagagcgcgttcatcaactgtcacgggtggtgaggaaccaacgccatcagtggcctatgtacataccacgccgggtctgccttcaggctgggaagaaagaaaagatgctaaggggcgcacatactatgtcaatcataacaatcgaaccacaacttggactcgacctatcatgcagcttgcagaagatggtgcgtccggatcagccacaaacagtaacaaccatctaatcgagcctcagatccgccggcctcgtagcctcagctcgccaacagtaactttatctgccccgctggagggtgccaaggactcacccgtacgtcgggctgtgaaagacaccctttccaacccacagtccccacagccatcaccttacaactcccccaaaccacaacacaaagtcacacagagcttcttgccacccggctgggaaatgaggatagcgccaaacggccggcccttcttcattgatcataacacaaagactacaacctgggaagatccacgtttgaaatttccagtacatatgcggtcaaagacatctttaaaccccaatgaccttggcccccttcctcctggctgggaagaaagaattcacttggatggccgaacgttttatattgatcataatagcaaaattactcagtgggaagacccaagactgcagaacccagctattactggtccggctgtcccttactccagagaatttaagcagaaatatgactacttcaggaagaaattaaagaaacctgctgatatccccaataggtttgaaatgaaacttcacagaaataacatatttgaagagtcctatcggagaattatgtccgtgaaaagaccagatgtcctaaaagctagactgtggattgagtttgaatcagagaaaggtcttgactatgggggtgtggccagagaatggttcttcttactgtccaaagagatgttcaacccctactacggcctctttgagtactctgccacggacaactacacccttcagatcaaccctaattcaggcctctgtaatgaggatcatttgtcctacttcacttttattggaagagttgctggtctggccgtatttcatgggaagctcttagatggtttcttcattagaccattttacaagatgatgttgggaaagcagataaccctgaatgacatggaatctgtggatagtgaatattacaactctttgaaatggatcctggagaatgaccctactgagctggacctcatgttctgcatagacgaagaaaactttggacagacatatcaagtggatttgaagcccaatgggtcagaaataatggtcacaaatgaaaacaaaagggaatatatcgacttagtcatccagtggagatttgtgaacagggtccagaagcagatgaacgccttcttggagggattcacagaactacttcctattgatttgattaaaatttttgatgaaaatgagctggagttgctcatgtgcggcctcggtgatgtggatgtgaatgactggagacagcattctatttacaagaacggctactgcccaaaccaccccgtcattcagtggttctggaaggctgtgctactcatggacgccgaaaagcgtatccggttactgcagtttgtcacagggacatcgcgagtacctatgaatggatttgccgaactttatggttccaatggtcctcagctgtttacaatagagcaatggggcagtcctgagaaactgcccagagctcacacatgctttaatcgccttgacttacctccatatgaaacctttgaagatttacgagagaaacttctcatggccgtggaaaatgctcaaggatttgaaggggtggattaagcaccctgtgcctcgggggtggttgttcttcaagcaagttctgcttgcacttttgcatttgcctaacagacttttgcagaggcgatggcagagagcagctgcaggcatggtccctggagccgagccttcaccacgcactcgtccaagttcggatgcgggaacctggtcccagcttgagttcctgcctttcccaccacaaattatcaactggttgatgtgtacactaattacatttcaggaggacttaatgctatttatgttgtgcctctgcaggcaaagcccttaataaatattttacatcctttctaatgacaatgaatggaattaatcactcaacaggtatagtattacgactcatgtttactttttaaaatgatttagaccgattttcagattttatttcgttatgattaaagatgtctcatgtacttggaaaagtgagcattttttttttttttgtatttcactttcataccaggcttaatgtcaatgacatttttatttttgaagtactctgacacctccaccctctactttattagaattggaaggcaaatttttgtccaaaaacctacagacaagtactttgagagaatttccaatataatattagacataatgataattttttccatactcagaatgaaaaactggatattacgtttttgttttggggtttttttgtacaaatttagctaatagctacaggctgagagaattgtaacatagcatgacaaattttgtgttgacttgaaaggaatcacaccattattccttagaagtaattacatgtgttctaacacatttgagacagggttggactcccatttctcatccgagaaattacttaacccttcctggcgctgtacagtcatcttttattctatttcctctttgctgtttgtagtagagacattttgaatgaaacttggcactgcttgattcaaaactgtggaaaccagatctgtttagtctcctgtttgtatgcgtttgctaatggtagctaaataaccagtttttgttgtaaatgcaccaattctgaaggcactttatgtactacatggaggtcatatctggttttgtttttatttttttatcatgaacattaaatgtgatgatgatttcttttccctgcacacatctttccggtgcaatatctatcaattgtgaatctggctgctggtgtataaaaacctggatgtaaagctgagcctacagacctgtcctcaccaactgttttgtgatttctactcaactacaaagatttatttaatgtactcttaatctaactgagttttgttaccaatgacctgttgcatgcttcaataccgtgtactgcctgagttgtgcctcttgtgtgctagattaaaagtgagacagagacttgacttgatcctctgagctcaagctattgagctggtagtggcagaggactgagggtacctgcacagtttgattcttttccacgtgtaagtctccattgcagaattgtcgtgctttgagaaaacacctgaggcagtgtgggagttgaacgaccctgctgtcctttttaacctgtgttgtcctagaccctgtcggggcagtcaggggacactagagatttgatctcatgcgagtcatcaataggacaaaaaagttgtggtttggggaggtctgtttgttacataaaaaggacctttcggtgtaagaaattgccgtttttaccctgccctggctggcatgtgagaagccatggaaggttgtggttgtaaatgagttgtctaaaggggtgcagaggcctgaggtttctaaaagaaggtagatttctacagagctgagtgttggttcctttttcttattggttgaaaattacctggtagtgatcagaaaacttagatgctatgtaactaaaaaaaaaaaaaaaaaaaaaaaaaaaaaaaaaaaaattcccgctcatgagttttgactattggtgagatgttttccgctacagttaacatgacaaatgtctcagtggcaaaaatcccctttttgtaagcccccatagtctagaggcagttttctttttaagaatcatgccagagcctgagtcgagcagtatgctttcttggtttttgagagtaattgtgtaattgtagagggagaaatccaattctaacctaagaactgggattcttctgtcatcttgtaaaccgtatattgaaaaaaacagaatgtcactaaatgcatattaagtcaagtattggaaagtataaaagaaaaatcattctgacaatttctaagccagaagcaaacaagaattactgaaatctaccccatgaatacttggaaggcagtaattgtgagtgacacctcagttcatcaaccccttaataatatcagcttaattttaatgacaactaaatatgctgaagtgaggatttagtattttttaaaaaagcaaaacaaggttcagtagtcctcagcaattctccaagtttctctctttgcctaaaatggtcatagatcttgatttctctgaatcgtgatgaccacacccagtcatcttcacagcataattgcaggtggcagtaaagagagtgtgctgggtaaggagcagttgctgggtcattccttgggccccgacctgcccggggagtagccctgggggagagagggcagtgttgcctatcccagaggtcccagcagtcacactgctctgcaggccgggctctctttatagccagagaaatcaccttaatgcagtctctttagttgtctgctgaagctgtagttattatgggccacttacatgaggctgagaagtacgtgccggagctcacacactgcctgttgcggttctcttaacatcagttatcacagctgcctgtgggtcccgggtatttccattcctgccccttgttggcccgaggaaggatgtggaaagagcacctggtgggatgaaggtccaacagcctgtgcctctccactgctggccctggagccggcagcagtgaggcattcattgtctgtgttgcggtgtattcccagcttcagtgctcttttcctttttgcctgaaatgtttatgcttctctgcagccagtcctctaacaaatctcaagaacaaaggtaagacacttggtttttgtttccaggacccttcagaaggtgacatcagatattccctaaattcagacaatgagggatacagagcgacttggcatgtattatttctcccatgtaaggacaaagggacagattattattgttatttctgagacagagtcttgctctgtagctcaggctggagtgcagtggctcaatctcagctcaccacaacctctgcctcctggcttcaagcgattcttctgcctcagcctccccgaatagttgggattacaggcacccaccaccacgcctggctaatttttgtatttttagtagagatggtttcaccatgctggccaggctggtcttgaactcctgacctcaggtgatcctcccgcctcagccttccaaagtgctgggattacaagcatgagccaccgcacccggcctcacagtgacagattctgagaaacagcatgcaaaacatttgaaccattttctacatctcccattgttgcatagagagtgtgcaccgctgctatcttgccagatccacactggtcctcccgaaagccaggttcatacacagcaactttttaattattctaacagttacccattaacagtcgactcctgtatttctgagagtcttgtactcacctctgaaatttaaaaacgtataaagagagcctgggttaatcagttctgcagcccctacgtgacactgtgctagttctccttcttctgtctcctccttaccctggccctgcacccctgtacttaagagggagaggtgggaggtgctgtctggtatcatttgctgcctcgccagtagagggtgccgctgtgcagggtaactgcccgcctgctcccttcctgacctcccctgaccccgaagatcactacctctgtcattcaggcattggggtacatcctgataagtcgtgtcagaactgccaatttcaggactgagatgtgtttttaaaaaacaaatccttataaactccactttgtactttagattttaaaactggggaaaaatgtgatattctttggaccacttttttaatttatataagccttaatgaacagtgtctatacatttgcatacacacacccccaccccagagtgttctcagtatgtcagagaaagtgccacagcattaggacgggagcttggagaacgttttctagaaaagggttagcttcctgttggcatgaaattttccaagcaaacctcattaaacatctgttgtttgttaaagatgttccactgaaagcaacgcatgtttcaaaggcacgtctttccgttcgttggttttctgtgtgtaaggagtagcattgctgttggcgcctaacctcgcgtgcactgcattctcaaccccgtaccagtgcatcatcagaagccttcctcgtgaccataactctgtgtctgcagatatgtgttcccgtgtaagccagttttccccttttactcagactgatttcacctagattgtcacggtttccttcatgttaactttgcgtgactttgttcttcctttactactctgtatgtaatatatatacatatatacgtacatatgctgtccaaatatatttgtatatatttgtatagcatttttacacctttattgagtaatctggtttcgaaaggaggtgagagtttagtcccttctgcagttttctccaagctgtgtcctgtgaatttcaacccttggagcctaagaaaaccctaggaagatgatgttaatttgctgtcatttcctaattcaggatctatcatcaaatgaaacatgaaaaaaacagtgacttttaaggtgaaaagagtttcaagcattccaaataaattatcaatgtttcataactttttattataaacccacctcctaataggaagccaagtactatttgatacagtggtaaaaaccaaactaccttgaatttttttaaggcaacttatgaataatgctcattttcacagtcagaatagctttaaaatatggttgaatttgatacacacaggaagttttcttgaagaacaatcctttcgcttttcttttttcttgagagatctaaagagaaactgtagattgttttcctgacagcaaaagactaatgtgacaaaatgaagtcattgtaaagaagcgatgcaacttgtcaaatatttaataaagaattatggaagctggaacattttctac

SEQ ID NO: 56774 - DNA, 2928 bp, Artificial Sequence
  derived and/or modified sequence
atggcaacaggtctgggcgagcctgtgtatggcttgtcagaagacgagggtgagtcaaggatcctccgtgtgaaggttgtgtcgggcatcgacttggctaaaaaggatattttcggtgcctctgatccatatgttaaactgtctctgtatgttgcagatgagaacagggagttagccttggtgcagaccaagacgatcaaaaagaccttaaaccctaagtggaacgaggagttttatttcagagtaaatccttctaaccacaggctgctgtttgaagtgtttgatgagaataggctcaccagagacgacttcctgggccaagttgacgtgccgctaagccatctgcccacagaagacccaacgatggagcgcccttacaccttcaaagacttcttgctgcgtccgagaagccataaatctcgtgttaagggattcctacgcctaaaaatggcttacatgccgaagaatgggggacaggacgaagagaacagcgaccaacgggatgacatggagcatggctgggaagtcgtcgacagtaacgatagtgcctcacagcaccaagaggagctgcccccaccgccactccctcccggatgggaggaaaaggttgataatctgggcaggacatattacgtaaaccataataaccggacgactcagtggcatcggccaagtctcatggacgttagtagtgaatctgacaataatattagacagattaaccaagaagccgcacatagaagatttcgctcaagaaggcacatcagtgaggatctggagcccgaaccctctgagggcggagacgttccagagccttgggaaactatcagcgaagaggtgaatatcgcaggcgatagcctgggcctggctctgccccctccacccgctagccccggatcacgcacgtcccctcaggaattaagtgaggaattgtctaggcggttacagataactcccgattcaaacggcgaacagttttcgagtctaatccagcgggagccctcatctagattgcggtcatgttccgtcacggacgcagttgccgaacaagggcacctacccccaccttctgcccctgctggccgagcgcgttcaagcactgtgaccggtggggaggaacccactccctcagtggcctacgtgcacactacaccgggtctgccctcaggctgggaagaaagaaaagatgcaaagggaagaacctactacgttaaccacaataatcgcacaacgacttggacacgtcctattatgcagttggccgaggatggtgccagcggaagcgccactaattctaataaccacttgattgaaccccagatcaggagacccagatctttaagtagtccaactgtaaccctgagcgcgcctctcgaaggagctaaggattcgcccgtcaggagggccgtgaaggatactctgtccaacccccagagcccccaaccctccccctataattccccaaagccacaacataaagtcacccagtcattcttgccccctggatgggagatgcggatagcaccgaatggcagacccttcttcattgaccacaatactaagactaccacgtgggaagatccacggctgaaattcccagttcacatgagatccaagacttccttgaaccccaatgacctgggacccctcccccctggatgggaggagcgtatccacctggacggcaggacgttctacatagatcacaacagcaaaatcacgcagtgggaggaccctaggctgcagaatccagccatcacagggcctgcagtgccctattctagagaatttaagcagaagtatgactattttcggaagaaactgaagaagccggctgacatccccaatcggttcgaaatgaagttgcacaggaataatatcttcgaagagtcttatcggagaatcatgtccgtgaaaagaccagatgttcttaaagcccgtctgtggatcgaatttgagtccgaaaagggactcgactatggaggagtcgccagggagtggtttttcctccttagcaaggagatgtttaacccatactatggcctctttgagtactctgctacagataattacaccttgcaaattaatcctaatagcggcctgtgcaatgaagatcacctcagttacttcacctttattggcagagtggcagggctggcggtcttccacggaaagctgctggatggattttttattaggccattttacaaaatgatgcttggaaagcagatcacactcaacgatatggagtcggtggattccgagtactataattctctgaagtggatcctggagaacgaccccacagagctggacctgatgttttgtattgatgaagaaaattttggtcagacatatcaggtagatctgaaacccaacgggagcgagataatggtgacaaacgagaataagagggagtacatcgatctggtgatacagtggagatttgtcaatcgggtgcaaaagcaaatgaatgctttcttggaagggttcaccgaattgcttcctattgatcttattaaaattttcgacgaaaatgagcttgagctgctcatgtgcggccttggtgatgttgatgtgaacgattggaggcagcactccatttataagaacgggtattgtccaaatcaccctgtgatccagtggttttggaaagcagtccttcttatggacgctgagaaacgcattagattgttacagtttgtcactgggactagtagagtgcctatgaacgggtttgctgagctgtacggttccaacggaccccagttattcactatcgaacagtggggcagccccgagaagctcccaagagctcatacatgctttaaccgcttggatctgccaccttacgagacgtttgaggatctccgagagaaactactgatggctgtcgaaaacgcccagggcttcgaaggggtggattag

SEQ ID NO: 56775 - DNA, 2928 bp, Artificial Sequence
  derived and/or modified sequence
atggccaccggcctgggcgagcccgtgtacggcctgagcgaggacgagggcgagagcagaatcctgagagtgaaggtggtgagcggcatcgacctggccaagaaggacatcttcggcgccagcgacccctacgtgaagctgagcctgtacgtggccgacgagaacagagagctggccctggtgcagaccaagaccatcaagaagaccctgaaccccaagtggaacgaggagttctacttcagagtgaaccccagcaaccacagactgctgttcgaggtgttcgacgagaacagactgaccagagacgacttcctgggccaggtggacgtgcccctgagccacctgcccaccgaggaccccaccatggagagaccctacaccttcaaggacttcctgctgagacccagaagccacaagagcagagtgaagggcttcctgagactgaagatggcctacatgcccaagaacggcggccaggacgaggagaacagcgaccagagagacgacatggagcacggctgggaggtggtggacagcaacgacagcgccagccagcaccaggaggagctgccccccccccccctgccccccggctgggaggagaaggtggacaacctgggcagaacctactacgtgaaccacaacaacagaaccacccagtggcacagacccagcctgatggacgtgagcagcgagagcgacaacaacatcagacagatcaaccaggaggccgcccacagaagattcagaagcagaagacacatcagcgaggacctggagcccgagcccagcgagggcggcgacgtgcccgagccctgggagaccatcagcgaggaggtgaacatcgccggcgacagcctgggcctggccctgccccccccccccgccagccccggcagcagaaccagcccccaggagctgagcgaggagctgagcagaagactgcagatcacccccgacagcaacggcgagcagttcagcagcctgatccagagagagcccagcagcagactgagaagctgcagcgtgaccgacgccgtggccgagcagggccacctgcccccccccagcgcccccgccggcagagccagaagcagcaccgtgaccggcggcgaggagcccacccccagcgtggcctacgtgcacaccacccccggcctgcccagcggctgggaggagagaaaggacgccaagggcagaacctactacgtgaaccacaacaacagaaccaccacctggaccagacccatcatgcagctggccgaggacggcgccagcggcagcgccaccaacagcaacaaccacctgatcgagccccagatcagaagacccagaagcctgagcagccccaccgtgaccctgagcgcccccctggagggcgccaaggacagccccgtgagaagagccgtgaaggacaccctgagcaacccccagagcccccagcccagcccctacaacagccccaagccccagcacaaggtgacccagagcttcctgccccccggctgggagatgagaatcgcccccaacggcagacccttcttcatcgaccacaacaccaagaccaccacctgggaggaccccagactgaagttccccgtgcacatgagaagcaagaccagcctgaaccccaacgacctgggccccctgccccccggctgggaggagagaatccacctggacggcagaaccttctacatcgaccacaacagcaagatcacccagtgggaggaccccagactgcagaaccccgccatcaccggccccgccgtgccctacagcagagagttcaagcagaagtacgactacttcagaaagaagctgaagaagcccgccgacatccccaacagattcgagatgaagctgcacagaaacaacatcttcgaggagagctacagaagaatcatgagcgtgaagagacccgacgtgctgaaggccagactgtggatcgagttcgagagcgagaagggcctggactacggcggcgtggccagagagtggttcttcctgctgagcaaggagatgttcaacccctactacggcctgttcgagtacagcgccaccgacaactacaccctgcagatcaaccccaacagcggcctgtgcaacgaggaccacctgagctacttcaccttcatcggcagagtggccggcctggccgtgttccacggcaagctgctggacggcttcttcatcagacccttctacaagatgatgctgggcaagcagatcaccctgaacgacatggagagcgtggacagcgagtactacaacagcctgaagtggatcctggagaacgaccccaccgagctggacctgatgttctgcatcgacgaggagaacttcggccagacctaccaggtggacctgaagcccaacggcagcgagatcatggtgaccaacgagaacaagagagagtacatcgacctggtgatccagtggagattcgtgaacagagtgcagaagcagatgaacgccttcctggagggcttcaccgagctgctgcccatcgacctgatcaagatcttcgacgagaacgagctggagctgctgatgtgcggcctgggcgacgtggacgtgaacgactggagacagcacagcatctacaagaacggctactgccccaaccaccccgtgatccagtggttctggaaggccgtgctgctgatggacgccgagaagagaatcagactgctgcagttcgtgaccggcaccagcagagtgcccatgaacggcttcgccgagctgtacggcagcaacggcccccagctgttcaccatcgagcagtggggcagccccgagaagctgcccagagcccacacctgcttcaacagactggacctgcccccctacgagaccttcgaggacctgagagagaagctgctgatggccgtggagaacgcccagggcttcgagggcgtggactag

SEQ ID NO: 56776 - protein, 967 aa, Artificial Sequence
  derived and/or modified sequence
MRRLAFEQGESRILRVKVVSGIDLAKKDIFGASDPYVKLSLYVADENRELALVQTKTIKKTLNPKWNEEFYFRVNPSNHRLLFEVFDENRLTRDDFLGQVDVPLSHLPTEDPTMERPYTFKDFLLRPRSHKSRVKGFLRLKMAYMPKNGGQDEENSDQRDDMEHGWEVVDSNDSASQHQEELPPPPLPPGWEEKVDNLGRTYYVNHNNRTTQWHRPSLMDVSSESDNNIRQINQEAAHRRFRSRRHISEDLEPEPSEGGDVPEPWETISEEVNIAGDSLGLALPPPPASPGSRTSPQELSEELSRRLQITPDSNGEQFSSLIQREPSSRLRSCSVTDAVAEQGHLPPPSAPAGRARSSTVTGGEEPTPSVAYVHTTPGLPSGWEERKDAKGRTYYVNHNNRTTTWTRPIMQLAEDGASGSATNSNNHLIEPQIRRPRSLSSPTVTLSAPLEGAKDSPVRRAVKDTLSNPQSPQPSPYNSPKPQHKVTQSFLPPGWEMRIAPNGRPFFIDHNTKTTTWEDPRLKFPVHMRSKTSLNPNDLGPLPPGWEERIHLDGRTFYIDHNSKITQWEDPRLQNPAITGPAVPYSREFKQKYDYFRKKLKKPADIPNRFEMKLHRNNIFEESYRRIMSVKRPDVLKARLWIEFESEKGLDYGGVAREWFFLLSKEMFNPYYGLFEYSATDNYTLQINPNSGLCNEDHLSYFTFIGRVAGLAVFHGKLLDGFFIRPFYKMMLGKQITLNDMESVDSEYYNSLKWILENDPTELDLMFCIDEENFGQTYQVDLKPNGSEIMVTNENKREYIDLVIQWRFVNRVQKQMNAFLEGFTELLPIDLIKIFDENELELLMCGLGDVDVNDWRQHSIYKNGYCPNHPVIQWFWKAVLLMDAEKRIRLLQFVTGTSRVPMNGFAELYGSNGPQLFTIEQWGSPEKLPRAHTCFNRLDLPPYETFEDLREKLLMAVENAQGFEGVD

SEQ ID NO: 56777 - DNA, 2904 bp, Artificial Sequence
  derived and/or modified sequence
atgaggcgactggcattcgaacagggggaaagccgcatactgcgcgtcaaggtggtgtccggcattgatctggccaagaaagacatcttcggagccagtgatccctacgtgaagctgtcactatatgtggccgatgagaatcgcgagcttgctttagtgcagaccaaaacaattaagaaaaccctgaatcctaagtggaacgaggagttttactttcgcgtgaatccttcaaaccatcggctcctattcgaggtttttgacgagaacaggctgacacgcgacgacttccttgggcaggtcgacgtcccactttctcatcttccaacagaggacccaacgatggagagaccctacacattcaaggactttctcctgagaccacggagtcataagtctagggtcaagggcttcctgaggctgaaaatggcttatatgccaaagaatggaggccaggacgaggagaactctgatcaacgcgacgacatggagcacggctgggaggtagtcgacagtaatgattccgcctcccagcaccaggaggagctgcccccgccacccttaccccccgggtgggaagaaaaagtcgataacttaggcaggacgtattacgtcaatcacaataatcggaccacccaatggcaccgaccatccttgatggacgtgtctagcgagtctgataacaatataagacagattaaccaggaagccgcccatcgccggttcaggtccaggagacacatttccgaggatcttgagccagagccgtcagaaggcggagatgttccagagccctgggaaaccatttcggaggaggtgaacatcgccggagacagtctcggacttgccctgcctcctccacctgcctcccctggctctagaacctccccccaggagctgtcagaggaattatcccggcgcctccagattactcccgacagcaatggtgagcagtttagctccttgatccaaagggaacccagctcacggctgagatcctgcagcgtgactgacgccgtggccgaacaagggcaccttccaccaccctccgcccccgccgggcgggcccgctccagcactgtgaccggcggcgaggagccaacgccaagcgtcgcctatgtacacacaaccccaggactccccagcggctgggaggaacgaaaggatgctaaaggtcgaacctattatgttaatcacaataatagaacaacgacgtggacaaggcccattatgcagctggccgaagatggtgcctccggttcagcaactaacagtaataatcacctcatcgaacctcaaatacgcaggccgagaagccttagctctcccaccgtgactctgagtgccccccttgaaggcgcgaaggactccccggtcagaagggccgtgaaagataccttatcaaatcctcagtcacctcagccctcaccctacaatagtcctaagccccaacacaaggtgacacagtcatttttgccgcccggatgggagatgagaatagctccaaatgggcgtccctttttcatagatcacaacaccaagaccaccacctgggaggacccgcgattaaagttccccgttcatatgcggagcaaaactagcttaaatcccaacgatttggggccgctgcccccaggatgggaggagagaatccacttggacggaaggaccttctatatcgaccataactctaagatcacccagtgggaggatccaagactgcagaaccctgcgattaccggacccgccgttccttattccagagagtttaagcagaagtatgattacttccggaagaagttgaagaagccagcagacattcccaatcgtttcgaaatgaagctgcacaggaataatatcttcgaggagagctaccggcgcatcatgtctgtgaagaggcccgacgtgctgaaagcccgactatggatagagtttgagtctgagaagggactggactacggaggtgttgcccgggagtggttttttctgttaagtaaggagatgtttaacccttactacggattgtttgagtacagcgccactgataactatacgctgcagatcaatccaaattcagggttgtgtaatgaagaccaccttagctatttcaccttcatcggacgagttgccggcttagccgtgttccacggcaaactcctggatggattcttcatacgcccgttctataaaatgatgctcggtaaacagatcacgttaaacgacatggagagcgtcgactcagaatactataattctttgaaatggatcctggagaacgaccctacagagctggacctgatgttctgcatagacgaagaaaacttcggccagacctaccaggtcgacttgaagccaaatggaagcgagattatggtcaccaatgagaataagcgagagtatatcgatttggtcattcaatggcgcttcgtgaatagagtgcagaagcagatgaatgcatttttagaaggcttcacggaacttcttcctatagacttgattaaaatcttcgacgaaaatgaactggagcttctgatgtgcggcctgggagacgtggacgtgaatgactggaggcagcacagtatttataagaatgggtactgcccaaatcatcctgtgatacagtggttctggaaagcagtgttgctaatggacgctgagaaaaggattcgactccttcagtttgtgaccggcacctcgagagtccccatgaatgggttcgctgagctatatggtagtaatgggccccaactgttcactatcgagcagtgggggagtccggaaaagctgccgagggctcacacttgcttcaatagactcgacctgcctccctatgagacgtttgaggacttgagggaaaaactgttaatggccgtagaaaacgcccaggggtttgaaggcgttgattag

SEQ ID NO: 56778 - DNA, 2904 bp, Artificial Sequence
  derived and/or modified sequence
atgaggcggctggcctttgagcagggcgagagccgcatcctgcgggtgaaggtggtgtctggcatcgacctggccaagaaggacatctttggagccagtgacccctacgtgaagctgagcctgtatgtggctgatgagaaccgggagctggccctggtgcagaccaagaccatcaagaagaccctgaaccccaagtggaatgaggagttctacttccgggtgaaccccagcaaccaccggctgctgtttgaggtgtttgatgagaaccggctgaccagagatgacttcctgggccaggtggatgtgcccctgagccacctgcccacagaggaccccaccatggagcggccctacaccttcaaggacttcctgctgcggcccaggagccacaagagccgggtgaagggcttcctgcggctgaagatggcctacatgcccaagaatggaggccaggatgaggagaacagcgaccagagagatgacatggagcacggctgggaggtggtggacagcaatgacagcgccagccagcaccaggaggagctgcccccaccacccctgcccccaggctgggaggagaaggtggacaacctgggccgcacctactacgtgaaccacaacaacagaaccacccagtggcaccggcccagcctgatggatgtgtcctctgagagtgacaacaacatccggcagatcaaccaggaggccgcccaccggcgcttccgcagccgccgccacatcagcgaggacctggagcctgagcccagcgagggcggagatgtgcctgagccctgggagaccatcagcgaggaggtgaacattgctggggacagcctgggcctggccctgcccccacctccagccagccctggcagcaggaccagcccccaggagctgtctgaggagctgagccggcggctgcagatcaccccagacagcaatggagagcagttcagcagcctcatccagcgggagcccagcagccggctgcggagctgcagcgtgacagatgctgtggccgagcagggccacctgcccccaccttctgccccagctggccgggcccggagcagcacagtgactggaggagaggagcccaccccatctgtggcctacgtgcacaccaccccaggcctgcccagcggctgggaggagaggaaggatgccaagggccgcacctactacgtgaaccacaacaacagaaccaccacctggacccggcccatcatgcagctggccgaggatggagccagcggcagcgccaccaacagcaacaaccacctgattgagccccagatccggcggcccaggagcctgagcagccccaccgtgaccctgagcgcccccctggagggcgccaaggacagccctgtgagaagagctgtgaaggacaccctgagcaacccccagagcccccagcccagcccctacaacagccccaagccccagcacaaggtgacccagagcttcctgcccccaggctgggagatgagaattgcccccaacggccggcccttcttcatcgaccacaacaccaagaccaccacctgggaggacccccggctgaagtttcctgtgcacatgaggagcaagaccagcctgaaccccaatgacctgggccccctgcccccaggctgggaggagcgcatccacctggatggccgcaccttctacatcgaccacaacagcaagatcacccagtgggaggacccccggctgcagaacccagccatcactggacctgctgtgccctacagccgggagttcaagcagaagtatgactacttcaggaagaagctgaagaagccagctgacatccccaacagatttgagatgaagctgcacaggaacaacatctttgaggagagctaccgccgcatcatgtctgtgaagaggccagatgtgctgaaggcccggctgtggattgaatttgagagcgagaagggcctggactatggaggagtggcccgggagtggttcttcctgctgagcaaggagatgttcaacccctactacggcctgtttgagtacagcgccacagacaactacaccctgcagatcaaccccaacagcggcctgtgcaatgaagaccacctgagctacttcaccttcatcggccgggtggccggcctggccgtgttccacggcaagctgctggatggcttcttcatccggcccttctacaagatgatgctgggcaagcagatcaccctgaatgacatggagagcgtggacagcgagtactacaacagcctgaagtggatcctggagaatgaccccacagagctggacctgatgttctgcattgatgaggagaactttggccagacctaccaggtggacctgaagcccaatggaagtgagatcatggtgaccaatgaaaacaagcgggagtacatcgacctggtgatccagtggaggtttgtgaacagagtgcagaagcagatgaatgccttcctggagggcttcacagagctgctgcccatcgacctgatcaagatctttgatgaaaatgagctggagctgctgatgtgtggcctgggagatgtggatgtgaatgactggaggcagcacagcatctacaagaatggctactgccccaaccaccctgtgatccagtggttctggaaggctgtgctgctgatggatgctgagaagaggatccggctgctgcagtttgtgacaggcaccagccgggtgcccatgaatggatttgctgagctgtatggcagcaatggcccccagctgttcaccatcgagcagtggggcagccctgagaagctgccccgggcccacacctgcttcaaccggctggacctgcccccctatgagacctttgaggacctgcgggagaagctgctgatggctgtggagaatgcccagggctttgaaggagtggactag

SEQ ID NO: 56779 - DNA, 2904 bp, Artificial Sequence
  derived and/or modified sequence
atgcggcggctggccttcgagcagggcgagagccggatcctgcgggtcaaagtggtgtctggtatcgacctggccaagaaggatattttcggcgcctctgacccttacgtcaaactgtctttgtacgtagccgatgaaaatagagaacttgccttagtgcagacgaagacgataaagaaaaccctgaatcctaaatggaatgaagaattttactttcgcgtgaatccaagcaaccaccgattactgttcgaagttttcgacgagaatcggctgaccagggatgactttctcggccaggtcgatgttccgttgagccacctccccactgaagatccaacaatggagcgcccgtacactttcaaagatttcctcctcagaccacggagtcacaagtctcgtgtgaaaggattcttaaggctgaagatggcctatatgccaaagaacggcggccaagacgaggaaaatagtgaccagagggacgatatggaacatggctgggaagtagtggatagcaacgactccgctagccagcatcaggaagagctcccacctccccccctaccaccaggctgggaagaaaaggtcgataatctcggaaggacttattatgttaaccacaataatcgaaccacccagtggcatcgaccaagtctgatggatgtttcatcagagtctgacaataatataagacagattaatcaggaggcagcccatcgacgtttccgcagccgtcggcatatctcagaggacctggagcctgaaccctctgagggtggtgatgtccctgagccatgggaaactatctctgaggaggtgaatatcgctggtgactcccttggactggccttgccgcctcctccagcatctccggggtctcgaacctccccacaagagctcagcgaagagctttcaaggcgactgcagatcactcctgactccaacggagaacaattcagtagcctaatacagagagagcccagctcccgcctgagaagttgctcagtgaccgatgctgtcgccgaacagggccacctaccgccacctagtgctccagccggacgcgctcgctcctctaccgtcaccggtggcgaagaacccaccccaagcgtcgcctacgtgcataccactcccgggcttcctagcgggtgggaggagcgcaaggacgcaaagggccggacttactacgtaaatcataataatcgcacaactacatggacacgcccaattatgcagctcgctgaggacggggccagtggtagcgccaccaactctaacaaccatctgattgagccacagattagaaggccccgatcactgagctcaccaaccgtgactctgtctgcgcccctggagggagcaaaagattcccccgtccggagggcagtcaaggacacattgtcaaaccctcaaagcccccagccatctccttataatagcccaaagccacagcacaaagtcactcagtcattcctgccccctggctgggagatgcggatcgcccctaacgggcggcctttcttcattgatcacaatacaaagaccactacttgggaagatccacggcttaagttcccagtgcatatgcggtccaagacgtctctcaaccccaatgatctggggcctctcccccccgggtgggaagagcgcatccacctggatggaagaacattttacatcgatcacaatagtaagattacccaatgggaagacccccgcctgcagaaccccgctattacagggcctgcggtgccctacagccgtgaattcaaacaaaaatatgattactttcggaaaaaattgaaaaagccagctgacatccccaatcggtttgagatgaaactgcatcggaacaatattttcgaggagtcttaccggcgcataatgtcggtaaagagaccggacgtcctcaaagccaggctgtggattgagttcgaatccgaaaaaggcctggattatggaggagttgcacgtgagtggttttttttgctctctaaggagatgttcaacccttattatgggttattcgagtacagcgctactgacaattatacactacagatcaaccctaacagcggattgtgcaatgaggatcacctgagttactttacctttatcggtagggtagccggactcgcagtgtttcacgggaaattattggacggattttttattcggcccttctacaaaatgatgctgggtaagcagatcacactgaatgacatggagtccgttgatagtgaatactataattctcttaaatggattctggaaaacgatccgaccgagcttgatttgatgttttgtattgatgaagagaactttggccaaacataccaagtggaccttaaacctaatggctccgagatcatggtgacgaacgagaacaaacgggaatacatagatttggtgatccagtggagattcgtgaaccgcgtgcaaaagcagatgaacgcgttcctggaagggttcaccgagctactgccgatcgacctgataaaaatattcgatgaaaatgaactcgagctactgatgtgtgggttgggcgatgtcgacgtgaacgattggaggcagcatagcatttataaaaatggctactgtccaaatcacccagtaattcagtggttttggaaggcagttctgctgatggacgcggaaaaacgaattaggcttctgcagttcgttaccggtacatcacgcgtgcccatgaatggatttgcagagctctacgggagcaacgggccccagctgtttaccatagaacagtggggctcaccagagaaattaccccgcgcgcacacatgttttaaccgcctggatctgccaccctatgagacgttcgaggatctgagagagaagctcttgatggctgtggagaacgcccagggctttgaaggggtggactag

SEQ ID NO: 56780 - DNA, 8378 bp, Artificial Sequence
  derived and/or modified sequence
gccatttccagagaggaacaaccgtgtagactgctttcctgggagtcaagttaaaacttctctcctgtgaccttgtcacccggcagtggaaagttacccttggctgcagccacgacttccgcatactcttcagaacttgctctgcccttgagttttccagctttcctttaatgcactaaacctttaatattgtattctcctaaatgagacgtctcgcatttgagcagggagagtcccgtattctcagagtaaaagttgtttctggaattgatctcgccaaaaaggacatctttggagccagtgatccgtatgtgaaactttcattgtacgtagcggatgagaatagagaacttgctttggtccagacaaaaacaattaaaaagacactgaacccaaaatggaatgaagaattttatttcagggtaaacccatctaatcacagactcctatttgaagtatttgacgaaaatagactgacacgagacgacttcctgggccaggtggacgtgccccttagtcaccttccgacagaagatccaaccatggagcgaccctatacatttaaggactttctcctcagaccaagaagtcataagtctcgagttaagggatttttgcgattgaaaatggcctatatgccaaaaaatggaggtcaagatgaagaaaacagtgaccagagggatgacatggagcatggatgggaagttgttgactcaaatgactcggcttctcagcaccaagaggaacttcctcctcctcctctgcctcccgggtgggaagaaaaagtggacaatttaggccgaacttactatgtcaaccacaacaaccggaccactcagtggcacagaccaagcctgatggacgtgtcctcggagtcggacaataacatcagacagatcaaccaggaggcagcacaccggcgcttccgctcccgcaggcacatcagcgaagacttggagcccgagccctcggagggcggggatgtccccgagccttgggagaccatttcagaggaagtgaatatcgctggagactctctcggtctggctctgcccccaccaccggcctccccaggatctcggaccagccctcaggagctgtcagaggaactaagcagaaggcttcagatcactccagactccaatggggaacagttcagctctttgattcaaagagaaccctcctcaaggttgaggtcatgcagtgtcaccgacgcagttgcagaacagggccatctaccaccgcccagtgccccagctgggagagcgcgttcatcaactgtcacgggtggtgaggaaccaacgccatcagtggcctatgtacataccacgccgggtctgccttcaggctgggaagaaagaaaagatgctaaggggcgcacatactatgtcaatcataacaatcgaaccacaacttggactcgacctatcatgcagcttgcagaagatggtgcgtccggatcagccacaaacagtaacaaccatctaatcgagcctcagatccgccggcctcgtagcctcagctcgccaacagtaactttatctgccccgctggagggtgccaaggactcacccgtacgtcgggctgtgaaagacaccctttccaacccacagtccccacagccatcaccttacaactcccccaaaccacaacacaaagtcacacagagcttcttgccacccggctgggaaatgaggatagcgccaaacggccggcccttcttcattgatcataacacaaagactacaacctgggaagatccacgtttgaaatttccagtacatatgcggtcaaagacatctttaaaccccaatgaccttggcccccttcctcctggctgggaagaaagaattcacttggatggccgaacgttttatattgatcataatagcaaaattactcagtgggaagacccaagactgcagaacccagctattactggtccggctgtcccttactccagagaatttaagcagaaatatgactacttcaggaagaaattaaagaaacctgctgatatccccaataggtttgaaatgaaacttcacagaaataacatatttgaagagtcctatcggagaattatgtccgtgaaaagaccagatgtcctaaaagctagactgtggattgagtttgaatcagagaaaggtcttgactatgggggtgtggccagagaatggttcttcttactgtccaaagagatgttcaacccctactacggcctctttgagtactctgccacggacaactacacccttcagatcaaccctaattcaggcctctgtaatgaggatcatttgtcctacttcacttttattggaagagttgctggtctggccgtatttcatgggaagctcttagatggtttcttcattagaccattttacaagatgatgttgggaaagcagataaccctgaatgacatggaatctgtggatagtgaatattacaactctttgaaatggatcctggagaatgaccctactgagctggacctcatgttctgcatagacgaagaaaactttggacagacatatcaagtggatttgaagcccaatgggtcagaaataatggtcacaaatgaaaacaaaagggaatatatcgacttagtcatccagtggagatttgtgaacagggtccagaagcagatgaacgccttcttggagggattcacagaactacttcctattgatttgattaaaatttttgatgaaaatgagctggagttgctcatgtgcggcctcggtgatgtggatgtgaatgactggagacagcattctatttacaagaacggctactgcccaaaccaccccgtcattcagtggttctggaaggctgtgctactcatggacgccgaaaagcgtatccggttactgcagtttgtcacagggacatcgcgagtacctatgaatggatttgccgaactttatggttccaatggtcctcagctgtttacaatagagcaatggggcagtcctgagaaactgcccagagctcacacatgctttaatcgccttgacttacctccatatgaaacctttgaagatttacgagagaaacttctcatggccgtggaaaatgctcaaggatttgaaggggtggattaagcaccctgtgcctcgggggtggttgttcttcaagcaagttctgcttgcacttttgcatttgcctaacagacttttgcagaggcgatggcagagagcagctgcaggcatggtccctggagccgagccttcaccacgcactcgtccaagttcggatgcgggaacctggtcccagcttgagttcctgcctttcccaccacaaattatcaactggttgatgtgtacactaattacatttcaggaggacttaatgctatttatgttgtgcctctgcaggcaaagcccttaataaatattttacatcctttctaatgacaatgaatggaattaatcactcaacaggtatagtattacgactcatgtttactttttaaaatgatttagaccgattttcagattttatttcgttatgattaaagatgtctcatgtacttggaaaagtgagcattttttttttttttgtatttcactttcataccaggcttaatgtcaatgacatttttatttttgaagtactctgacacctccaccctctactttattagaattggaaggcaaatttttgtccaaaaacctacagacaagtactttgagagaatttccaatataatattagacataatgataattttttccatactcagaatgaaaaactggatattacgtttttgttttggggtttttttgtacaaatttagctaatagctacaggctgagagaattgtaacatagcatgacaaattttgtgttgacttgaaaggaatcacaccattattccttagaagtaattacatgtgttctaacacatttgagacagggttggactcccatttctcatccgagaaattacttaacccttcctggcgctgtacagtcatcttttattctatttcctctttgctgtttgtagtagagacattttgaatgaaacttggcactgcttgattcaaaactgtggaaaccagatctgtttagtctcctgtttgtatgcgtttgctaatggtagctaaataaccagtttttgttgtaaatgcaccaattctgaaggcactttatgtactacatggaggtcatatctggttttgtttttatttttttatcatgaacattaaatgtgatgatgatttcttttccctgcacacatctttccggtgcaatatctatcaattgtgaatctggctgctggtgtataaaaacctggatgtaaagctgagcctacagacctgtcctcaccaactgttttgtgatttctactcaactacaaagatttatttaatgtactcttaatctaactgagttttgttaccaatgacctgttgcatgcttcaataccgtgtactgcctgagttgtgcctcttgtgtgctagattaaaagtgagacagagacttgacttgatcctctgagctcaagctattgagctggtagtggcagaggactgagggtacctgcacagtttgattcttttccacgtgtaagtctccattgcagaattgtcgtgctttgagaaaacacctgaggcagtgtgggagttgaacgaccctgctgtcctttttaacctgtgttgtcctagaccctgtcggggcagtcaggggacactagagatttgatctcatgcgagtcatcaataggacaaaaaagttgtggtttggggaggtctgtttgttacataaaaaggacctttcggtgtaagaaattgccgtttttaccctgccctggctggcatgtgagaagccatggaaggttgtggttgtaaatgagttgtctaaaggggtgcagaggcctgaggtttctaaaagaaggtagatttctacagagctgagtgttggttcctttttcttattggttgaaaattacctggtagtgatcagaaaacttagatgctatgtaactaaaaaaaaaaaaaaaaaaaaaaaaaaaaaaaaaaaaattcccgctcatgagttttgactattggtgagatgttttccgctacagttaacatgacaaatgtctcagtggcaaaaatcccctttttgtaagcccccatagtctagaggcagttttctttttaagaatcatgccagagcctgagtcgagcagtatgctttcttggtttttgagagtaattgtgtaattgtagagggagaaatccaattctaacctaagaactgggattcttctgtcatcttgtaaaccgtatattgaaaaaaacagaatgtcactaaatgcatattaagtcaagtattggaaagtataaaagaaaaatcattctgacaatttctaagccagaagcaaacaagaattactgaaatctaccccatgaatacttggaaggcagtaattgtgagtgacacctcagttcatcaaccccttaataatatcagcttaattttaatgacaactaaatatgctgaagtgaggatttagtattttttaaaaaagcaaaacaaggttcagtagtcctcagcaattctccaagtttctctctttgcctaaaatggtcatagatcttgatttctctgaatcgtgatgaccacacccagtcatcttcacagcataattgcaggtggcagtaaagagagtgtgctgggtaaggagcagttgctgggtcattccttgggccccgacctgcccggggagtagccctgggggagagagggcagtgttgcctatcccagaggtcccagcagtcacactgctctgcaggccgggctctctttatagccagagaaatcaccttaatgcagtctctttagttgtctgctgaagctgtagttattatgggccacttacatgaggctgagaagtacgtgccggagctcacacactgcctgttgcggttctcttaacatcagttatcacagctgcctgtgggtcccgggtatttccattcctgccccttgttggcccgaggaaggatgtggaaagagcacctggtgggatgaaggtccaacagcctgtgcctctccactgctggccctggagccggcagcagtgaggcattcattgtctgtgttgcggtgtattcccagcttcagtgctcttttcctttttgcctgaaatgtttatgcttctctgcagccagtcctctaacaaatctcaagaacaaaggtaagacacttggtttttgtttccaggacccttcagaaggtgacatcagatattccctaaattcagacaatgagggatacagagcgacttggcatgtattatttctcccatgtaaggacaaagggacagattattattgttatttctgagacagagtcttgctctgtagctcaggctggagtgcagtggctcaatctcagctcaccacaacctctgcctcctggcttcaagcgattcttctgcctcagcctccccgaatagttgggattacaggcacccaccaccacgcctggctaatttttgtatttttagtagagatggtttcaccatgctggccaggctggtcttgaactcctgacctcaggtgatcctcccgcctcagccttccaaagtgctgggattacaagcatgagccaccgcacccggcctcacagtgacagattctgagaaacagcatgcaaaacatttgaaccattttctacatctcccattgttgcatagagagtgtgcaccgctgctatcttgccagatccacactggtcctcccgaaagccaggttcatacacagcaactttttaattattctaacagttacccattaacagtcgactcctgtatttctgagagtcttgtactcacctctgaaatttaaaaacgtataaagagagcctgggttaatcagttctgcagcccctacgtgacactgtgctagttctccttcttctgtctcctccttaccctggccctgcacccctgtacttaagagggagaggtgggaggtgctgtctggtatcatttgctgcctcgccagtagagggtgccgctgtgcagggtaactgcccgcctgctcccttcctgacctcccctgaccccgaagatcactacctctgtcattcaggcattggggtacatcctgataagtcgtgtcagaactgccaatttcaggactgagatgtgtttttaaaaaacaaatccttataaactccactttgtactttagattttaaaactggggaaaaatgtgatattctttggaccacttttttaatttatataagccttaatgaacagtgtctatacatttgcatacacacacccccaccccagagtgttctcagtatgtcagagaaagtgccacagcattaggacgggagcttggagaacgttttctagaaaagggttagcttcctgttggcatgaaattttccaagcaaacctcattaaacatctgttgtttgttaaagatgttccactgaaagcaacgcatgtttcaaaggcacgtctttccgttcgttggttttctgtgtgtaaggagtagcattgctgttggcgcctaacctcgcgtgcactgcattctcaaccccgtaccagtgcatcatcagaagccttcctcgtgaccataactctgtgtctgcagatatgtgttcccgtgtaagccagttttccccttttactcagactgatttcacctagattgtcacggtttccttcatgttaactttgcgtgactttgttcttcctttactactctgtatgtaatatatatacatatatacgtacatatgctgtccaaatatatttgtatatatttgtatagcatttttacacctttattgagtaatctggtttcgaaaggaggtgagagtttagtcccttctgcagttttctccaagctgtgtcctgtgaatttcaacccttggagcctaagaaaaccctaggaagatgatgttaatttgctgtcatttcctaattcaggatctatcatcaaatgaaacatgaaaaaaacagtgacttttaaggtgaaaagagtttcaagcattccaaataaattatcaatgtttcataactttttattataaacccacctcctaataggaagccaagtactatttgatacagtggtaaaaaccaaactaccttgaatttttttaaggcaacttatgaataatgctcattttcacagtcagaatagctttaaaatatggttgaatttgatacacacaggaagttttcttgaagaacaatcctttcgcttttcttttttcttgagagatctaaagagaaactgtagattgttttcctgacagcaaaagactaatgtgacaaaatgaagtcattgtaaagaagcgatgcaacttgtcaaatatttaataaagaattatggaagctggaacattttctac

SEQ ID NO: 56781 - DNA, 8300 bp, Artificial Sequence
  derived and/or modified sequence
atcagtataagtagcgagctgggcgcattccttctcagttgtgttaaaacttgctggtattcccccggtatcagcagaggtgtgtacgggcactgctttaaaactgggaaggaggaagacgaggccagggagccggagggtcaccaaggtagatttccagcagcgctagtccagctgaacactttccagccttgtttttcagcagctttgaggaaaagtatagtgatccgtatgtgaaactttcattgtacgtagcggatgagaatagagaacttgctttggtccagacaaaaacaattaaaaagacactgaacccaaaatggaatgaagaattttatttcagggtaaacccatctaatcacagactcctatttgaagtatttgacgaaaatagactgacacgagacgacttcctgggccaggtggacgtgccccttagtcaccttccgacagaagatccaaccatggagcgaccctatacatttaaggactttctcctcagaccaagaagtcataagtctcgagttaagggatttttgcgattgaaaatggcctatatgccaaaaaatggaggtcaagatgaagaaaacagtgaccagagggatgacatggagcatggatgggaagttgttgactcaaatgactcggcttctcagcaccaagaggaacttcctcctcctcctctgcctcccgggtgggaagaaaaagtggacaatttaggccgaacttactatgtcaaccacaacaaccggaccactcagtggcacagaccaagcctgatggacgtgtcctcggagtcggacaataacatcagacagatcaaccaggaggcagcacaccggcgcttccgctcccgcaggcacatcagcgaagacttggagcccgagccctcggagggcggggatgtccccgagccttgggagaccatttcagaggaagtgaatatcgctggagactctctcggtctggctctgcccccaccaccggcctccccaggatctcggaccagccctcaggagctgtcagaggaactaagcagaaggcttcagatcactccagactccaatggggaacagttcagctctttgattcaaagagaaccctcctcaaggttgaggtcatgcagtgtcaccgacgcagttgcagaacagggccatctaccaccgcccagtgccccagctgggagagcgcgttcatcaactgtcacgggtggtgaggaaccaacgccatcagtggcctatgtacataccacgccgggtctgccttcaggctgggaagaaagaaaagatgctaaggggcgcacatactatgtcaatcataacaatcgaaccacaacttggactcgacctatcatgcagcttgcagaagatggtgcgtccggatcagccacaaacagtaacaaccatctaatcgagcctcagatccgccggcctcgtagcctcagctcgccaacagtaactttatctgccccgctggagggtgccaaggactcacccgtacgtcgggctgtgaaagacaccctttccaacccacagtccccacagccatcaccttacaactcccccaaaccacaacacaaagtcacacagagcttcttgccacccggctgggaaatgaggatagcgccaaacggccggcccttcttcattgatcataacacaaagactacaacctgggaagatccacgtttgaaatttccagtacatatgcggtcaaagacatctttaaaccccaatgaccttggcccccttcctcctggctgggaagaaagaattcacttggatggccgaacgttttatattgatcataatagcaaaattactcagtgggaagacccaagactgcagaacccagctattactggtccggctgtcccttactccagagaatttaagcagaaatatgactacttcaggaagaaattaaagaaacctgctgatatccccaataggtttgaaatgaaacttcacagaaataacatatttgaagagtcctatcggagaattatgtccgtgaaaagaccagatgtcctaaaagctagactgtggattgagtttgaatcagagaaaggtcttgactatgggggtgtggccagagaatggttcttcttactgtccaaagagatgttcaacccctactacggcctctttgagtactctgccacggacaactacacccttcagatcaaccctaattcaggcctctgtaatgaggatcatttgtcctacttcacttttattggaagagttgctggtctggccgtatttcatgggaagctcttagatggtttcttcattagaccattttacaagatgatgttgggaaagcagataaccctgaatgacatggaatctgtggatagtgaatattacaactctttgaaatggatcctggagaatgaccctactgagctggacctcatgttctgcatagacgaagaaaactttggacagacatatcaagtggatttgaagcccaatgggtcagaaataatggtcacaaatgaaaacaaaagggaatatatcgacttagtcatccagtggagatttgtgaacagggtccagaagcagatgaacgccttcttggagggattcacagaactacttcctattgatttgattaaaatttttgatgaaaatgagctggagttgctcatgtgcggcctcggtgatgtggatgtgaatgactggagacagcattctatttacaagaacggctactgcccaaaccaccccgtcattcagtggttctggaaggctgtgctactcatggacgccgaaaagcgtatccggttactgcagtttgtcacagggacatcgcgagtacctatgaatggatttgccgaactttatggttccaatggtcctcagctgtttacaatagagcaatggggcagtcctgagaaactgcccagagctcacacatgctttaatcgccttgacttacctccatatgaaacctttgaagatttacgagagaaacttctcatggccgtggaaaatgctcaaggatttgaaggggtggattaagcaccctgtgcctcgggggtggttgttcttcaagcaagttctgcttgcacttttgcatttgcctaacagacttttgcagaggcgatggcagagagcagctgcaggcatggtccctggagccgagccttcaccacgcactcgtccaagttcggatgcgggaacctggtcccagcttgagttcctgcctttcccaccacaaattatcaactggttgatgtgtacactaattacatttcaggaggacttaatgctatttatgttgtgcctctgcaggcaaagcccttaataaatattttacatcctttctaatgacaatgaatggaattaatcactcaacaggtatagtattacgactcatgtttactttttaaaatgatttagaccgattttcagattttatttcgttatgattaaagatgtctcatgtacttggaaaagtgagcattttttttttttttgtatttcactttcataccaggcttaatgtcaatgacatttttatttttgaagtactctgacacctccaccctctactttattagaattggaaggcaaatttttgtccaaaaacctacagacaagtactttgagagaatttccaatataatattagacataatgataattttttccatactcagaatgaaaaactggatattacgtttttgttttggggtttttttgtacaaatttagctaatagctacaggctgagagaattgtaacatagcatgacaaattttgtgttgacttgaaaggaatcacaccattattccttagaagtaattacatgtgttctaacacatttgagacagggttggactcccatttctcatccgagaaattacttaacccttcctggcgctgtacagtcatcttttattctatttcctctttgctgtttgtagtagagacattttgaatgaaacttggcactgcttgattcaaaactgtggaaaccagatctgtttagtctcctgtttgtatgcgtttgctaatggtagctaaataaccagtttttgttgtaaatgcaccaattctgaaggcactttatgtactacatggaggtcatatctggttttgtttttatttttttatcatgaacattaaatgtgatgatgatttcttttccctgcacacatctttccggtgcaatatctatcaattgtgaatctggctgctggtgtataaaaacctggatgtaaagctgagcctacagacctgtcctcaccaactgttttgtgatttctactcaactacaaagatttatttaatgtactcttaatctaactgagttttgttaccaatgacctgttgcatgcttcaataccgtgtactgcctgagttgtgcctcttgtgtgctagattaaaagtgagacagagacttgacttgatcctctgagctcaagctattgagctggtagtggcagaggactgagggtacctgcacagtttgattcttttccacgtgtaagtctccattgcagaattgtcgtgctttgagaaaacacctgaggcagtgtgggagttgaacgaccctgctgtcctttttaacctgtgttgtcctagaccctgtcggggcagtcaggggacactagagatttgatctcatgcgagtcatcaataggacaaaaaagttgtggtttggggaggtctgtttgttacataaaaaggacctttcggtgtaagaaattgccgtttttaccctgccctggctggcatgtgagaagccatggaaggttgtggttgtaaatgagttgtctaaaggggtgcagaggcctgaggtttctaaaagaaggtagatttctacagagctgagtgttggttcctttttcttattggttgaaaattacctggtagtgatcagaaaacttagatgctatgtaactaaaaaaaaaaaaaaaaaaaaaaaaaaaaaaaaaaaaattcccgctcatgagttttgactattggtgagatgttttccgctacagttaacatgacaaatgtctcagtggcaaaaatcccctttttgtaagcccccatagtctagaggcagttttctttttaagaatcatgccagagcctgagtcgagcagtatgctttcttggtttttgagagtaattgtgtaattgtagagggagaaatccaattctaacctaagaactgggattcttctgtcatcttgtaaaccgtatattgaaaaaaacagaatgtcactaaatgcatattaagtcaagtattggaaagtataaaagaaaaatcattctgacaatttctaagccagaagcaaacaagaattactgaaatctaccccatgaatacttggaaggcagtaattgtgagtgacacctcagttcatcaaccccttaataatatcagcttaattttaatgacaactaaatatgctgaagtgaggatttagtattttttaaaaaagcaaaacaaggttcagtagtcctcagcaattctccaagtttctctctttgcctaaaatggtcatagatcttgatttctctgaatcgtgatgaccacacccagtcatcttcacagcataattgcaggtggcagtaaagagagtgtgctgggtaaggagcagttgctgggtcattccttgggccccgacctgcccggggagtagccctgggggagagagggcagtgttgcctatcccagaggtcccagcagtcacactgctctgcaggccgggctctctttatagccagagaaatcaccttaatgcagtctctttagttgtctgctgaagctgtagttattatgggccacttacatgaggctgagaagtacgtgccggagctcacacactgcctgttgcggttctcttaacatcagttatcacagctgcctgtgggtcccgggtatttccattcctgccccttgttggcccgaggaaggatgtggaaagagcacctggtgggatgaaggtccaacagcctgtgcctctccactgctggccctggagccggcagcagtgaggcattcattgtctgtgttgcggtgtattcccagcttcagtgctcttttcctttttgcctgaaatgtttatgcttctctgcagccagtcctctaacaaatctcaagaacaaaggtaagacacttggtttttgtttccaggacccttcagaaggtgacatcagatattccctaaattcagacaatgagggatacagagcgacttggcatgtattatttctcccatgtaaggacaaagggacagattattattgttatttctgagacagagtcttgctctgtagctcaggctggagtgcagtggctcaatctcagctcaccacaacctctgcctcctggcttcaagcgattcttctgcctcagcctccccgaatagttgggattacaggcacccaccaccacgcctggctaatttttgtatttttagtagagatggtttcaccatgctggccaggctggtcttgaactcctgacctcaggtgatcctcccgcctcagccttccaaagtgctgggattacaagcatgagccaccgcacccggcctcacagtgacagattctgagaaacagcatgcaaaacatttgaaccattttctacatctcccattgttgcatagagagtgtgcaccgctgctatcttgccagatccacactggtcctcccgaaagccaggttcatacacagcaactttttaattattctaacagttacccattaacagtcgactcctgtatttctgagagtcttgtactcacctctgaaatttaaaaacgtataaagagagcctgggttaatcagttctgcagcccctacgtgacactgtgctagttctccttcttctgtctcctccttaccctggccctgcacccctgtacttaagagggagaggtgggaggtgctgtctggtatcatttgctgcctcgccagtagagggtgccgctgtgcagggtaactgcccgcctgctcccttcctgacctcccctgaccccgaagatcactacctctgtcattcaggcattggggtacatcctgataagtcgtgtcagaactgccaatttcaggactgagatgtgtttttaaaaaacaaatccttataaactccactttgtactttagattttaaaactggggaaaaatgtgatattctttggaccacttttttaatttatataagccttaatgaacagtgtctatacatttgcatacacacacccccaccccagagtgttctcagtatgtcagagaaagtgccacagcattaggacgggagcttggagaacgttttctagaaaagggttagcttcctgttggcatgaaattttccaagcaaacctcattaaacatctgttgtttgttaaagatgttccactgaaagcaacgcatgtttcaaaggcacgtctttccgttcgttggttttctgtgtgtaaggagtagcattgctgttggcgcctaacctcgcgtgcactgcattctcaaccccgtaccagtgcatcatcagaagccttcctcgtgaccataactctgtgtctgcagatatgtgttcccgtgtaagccagttttccccttttactcagactgatttcacctagattgtcacggtttccttcatgttaactttgcgtgactttgttcttcctttactactctgtatgtaatatatatacatatatacgtacatatgctgtccaaatatatttgtatatatttgtatagcatttttacacctttattgagtaatctggtttcgaaaggaggtgagagtttagtcccttctgcagttttctccaagctgtgtcctgtgaatttcaacccttggagcctaagaaaaccctaggaagatgatgttaatttgctgtcatttcctaattcaggatctatcatcaaatgaaacatgaaaaaaacagtgacttttaaggtgaaaagagtttcaagcattccaaataaattatcaatgtttcataactttttattataaacccacctcctaataggaagccaagtactatttgatacagtggtaaaaaccaaactaccttgaatttttttaaggcaacttatgaataatgctcattttcacagtcagaatagctttaaaatatggttgaatttgatacacacaggaagttttcttgaagaacaatcctttcgcttttcttttttcttgagagatctaaagagaaactgtagattgttttcctgacagcaaaagactaatgtgacaaaatgaagtcattgtaaagaagcgatgcaacttgtcaaatatttaataaagaattatggaagctggaacattttctac

SEQ ID NO: 56782 - DNA, 8436 bp, Artificial Sequence
  derived and/or modified sequence
attttgaccgctatttagaagagtgacctcataaatcttttagcaaagtagacacacatacctaccacatttcttaaaagtagattcgtattttgatttgagattgttgaaaagcatggtatgtttggagtgcacttagttatgtcccatctcataaagactgttgagctctctgcactgctgatgatgaagcattgcatgaacccagaaaacggggatgccaaagcacagggcttaggtgctgttccttgcgtcatcagcagaggtctgtccactttgtagaagggagagtcccgtattctcagagtaaaagttgtttctggaattgatctcgccaaaaaggacatctttggagccagtgatccgtatgtgaaactttcattgtacgtagcggatgagaatagagaacttgctttggtccagacaaaaacaattaaaaagacactgaacccaaaatggaatgaagaattttatttcagggtaaacccatctaatcacagactcctatttgaagtatttgacgaaaatagactgacacgagacgacttcctgggccaggtggacgtgccccttagtcaccttccgacagaagatccaaccatggagcgaccctatacatttaaggactttctcctcagaccaagaagtcataagtctcgagttaagggatttttgcgattgaaaatggcctatatgccaaaaaatggaggtcaagatgaagaaaacagtgaccagagggatgacatggagcatggatgggaagttgttgactcaaatgactcggcttctcagcaccaagaggaacttcctcctcctcctctgcctcccgggtgggaagaaaaagtggacaatttaggccgaacttactatgtcaaccacaacaaccggaccactcagtggcacagaccaagcctgatggacgtgtcctcggagtcggacaataacatcagacagatcaaccaggaggcagcacaccggcgcttccgctcccgcaggcacatcagcgaagacttggagcccgagccctcggagggcggggatgtccccgagccttgggagaccatttcagaggaagtgaatatcgctggagactctctcggtctggctctgcccccaccaccggcctccccaggatctcggaccagccctcaggagctgtcagaggaactaagcagaaggcttcagatcactccagactccaatggggaacagttcagctctttgattcaaagagaaccctcctcaaggttgaggtcatgcagtgtcaccgacgcagttgcagaacagggccatctaccaccgcccagtgccccagctgggagagcgcgttcatcaactgtcacgggtggtgaggaaccaacgccatcagtggcctatgtacataccacgccgggtctgccttcaggctgggaagaaagaaaagatgctaaggggcgcacatactatgtcaatcataacaatcgaaccacaacttggactcgacctatcatgcagcttgcagaagatggtgcgtccggatcagccacaaacagtaacaaccatctaatcgagcctcagatccgccggcctcgtagcctcagctcgccaacagtaactttatctgccccgctggagggtgccaaggactcacccgtacgtcgggctgtgaaagacaccctttccaacccacagtccccacagccatcaccttacaactcccccaaaccacaacacaaagtcacacagagcttcttgccacccggctgggaaatgaggatagcgccaaacggccggcccttcttcattgatcataacacaaagactacaacctgggaagatccacgtttgaaatttccagtacatatgcggtcaaagacatctttaaaccccaatgaccttggcccccttcctcctggctgggaagaaagaattcacttggatggccgaacgttttatattgatcataatagcaaaattactcagtgggaagacccaagactgcagaacccagctattactggtccggctgtcccttactccagagaatttaagcagaaatatgactacttcaggaagaaattaaagaaacctgctgatatccccaataggtttgaaatgaaacttcacagaaataacatatttgaagagtcctatcggagaattatgtccgtgaaaagaccagatgtcctaaaagctagactgtggattgagtttgaatcagagaaaggtcttgactatgggggtgtggccagagaatggttcttcttactgtccaaagagatgttcaacccctactacggcctctttgagtactctgccacggacaactacacccttcagatcaaccctaattcaggcctctgtaatgaggatcatttgtcctacttcacttttattggaagagttgctggtctggccgtatttcatgggaagctcttagatggtttcttcattagaccattttacaagatgatgttgggaaagcagataaccctgaatgacatggaatctgtggatagtgaatattacaactctttgaaatggatcctggagaatgaccctactgagctggacctcatgttctgcatagacgaagaaaactttggacagacatatcaagtggatttgaagcccaatgggtcagaaataatggtcacaaatgaaaacaaaagggaatatatcgacttagtcatccagtggagatttgtgaacagggtccagaagcagatgaacgccttcttggagggattcacagaactacttcctattgatttgattaaaatttttgatgaaaatgagctggagttgctcatgtgcggcctcggtgatgtggatgtgaatgactggagacagcattctatttacaagaacggctactgcccaaaccaccccgtcattcagtggttctggaaggctgtgctactcatggacgccgaaaagcgtatccggttactgcagtttgtcacagggacatcgcgagtacctatgaatggatttgccgaactttatggttccaatggtcctcagctgtttacaatagagcaatggggcagtcctgagaaactgcccagagctcacacatgctttaatcgccttgacttacctccatatgaaacctttgaagatttacgagagaaacttctcatggccgtggaaaatgctcaaggatttgaaggggtggattaagcaccctgtgcctcgggggtggttgttcttcaagcaagttctgcttgcacttttgcatttgcctaacagacttttgcagaggcgatggcagagagcagctgcaggcatggtccctggagccgagccttcaccacgcactcgtccaagttcggatgcgggaacctggtcccagcttgagttcctgcctttcccaccacaaattatcaactggttgatgtgtacactaattacatttcaggaggacttaatgctatttatgttgtgcctctgcaggcaaagcccttaataaatattttacatcctttctaatgacaatgaatggaattaatcactcaacaggtatagtattacgactcatgtttactttttaaaatgatttagaccgattttcagattttatttcgttatgattaaagatgtctcatgtacttggaaaagtgagcattttttttttttttgtatttcactttcataccaggcttaatgtcaatgacatttttatttttgaagtactctgacacctccaccctctactttattagaattggaaggcaaatttttgtccaaaaacctacagacaagtactttgagagaatttccaatataatattagacataatgataattttttccatactcagaatgaaaaactggatattacgtttttgttttggggtttttttgtacaaatttagctaatagctacaggctgagagaattgtaacatagcatgacaaattttgtgttgacttgaaaggaatcacaccattattccttagaagtaattacatgtgttctaacacatttgagacagggttggactcccatttctcatccgagaaattacttaacccttcctggcgctgtacagtcatcttttattctatttcctctttgctgtttgtagtagagacattttgaatgaaacttggcactgcttgattcaaaactgtggaaaccagatctgtttagtctcctgtttgtatgcgtttgctaatggtagctaaataaccagtttttgttgtaaatgcaccaattctgaaggcactttatgtactacatggaggtcatatctggttttgtttttatttttttatcatgaacattaaatgtgatgatgatttcttttccctgcacacatctttccggtgcaatatctatcaattgtgaatctggctgctggtgtataaaaacctggatgtaaagctgagcctacagacctgtcctcaccaactgttttgtgatttctactcaactacaaagatttatttaatgtactcttaatctaactgagttttgttaccaatgacctgttgcatgcttcaataccgtgtactgcctgagttgtgcctcttgtgtgctagattaaaagtgagacagagacttgacttgatcctctgagctcaagctattgagctggtagtggcagaggactgagggtacctgcacagtttgattcttttccacgtgtaagtctccattgcagaattgtcgtgctttgagaaaacacctgaggcagtgtgggagttgaacgaccctgctgtcctttttaacctgtgttgtcctagaccctgtcggggcagtcaggggacactagagatttgatctcatgcgagtcatcaataggacaaaaaagttgtggtttggggaggtctgtttgttacataaaaaggacctttcggtgtaagaaattgccgtttttaccctgccctggctggcatgtgagaagccatggaaggttgtggttgtaaatgagttgtctaaaggggtgcagaggcctgaggtttctaaaagaaggtagatttctacagagctgagtgttggttcctttttcttattggttgaaaattacctggtagtgatcagaaaacttagatgctatgtaactaaaaaaaaaaaaaaaaaaaaaaaaaaaaaaaaaaaaattcccgctcatgagttttgactattggtgagatgttttccgctacagttaacatgacaaatgtctcagtggcaaaaatcccctttttgtaagcccccatagtctagaggcagttttctttttaagaatcatgccagagcctgagtcgagcagtatgctttcttggtttttgagagtaattgtgtaattgtagagggagaaatccaattctaacctaagaactgggattcttctgtcatcttgtaaaccgtatattgaaaaaaacagaatgtcactaaatgcatattaagtcaagtattggaaagtataaaagaaaaatcattctgacaatttctaagccagaagcaaacaagaattactgaaatctaccccatgaatacttggaaggcagtaattgtgagtgacacctcagttcatcaaccccttaataatatcagcttaattttaatgacaactaaatatgctgaagtgaggatttagtattttttaaaaaagcaaaacaaggttcagtagtcctcagcaattctccaagtttctctctttgcctaaaatggtcatagatcttgatttctctgaatcgtgatgaccacacccagtcatcttcacagcataattgcaggtggcagtaaagagagtgtgctgggtaaggagcagttgctgggtcattccttgggccccgacctgcccggggagtagccctgggggagagagggcagtgttgcctatcccagaggtcccagcagtcacactgctctgcaggccgggctctctttatagccagagaaatcaccttaatgcagtctctttagttgtctgctgaagctgtagttattatgggccacttacatgaggctgagaagtacgtgccggagctcacacactgcctgttgcggttctcttaacatcagttatcacagctgcctgtgggtcccgggtatttccattcctgccccttgttggcccgaggaaggatgtggaaagagcacctggtgggatgaaggtccaacagcctgtgcctctccactgctggccctggagccggcagcagtgaggcattcattgtctgtgttgcggtgtattcccagcttcagtgctcttttcctttttgcctgaaatgtttatgcttctctgcagccagtcctctaacaaatctcaagaacaaaggtaagacacttggtttttgtttccaggacccttcagaaggtgacatcagatattccctaaattcagacaatgagggatacagagcgacttggcatgtattatttctcccatgtaaggacaaagggacagattattattgttatttctgagacagagtcttgctctgtagctcaggctggagtgcagtggctcaatctcagctcaccacaacctctgcctcctggcttcaagcgattcttctgcctcagcctccccgaatagttgggattacaggcacccaccaccacgcctggctaatttttgtatttttagtagagatggtttcaccatgctggccaggctggtcttgaactcctgacctcaggtgatcctcccgcctcagccttccaaagtgctgggattacaagcatgagccaccgcacccggcctcacagtgacagattctgagaaacagcatgcaaaacatttgaaccattttctacatctcccattgttgcatagagagtgtgcaccgctgctatcttgccagatccacactggtcctcccgaaagccaggttcatacacagcaactttttaattattctaacagttacccattaacagtcgactcctgtatttctgagagtcttgtactcacctctgaaatttaaaaacgtataaagagagcctgggttaatcagttctgcagcccctacgtgacactgtgctagttctccttcttctgtctcctccttaccctggccctgcacccctgtacttaagagggagaggtgggaggtgctgtctggtatcatttgctgcctcgccagtagagggtgccgctgtgcagggtaactgcccgcctgctcccttcctgacctcccctgaccccgaagatcactacctctgtcattcaggcattggggtacatcctgataagtcgtgtcagaactgccaatttcaggactgagatgtgtttttaaaaaacaaatccttataaactccactttgtactttagattttaaaactggggaaaaatgtgatattctttggaccacttttttaatttatataagccttaatgaacagtgtctatacatttgcatacacacacccccaccccagagtgttctcagtatgtcagagaaagtgccacagcattaggacgggagcttggagaacgttttctagaaaagggttagcttcctgttggcatgaaattttccaagcaaacctcattaaacatctgttgtttgttaaagatgttccactgaaagcaacgcatgtttcaaaggcacgtctttccgttcgttggttttctgtgtgtaaggagtagcattgctgttggcgcctaacctcgcgtgcactgcattctcaaccccgtaccagtgcatcatcagaagccttcctcgtgaccataactctgtgtctgcagatatgtgttcccgtgtaagccagttttccccttttactcagactgatttcacctagattgtcacggtttccttcatgttaactttgcgtgactttgttcttcctttactactctgtatgtaatatatatacatatatacgtacatatgctgtccaaatatatttgtatatatttgtatagcatttttacacctttattgagtaatctggtttcgaaaggaggtgagagtttagtcccttctgcagttttctccaagctgtgtcctgtgaatttcaacccttggagcctaagaaaaccctaggaagatgatgttaatttgctgtcatttcctaattcaggatctatcatcaaatgaaacatgaaaaaaacagtgacttttaaggtgaaaagagtttcaagcattccaaataaattatcaatgtttcataactttttattataaacccacctcctaataggaagccaagtactatttgatacagtggtaaaaaccaaactaccttgaatttttttaaggcaacttatgaataatgctcattttcacagtcagaatagctttaaaatatggttgaatttgatacacacaggaagttttcttgaagaacaatcctttcgcttttcttttttcttgagagatctaaagagaaactgtagattgttttcctgacagcaaaagactaatgtgacaaaatgaagtcattgtaaagaagcgatgcaacttgtcaaatatttaataaagaattatggaagctggaacattttctac

SEQ ID NO: 56783 - DNA, 2904 bp, Artificial Sequence
  derived and/or modified sequence
atgaggcgccttgccttcgagcaaggagagagtagaattctgcgcgtgaaggtggtttcgggaattgatcttgcaaagaaagatatctttggcgcaagcgacccctacgtgaagctcagtctgtacgtagccgatgagaatcgtgagctggccctggtgcagaccaagactattaaaaagacactcaaccccaagtggaacgaggagttttatttccgggttaaccccagcaaccataggctcctgtttgaggtctttgatgagaataggttgacacgcgatgacttccttggccaagtcgacgtgccactctcacacttacccaccgaagatcctacaatggagagaccatataccttcaaggattttctcttacggccacggtcccacaagtctcgcgtgaaagggtttctcaggctgaagatggcttacatgccaaagaacggcggacaggacgaagaaaactcagatcagcgcgatgacatggagcacggctgggaagtggtggactcaaacgattcagcgagtcagcatcaggaggaactccccccaccccctttgcctcctgggtgggaggagaaggtcgataacctcggcagaacctattacgtgaaccacaacaatagaacaacgcagtggcacagaccgtcattaatggatgtctcttctgaatcagataataacattcgccaaatcaaccaagaggccgctcatcgcagattcaggtcaagacgccacatctccgaggacctagaacccgagcccagcgaaggtggggatgtccctgaaccttgggagactatctccgaagaagtaaatatcgccggtgactctctaggcctggcactgccaccacctccggcatctcccggatcacgtacatcaccccaggaactaagcgaggagctaagccgacgcctacaaattaccccagactctaatggtgaacaattcagtagtttgattcagagggagcctagcagccgacttaggtcttgttcagtgaccgacgccgtagcagaacaggggcacctgccgcctcccagtgccccagcaggtagggcacgctccagcaccgtaacaggcggtgaagagcccaccccgtcagtggcctatgtacacaccacacccggactgccttctggctgggaggagagaaaggacgcaaaaggccgtacatattacgttaatcataacaacagaaccactacctggacacggccaataatgcaactcgccgaagatggagccagcggcagtgccaccaactctaataaccacctcatcgagcctcagatacgacgtccacggagtctgtcttcccctaccgtcacattgagtgccccactggaaggcgctaaagatagtcccgtccgcagagcagtcaaagacaccctgtccaacccacagtcaccccagccttctccatataattctcccaagcctcagcacaaagtaacacagtccttcctgcctccaggatgggaaatgcggatcgctcctaacgggcgacccttttttattgatcacaacacaaagaccactacctgggaagatcctcgcctgaaattccccgtccatatgcgctctaaaacgtctctgaacccaaatgatctagggcctttaccccctgggtgggaggagcgcatccatctggacggacgcacgttttatattgaccacaattcgaagattacgcagtgggaagaccccagactccagaatccagctattactggccctgccgtgccctactcccgggaattcaagcagaagtatgactacttcagaaagaagctaaagaaaccggctgacatacccaatcgcttcgaaatgaagctgcacagaaacaacatcttcgaggagtcataccgtagaattatgtccgtgaagaggccagatgtgttgaaagcccgactttggattgagttcgagtccgagaagggactggactatggtggtgttgcgcgagaatggttcttcctgctgtctaaggaaatgttcaacccctactatggcctgttcgaatacagtgcaaccgacaactataccctccagatcaatcccaacagtggtctgtgcaacgaggaccacctcagctattttacgtttattggaagggttgcgggtttggctgtgttccacgggaaactgctggacggcttctttatccggccattctacaaaatgatgctgggcaagcagatcaccttgaacgacatggagagtgtggacagcgagtattacaattctctgaagtggatcctggagaatgatccaacagaattggatctgatgttttgtatcgatgaagaaaattttgggcagacataccaggtggatctcaagcccaatggcagtgaaatcatggtgacgaatgagaacaagcgggagtatattgatcttgtgatccaatggcgctttgtgaaccgcgtccagaagcagatgaatgcttttctcgaaggattcactgagctccttccgatcgatctcatcaagatcttcgatgagaacgagctagagttgctcatgtgcggactgggcgatgtggatgtgaatgattggcgccagcacagtatatataagaatggatactgtcccaatcacccggtcatccagtggttctggaaagcagtgttgcttatggacgctgagaagagaatcaggctcttacaatttgtaactgggactagccgcgtgcctatgaacggcttcgcggagttatatggcagtaatggtccacagctcttcaccattgaacagtgggggagcccggagaagctccccagggcacatacttgttttaatagactggacctgccgccatatgaaacttttgaagacctccgcgagaagttgctcatggcggttgagaacgcacagggttttgagggcgttgactag

SEQ ID NO: 56784 - DNA, 2904 bp, Artificial Sequence
  derived and/or modified sequence
atgagaagactggccttcgagcagggcgagagcagaatcctgagagtgaaggtggtgagcggcatcgacctggccaagaaggacatcttcggcgccagcgacccctacgtgaagctgagcctgtacgtggccgacgagaacagagagctggccctggtgcagaccaagaccatcaagaagaccctgaaccccaagtggaacgaggagttctacttcagagtgaaccccagcaaccacagactgctgttcgaggtgttcgacgagaacagactgaccagagacgacttcctgggccaggtggacgtgcccctgagccacctgcccaccgaggaccccaccatggagagaccctacaccttcaaggacttcctgctgagacccagaagccacaagagcagagtgaagggcttcctgagactgaagatggcctacatgcccaagaacggcggccaggacgaggagaacagcgaccagagagacgacatggagcacggctgggaggtggtggacagcaacgacagcgccagccagcaccaggaggagctgccccccccccccctgccccccggctgggaggagaaggtggacaacctgggcagaacctactacgtgaaccacaacaacagaaccacccagtggcacagacccagcctgatggacgtgagcagcgagagcgacaacaacatcagacagatcaaccaggaggccgcccacagaagattcagaagcagaagacacatcagcgaggacctggagcccgagcccagcgagggcggcgacgtgcccgagccctgggagaccatcagcgaggaggtgaacatcgccggcgacagcctgggcctggccctgccccccccccccgccagccccggcagcagaaccagcccccaggagctgagcgaggagctgagcagaagactgcagatcacccccgacagcaacggcgagcagttcagcagcctgatccagagagagcccagcagcagactgagaagctgcagcgtgaccgacgccgtggccgagcagggccacctgcccccccccagcgcccccgccggcagagccagaagcagcaccgtgaccggcggcgaggagcccacccccagcgtggcctacgtgcacaccacccccggcctgcccagcggctgggaggagagaaaggacgccaagggcagaacctactacgtgaaccacaacaacagaaccaccacctggaccagacccatcatgcagctggccgaggacggcgccagcggcagcgccaccaacagcaacaaccacctgatcgagccccagatcagaagacccagaagcctgagcagccccaccgtgaccctgagcgcccccctggagggcgccaaggacagccccgtgagaagagccgtgaaggacaccctgagcaacccccagagcccccagcccagcccctacaacagccccaagccccagcacaaggtgacccagagcttcctgccccccggctgggagatgagaatcgcccccaacggcagacccttcttcatcgaccacaacaccaagaccaccacctgggaggaccccagactgaagttccccgtgcacatgagaagcaagaccagcctgaaccccaacgacctgggccccctgccccccggctgggaggagagaatccacctggacggcagaaccttctacatcgaccacaacagcaagatcacccagtgggaggaccccagactgcagaaccccgccatcaccggccccgccgtgccctacagcagagagttcaagcagaagtacgactacttcagaaagaagctgaagaagcccgccgacatccccaacagattcgagatgaagctgcacagaaacaacatcttcgaggagagctacagaagaatcatgagcgtgaagagacccgacgtgctgaaggccagactgtggatcgagttcgagagcgagaagggcctggactacggcggcgtggccagagagtggttcttcctgctgagcaaggagatgttcaacccctactacggcctgttcgagtacagcgccaccgacaactacaccctgcagatcaaccccaacagcggcctgtgcaacgaggaccacctgagctacttcaccttcatcggcagagtggccggcctggccgtgttccacggcaagctgctggacggcttcttcatcagacccttctacaagatgatgctgggcaagcagatcaccctgaacgacatggagagcgtggacagcgagtactacaacagcctgaagtggatcctggagaacgaccccaccgagctggacctgatgttctgcatcgacgaggagaacttcggccagacctaccaggtggacctgaagcccaacggcagcgagatcatggtgaccaacgagaacaagagagagtacatcgacctggtgatccagtggagattcgtgaacagagtgcagaagcagatgaacgccttcctggagggcttcaccgagctgctgcccatcgacctgatcaagatcttcgacgagaacgagctggagctgctgatgtgcggcctgggcgacgtggacgtgaacgactggagacagcacagcatctacaagaacggctactgccccaaccaccccgtgatccagtggttctggaaggccgtgctgctgatggacgccgagaagagaatcagactgctgcagttcgtgaccggcaccagcagagtgcccatgaacggcttcgccgagctgtacggcagcaacggcccccagctgttcaccatcgagcagtggggcagccccgagaagctgcccagagcccacacctgcttcaacagactggacctgcccccctacgagaccttcgaggacctgagagagaagctgctgatggccgtggagaacgcccagggcttcgagggcgtggactag

SEQ ID NO: 56785 - DNA, 8346 bp, Artificial Sequence
  derived and/or modified sequence
acatttgaatttgctcccgattcgagagaggcaggcatccgcggcagcagcttccaacccagacaggcttaagccgcgcgagggtgcccgggtgggtggctgcgcagggccctacctgggcgggagcggctgcagagccctgtccacgcggtgcctccccagcacggcacctcccactccaggctgttggttacctggccgggagctggcggagaccaggatttctcctcgccgccgttgctgttgttaggggaaacagaccatctgcatctagacctgcctctctctccgctccccacttcagacgagctcttcctgcctggaatctgtgatccgtatgtgaaactttcattgtacgtagcggatgagaatagagaacttgctttggtccagacaaaaacaattaaaaagacactgaacccaaaatggaatgaagaattttatttcagggtaaacccatctaatcacagactcctatttgaagtatttgacgaaaatagactgacacgagacgacttcctgggccaggtggacgtgccccttagtcaccttccgacagaagatccaaccatggagcgaccctatacatttaaggactttctcctcagaccaagaagtcataagtctcgagttaagggatttttgcgattgaaaatggcctatatgccaaaaaatggaggtcaagatgaagaaaacagtgaccagagggatgacatggagcatggatgggaagttgttgactcaaatgactcggcttctcagcaccaagaggaacttcctcctcctcctctgcctcccgggtgggaagaaaaagtggacaatttaggccgaacttactatgtcaaccacaacaaccggaccactcagtggcacagaccaagcctgatggacgtgtcctcggagtcggacaataacatcagacagatcaaccaggaggcagcacaccggcgcttccgctcccgcaggcacatcagcgaagacttggagcccgagccctcggagggcggggatgtccccgagccttgggagaccatttcagaggaagtgaatatcgctggagactctctcggtctggctctgcccccaccaccggcctccccaggatctcggaccagccctcaggagctgtcagaggaactaagcagaaggcttcagatcactccagactccaatggggaacagttcagctctttgattcaaagagaaccctcctcaaggttgaggtcatgcagtgtcaccgacgcagttgcagaacagggccatctaccaccgccatcagtggcctatgtacataccacgccgggtctgccttcaggctgggaagaaagaaaagatgctaaggggcgcacatactatgtcaatcataacaatcgaaccacaacttggactcgacctatcatgcagcttgcagaagatggtgcgtccggatcagccacaaacagtaacaaccatctaatcgagcctcagatccgccggcctcgtagcctcagctcgccaacagtaactttatctgccccgctggagggtgccaaggactcacccgtacgtcgggctgtgaaagacaccctttccaacccacagtccccacagccatcaccttacaactcccccaaaccacaacacaaagtcacacagagcttcttgccacccggctgggaaatgaggatagcgccaaacggccggcccttcttcattgatcataacacaaagactacaacctgggaagatccacgtttgaaatttccagtacatatgcggtcaaagacatctttaaaccccaatgaccttggcccccttcctcctggctgggaagaaagaattcacttggatggccgaacgttttatattgatcataatagcaaaattactcagtgggaagacccaagactgcagaacccagctattactggtccggctgtcccttactccagagaatttaagcagaaatatgactacttcaggaagaaattaaagaaacctgctgatatccccaataggtttgaaatgaaacttcacagaaataacatatttgaagagtcctatcggagaattatgtccgtgaaaagaccagatgtcctaaaagctagactgtggattgagtttgaatcagagaaaggtcttgactatgggggtgtggccagagaatggttcttcttactgtccaaagagatgttcaacccctactacggcctctttgagtactctgccacggacaactacacccttcagatcaaccctaattcaggcctctgtaatgaggatcatttgtcctacttcacttttattggaagagttgctggtctggccgtatttcatgggaagctcttagatggtttcttcattagaccattttacaagatgatgttgggaaagcagataaccctgaatgacatggaatctgtggatagtgaatattacaactctttgaaatggatcctggagaatgaccctactgagctggacctcatgttctgcatagacgaagaaaactttggacagacatatcaagtggatttgaagcccaatgggtcagaaataatggtcacaaatgaaaacaaaagggaatatatcgacttagtcatccagtggagatttgtgaacagggtccagaagcagatgaacgccttcttggagggattcacagaactacttcctattgatttgattaaaatttttgatgaaaatgagctggagttgctcatgtgcggcctcggtgatgtggatgtgaatgactggagacagcattctatttacaagaacggctactgcccaaaccaccccgtcattcagtggttctggaaggctgtgctactcatggacgccgaaaagcgtatccggttactgcagtttgtcacagggacatcgcgagtacctatgaatggatttgccgaactttatggttccaatggtcctcagctgtttacaatagagcaatggggcagtcctgagaaactgcccagagctcacacatgctttaatcgccttgacttacctccatatgaaacctttgaagatttacgagagaaacttctcatggccgtggaaaatgctcaaggatttgaaggggtggattaagcaccctgtgcctcgggggtggttgttcttcaagcaagttctgcttgcacttttgcatttgcctaacagacttttgcagaggcgatggcagagagcagctgcaggcatggtccctggagccgagccttcaccacgcactcgtccaagttcggatgcgggaacctggtcccagcttgagttcctgcctttcccaccacaaattatcaactggttgatgtgtacactaattacatttcaggaggacttaatgctatttatgttgtgcctctgcaggcaaagcccttaataaatattttacatcctttctaatgacaatgaatggaattaatcactcaacaggtatagtattacgactcatgtttactttttaaaatgatttagaccgattttcagattttatttcgttatgattaaagatgtctcatgtacttggaaaagtgagcattttttttttttttgtatttcactttcataccaggcttaatgtcaatgacatttttatttttgaagtactctgacacctccaccctctactttattagaattggaaggcaaatttttgtccaaaaacctacagacaagtactttgagagaatttccaatataatattagacataatgataattttttccatactcagaatgaaaaactggatattacgtttttgttttggggtttttttgtacaaatttagctaatagctacaggctgagagaattgtaacatagcatgacaaattttgtgttgacttgaaaggaatcacaccattattccttagaagtaattacatgtgttctaacacatttgagacagggttggactcccatttctcatccgagaaattacttaacccttcctggcgctgtacagtcatcttttattctatttcctctttgctgtttgtagtagagacattttgaatgaaacttggcactgcttgattcaaaactgtggaaaccagatctgtttagtctcctgtttgtatgcgtttgctaatggtagctaaataaccagtttttgttgtaaatgcaccaattctgaaggcactttatgtactacatggaggtcatatctggttttgtttttatttttttatcatgaacattaaatgtgatgatgatttcttttccctgcacacatctttccggtgcaatatctatcaattgtgaatctggctgctggtgtataaaaacctggatgtaaagctgagcctacagacctgtcctcaccaactgttttgtgatttctactcaactacaaagatttatttaatgtactcttaatctaactgagttttgttaccaatgacctgttgcatgcttcaataccgtgtactgcctgagttgtgcctcttgtgtgctagattaaaagtgagacagagacttgacttgatcctctgagctcaagctattgagctggtagtggcagaggactgagggtacctgcacagtttgattcttttccacgtgtaagtctccattgcagaattgtcgtgctttgagaaaacacctgaggcagtgtgggagttgaacgaccctgctgtcctttttaacctgtgttgtcctagaccctgtcggggcagtcaggggacactagagatttgatctcatgcgagtcatcaataggacaaaaaagttgtggtttggggaggtctgtttgttacataaaaaggacctttcggtgtaagaaattgccgtttttaccctgccctggctggcatgtgagaagccatggaaggttgtggttgtaaatgagttgtctaaaggggtgcagaggcctgaggtttctaaaagaaggtagatttctacagagctgagtgttggttcctttttcttattggttgaaaattacctggtagtgatcagaaaacttagatgctatgtaactaaaaaaaaaaaaaaaaaaaaaaaaaaaaaaaaaaaaattcccgctcatgagttttgactattggtgagatgttttccgctacagttaacatgacaaatgtctcagtggcaaaaatcccctttttgtaagcccccatagtctagaggcagttttctttttaagaatcatgccagagcctgagtcgagcagtatgctttcttggtttttgagagtaattgtgtaattgtagagggagaaatccaattctaacctaagaactgggattcttctgtcatcttgtaaaccgtatattgaaaaaaacagaatgtcactaaatgcatattaagtcaagtattggaaagtataaaagaaaaatcattctgacaatttctaagccagaagcaaacaagaattactgaaatctaccccatgaatacttggaaggcagtaattgtgagtgacacctcagttcatcaaccccttaataatatcagcttaattttaatgacaactaaatatgctgaagtgaggatttagtattttttaaaaaagcaaaacaaggttcagtagtcctcagcaattctccaagtttctctctttgcctaaaatggtcatagatcttgatttctctgaatcgtgatgaccacacccagtcatcttcacagcataattgcaggtggcagtaaagagagtgtgctgggtaaggagcagttgctgggtcattccttgggccccgacctgcccggggagtagccctgggggagagagggcagtgttgcctatcccagaggtcccagcagtcacactgctctgcaggccgggctctctttatagccagagaaatcaccttaatgcagtctctttagttgtctgctgaagctgtagttattatgggccacttacatgaggctgagaagtacgtgccggagctcacacactgcctgttgcggttctcttaacatcagttatcacagctgcctgtgggtcccgggtatttccattcctgccccttgttggcccgaggaaggatgtggaaagagcacctggtgggatgaaggtccaacagcctgtgcctctccactgctggccctggagccggcagcagtgaggcattcattgtctgtgttgcggtgtattcccagcttcagtgctcttttcctttttgcctgaaatgtttatgcttctctgcagccagtcctctaacaaatctcaagaacaaaggtaagacacttggtttttgtttccaggacccttcagaaggtgacatcagatattccctaaattcagacaatgagggatacagagcgacttggcatgtattatttctcccatgtaaggacaaagggacagattattattgttatttctgagacagagtcttgctctgtagctcaggctggagtgcagtggctcaatctcagctcaccacaacctctgcctcctggcttcaagcgattcttctgcctcagcctccccgaatagttgggattacaggcacccaccaccacgcctggctaatttttgtatttttagtagagatggtttcaccatgctggccaggctggtcttgaactcctgacctcaggtgatcctcccgcctcagccttccaaagtgctgggattacaagcatgagccaccgcacccggcctcacagtgacagattctgagaaacagcatgcaaaacatttgaaccattttctacatctcccattgttgcatagagagtgtgcaccgctgctatcttgccagatccacactggtcctcccgaaagccaggttcatacacagcaactttttaattattctaacagttacccattaacagtcgactcctgtatttctgagagtcttgtactcacctctgaaatttaaaaacgtataaagagagcctgggttaatcagttctgcagcccctacgtgacactgtgctagttctccttcttctgtctcctccttaccctggccctgcacccctgtacttaagagggagaggtgggaggtgctgtctggtatcatttgctgcctcgccagtagagggtgccgctgtgcagggtaactgcccgcctgctcccttcctgacctcccctgaccccgaagatcactacctctgtcattcaggcattggggtacatcctgataagtcgtgtcagaactgccaatttcaggactgagatgtgtttttaaaaaacaaatccttataaactccactttgtactttagattttaaaactggggaaaaatgtgatattctttggaccacttttttaatttatataagccttaatgaacagtgtctatacatttgcatacacacacccccaccccagagtgttctcagtatgtcagagaaagtgccacagcattaggacgggagcttggagaacgttttctagaaaagggttagcttcctgttggcatgaaattttccaagcaaacctcattaaacatctgttgtttgttaaagatgttccactgaaagcaacgcatgtttcaaaggcacgtctttccgttcgttggttttctgtgtgtaaggagtagcattgctgttggcgcctaacctcgcgtgcactgcattctcaaccccgtaccagtgcatcatcagaagccttcctcgtgaccataactctgtgtctgcagatatgtgttcccgtgtaagccagttttccccttttactcagactgatttcacctagattgtcacggtttccttcatgttaactttgcgtgactttgttcttcctttactactctgtatgtaatatatatacatatatacgtacatatgctgtccaaatatatttgtatatatttgtatagcatttttacacctttattgagtaatctggtttcgaaaggaggtgagagtttagtcccttctgcagttttctccaagctgtgtcctgtgaatttcaacccttggagcctaagaaaaccctaggaagatgatgttaatttgctgtcatttcctaattcaggatctatcatcaaatgaaacatgaaaaaaacagtgacttttaaggtgaaaagagtttcaagcattccaaataaattatcaatgtttcataactttttattataaacccacctcctaataggaagccaagtactatttgatacagtggtaaaaaccaaactaccttgaatttttttaaggcaacttatgaataatgctcattttcacagtcagaatagctttaaaatatggttgaatttgatacacacaggaagttttcttgaagaacaatcctttcgcttttcttttttcttgagagatctaaagagaaactgtagattgttttcctgacagcaaaagactaatgtgacaaaatgaagtcattgtaaagaagcgatgcaacttgtcaaatatttaataaagaattatggaagctggaacattttctac

SEQ ID NO: 56786 - DNA, 2508 bp, Artificial Sequence
  derived and/or modified sequence
atggagcggccctatacgtttaaggacttcttgctcagacctcgctctcataagtcccgagttaagggcttcctcagactaaagatggcttacatgccgaagaatggcggccaggacgaagaaaattccgatcagcgcgacgacatggagcacggctgggaggtggtggattcgaacgattccgcttctcagcaccaggaagaactgccacctcctccattgcccccaggatgggaggagaaagtggacaatcttggtcggacttattatgtcaatcataacaatcgtaccactcagtggcaccgcccttccctgatggacgtgagttcagagtcagacaataacataaggcagattaaccaggaagcagctcatagacgatttcggagccgcagacatatctcagaggacttggagcccgaacccagcgagggcggcgacgtacctgaaccttgggagacaatatcagaggaggtgaacatcgctggtgactctttgggactcgcactgccaccgccccccgcttcccccggcagtcgaacatctccccaggaactatccgaagaactgtcgcgtcgcctccaaattacccctgattccaacggtgagcagttctcgtcgctgatccaacgggagccaagctctagacttcgaagctgctccgtgaccgatgctgtcgctgagcaggggcacttgccacctcccagcgttgcctacgtgcatactactcctggcctgccctcaggctgggaagagcgcaaagacgctaaaggtcgcacttactatgtgaatcacaacaatcgtactacgacctggacacgacctattatgcagctggccgaagacggggcctcaggtagcgcaacaaattcgaacaatcacctgatagagccacagatccgacggcctagatcactcagctcccctacggttaccttgtccgctcccttggagggcgccaaagatagtccagtgagaagagcagtcaaagatacactgtcaaatccacagtcacctcagccctctccctacaacagtcccaagccacagcataaagttacacaatcatttctgccacctgggtgggaaatgagaattgccccaaacggcagaccttttttcattgaccacaacactaaaaccacaacatgggaggatccaagactcaagtttcctgtgcatatgcgaagtaaaacatccctcaacccaaacgatttgggacccctgcctcctgggtgggaagagcggattcacctagatggacgcacgttctacatcgaccacaactccaagatcacacagtgggaggacccccggcttcagaaccccgctatcacaggacctaaagcggtgccgtactctcgggaattcaagcaaaagtacgactatttccggaaaaagctcaaaaaaccagccgatattccaaataggttcgagatgaaactccacagaaataacatatttgaagaatcctacaggcgcattatgtcggtgaaacgtcctgacgttctgaaggctcgcctttggattgaattcgaatccgagaaagggcttgattatggtggagtggctagagaatggttttttctgctatccaaggagatgtttaacccgtactatggactcttcgagtacagtgccaccgataactatactctgcaaataaatcccaatagtggattgtgcaatgaggatcacctgtcttacttcacgttcatcgggcgggtagcaggcctcgctgtctttcatggcaaacttctcgacgggttctttattcgacctttctataaaatgatgctgggaaagcaaatcactctgaatgacatggaaagtgtggacagcgagtattacaattccctaaagtggatcctcgaaaacgatccaactgagctagatttgatgttctgcattgatgaagagaactttggccagacctaccaggtggacctaaagcccaatggatcggagatcatggtgaccaatgaaaataaacgggagtatatcgacctcgttatccagtggcgcttcgtcaacagagttcaaaagcagatgaacgccttcctagagggctttaccgagcttcttcccatcgatctgattaaaatctttgatgaaaatgaactggagttgctcatgtgcggcctgggcgacgtggatgtgaatgactggcggcagcactctatttataagaatgggtactgccctaaccaccctgttatacagtggttttggaaggctgtgctgttaatggatgccgaaaagaggattcgactgttgcaatttgttacagggacatcccgtgttcctatgaacgggtttgccgaactgtacggctccaacgggcctcagctgttcaccatcgagcagtgggggtctcccgagaagctacccagagcccacacttgtttcaatcgccttgacttgccgccttatgaaacgtttgaggatctgcgggagaagctactgatggccgtggagaacgcccaggggtttgaaggtgtcgactag

SEQ ID NO: 56787 - DNA, 2505 bp, Artificial Sequence
  derived and/or modified sequence
atggaaaggccttacaccttcaaggattttttactacggccgaggtcacacaagtctagagtcaagggcttcttgaggctgaagatggcttatatgcccaaaaatggcggacaggacgaggagaattctgatcagcgcgatgatatggagcatggttgggaggtcgtggacagcaacgactcagcatcgcagcaccaagaggaactgcccccaccccccctgcctcccgggtgggaagagaaagtggacaatttaggccggacttactatgttaaccataataatcgaactacccagtggcaccgaccaagtctgatggatgtgagctccgagagtgacaataatatccgacagattaaccaagaagccgcccaccgccgtttcaggtcacgacgccacatttcagaagacctcgaacctgaaccctccgaaggcggggatgtccccgagccttgggagactattagcgaagaagtgaatattgctggcgatagtctaggactggcattgccacctcctcccgcatcaccaggctccaggacatctccgcaagaactctcagaagagctgtctaggagactgcaaattactccagattccaatggcgagcagttctcttccttgatccaaagagagcccagtagccgcctgaggtcttgttcggttaccgatgctgtagctgaacaagggcatctcccacccccgtccgtggcttatgttcatacgacaccggggcttccgagtggttgggaggagagaaaagacgcgaagggtagaacatattacgttaaccataataatcgcacaactacctggacccggccgatcatgcagctcgcggaggatggggcctccggaagtgccaccaacagtaacaaccatcttatcgagccccagatacgaagaccccggtctctgtccagcccgacagtgacgctatccgcccccctcgagggcgccaaggattcccctgtgcgtagggctgtgaaggacactctaagcaatcctcagtcgccccaacctagcccttacaattctcctaaaccacagcataaggtgacccaatcttttcttcccccggggtgggaaatgcgaatagctcctaacggacgacctttcttcatcgatcataatacaaagactaccacctgggaggacccacggctaaaattcccagtacatatgagatccaagaccagtcttaaccccaatgacctgggccctctgcctccaggttgggaggaaaggatccatttggacggacggacattctacatagaccacaactctaagatcacacagtgggaggaccccaggctgcagaatccagccattactgggcccgccgtcccctattcacgtgaattcaagcagaagtatgactatttccgtaagaagctgaagaaacccgctgatatccccaatcgattcgaaatgaagctgcaccggaacaacatcttcgaagaaagctaccgccggatcatgtcagttaaaagacctgatgtactgaaggccagactgtggattgaattcgagagcgagaagggactcgattacgggggggtcgctcgcgagtggtttttccttctgtctaaggaaatgtttaacccttattatggtctgttcgaatacagtgcaacagacaattacactctgcaaattaatccaaacagtggcctttgcaatgaggatcatctgtcgtattttactttcataggacgcgtcgcaggacttgcggtgttccacggaaaactgctcgatggcttcttcatcaggcctttctataaaatgatgctggggaaacagattaccctcaacgacatggagtcggtcgattccgaatattacaattctctgaagtggattcttgaaaatgatcccaccgagctcgacctcatgttttgtatcgatgaagagaatttcggtcaaacttaccaagttgatctgaagccaaacgggtccgagatcatggtgacaaacgagaataagagggagtacatcgatctagtgatccaatggagattcgtaaatcgggtgcagaagcagatgaacgccttcctggaaggatttaccgagttgctccctatcgatcttatcaagattttcgatgaaaatgagcttgaacttctaatgtgcgggctgggagatgtcgacgtcaatgattggcgacagcacagcatctacaagaacggctactgccctaaccatccagtaatccaatggttctggaaggctgttctcttgatggatgccgagaagcgcatacggctgcttcagtttgttacaggcaccagcagagtgccaatgaacgggttcgccgaattgtacgggtccaacggtcctcagttgttcacaattgagcagtgggggagccccgagaagctcccaagggcccatacctgctttaaccggctcgaccttccgccctacgagaccttcgaggatctgcgagaaaagttgctcatggcggttgagaacgctcagggctttgaaggtgtggactag

SEQ ID NO: 56788 - DNA, 2505 bp, Artificial Sequence
  derived and/or modified sequence
atggagaggccttataccttcaaggacttcctgctgcggcctcgtagccacaagtccagagtcaaaggattcctgaggctcaagatggcatatatgccaaaaaatgggggccaagatgaggaaaatagtgaccaaagggacgacatggagcacggctgggaggtggtagattcaaatgatagcgcctctcaacaccaggaggagctgccacccccacccctgccccccggctgggaagagaaagtcgataatctgggccgtacatattatgttaaccacaataataggacaacgcagtggcacaggccctcacttatggatgtttcttcggagtccgataataacattcgacagatcaaccaggaggctgcacaccgaagattcaggagccgaagacacatcagtgaagatctggaacccgagcctagcgagggcggcgacgtgccagagccatgggaaaccatctccgaggaggtcaacatcgcgggggactcccttgggctggcccttccaccccctccggccagcccggggagtcgaacttcaccccaggagcttagcgaggaattaagcagacggctccagataactcccgacagtaatggcgagcagttcagcagcctgatccagagggaaccctcaagccggctgcggagctgttccgtgactgatgccgtggctgaacaaggtcatctgcctcccccatcagttgcctatgttcacaccactcccggattgccgtcgggttgggaggagcggaaggacgctaagggcagaacttattacgtgaaccataataataggactacaacctggaccaggcccatcatgcaattggccgaggatggggcttccggcagcgctacaaattccaataatcacctgatcgaacctcagatccgcaggcctcgcagtctttctagccccacagtgacactgagcgctcctctggaaggcgccaaggacagtcccgtgcggcgagctgtaaaagacactctaagcaatccacagagccctcagccatcgccctacaactcccctaagccccagcacaaagttacacagagttttctgcccccaggctgggaaatgcgcatagcacctaatggccggccctttttcattgatcacaacactaagactacaacatgggaagatccacgcctcaagtttcccgtgcatatgcggagtaagacctcccttaaccctaatgacttgggtccactcccccctggctgggaagagcgtattcatcttgatggaaggacattctacatagaccacaacagcaaaattacccaatgggaggatccacggctccagaatcccgctatcacgggacccgccgttccttactccagggaattcaaacagaagtatgattatttcaggaaaaaattaaaaaaaccagcagatatccccaataggtttgaaatgaagctgcaccgaaataatatttttgaagagtcatatcgacgaattatgtctgtcaagcggccagacgtgctgaaggcccggctatggattgagttcgagtcagaaaagggcttggactacggtggtgtagctagggaatggttctttctgctcagcaaggagatgtttaacccttattacggcttgttcgaatactctgccactgacaattatactctgcaaataaaccctaactctggtctgtgcaacgaggatcatctctcctacttcacatttatcggaagagttgctggcctggccgtgtttcacggcaagctcctggacgggttctttataagaccgttttataaaatgatgttggggaagcagatcactctcaacgatatggaatcagtcgatagcgagtattacaatagtctgaaatggattttggaaaatgatccaaccgaactcgatctgatgttctgcattgacgaggagaactttggccagacctaccaggtggacctgaaacccaacgggagcgagataatggtgacgaatgagaataagcgagaatacatcgaccttgtcattcagtggcgttttgtgaacagagtgcagaaacaaatgaatgcgtttctggaagggtttaccgagctgctgccaatcgacctgatcaagatttttgacgagaacgaattggagctcttgatgtgtgggctgggtgatgttgatgtaaacgattggcggcaacactctatatataagaacggatattgcccaaaccatcctgtgatacagtggttttggaaagcggtgctgttgatggatgcagagaagaggataaggttacttcagtttgtgactggcacatctcgcgttcccatgaatggatttgctgaactgtacggtagcaacggaccccaattgtttacaatcgagcagtggggttccccagagaaactgccccgagcacacacctgcttcaacagattggacctaccaccttacgagacatttgaggaccttagagagaagctcctaatggccgtcgagaacgcccaggggtttgagggcgtggattag

SEQ ID NO: 56789 - DNA, 2508 bp, Artificial Sequence
  derived and/or modified sequence
atggagcggccctacaccttcaaggacttcctgctgcggcccaggagccacaagagccgggtgaagggcttcctgcggctgaagatggcctacatgcccaagaatggaggccaggatgaagaaaattctgaccagagagatgacatggagcacggctgggaggtggtggacagcaatgattctgccagccagcaccaggaggagctgcccccaccacccctgcccccaggctgggaggagaaggtggacaacctgggccgcacctactacgtgaaccacaacaacagaaccacccagtggcaccggcccagcctgatggatgtgagcagcgagagtgacaacaacatccggcagatcaaccaggaggccgcccaccggcgcttccgcagcagaagacacatcagcgaggacctggagcctgagcccagcgagggcggagatgtgcctgagccctgggagaccatcagcgaggaggtgaacattgctggggacagcctgggcctggccctgcccccacctccagccagccctggcagcaggaccagcccccaggagctgtctgaggagctgagccggcggctgcagatcaccccagacagcaatggagagcagttcagcagcctcatccagcgggagcccagcagccggctgcggagctgcagcgtgacagatgctgtggccgagcagggccacctgcccccacccagcgtggcctacgtgcacaccaccccaggcctgcccagcggctgggaggagaggaaggatgccaagggccgcacctactacgtgaaccacaacaacagaaccaccacctggacccggcccatcatgcagctggctgaagatggagccagcggcagcgccaccaacagcaacaaccacctgattgagccccagatcagaagacccaggagcctgagcagccccaccgtgaccctgagcgcccccctggagggcgccaaggacagccctgtgcggcgggctgtgaaggacaccctgagcaacccccagagcccccagcccagcccctacaacagccccaagccccagcacaaggtgacccagagcttcctgcccccaggctgggagatgagaattgccccaaatggccggcccttcttcatcgaccacaacaccaagaccaccacctgggaggacccccggctgaagtttcctgtgcacatgaggagcaagaccagcctgaaccccaatgacctgggccccctgcccccaggctgggaggagcgcatccacctggatggccgcaccttctacatcgaccacaacagcaagatcacccagtgggaggacccccggctgcagaacccagccatcaccggccccaaggctgtgccctacagccgggagttcaagcagaagtatgactacttcaggaagaagctgaagaagccagctgacatccccaacagatttgagatgaagctgcacaggaacaacatctttgaggagagctaccgccgcatcatgtctgtgaagaggccagatgtgctgaaggcccggctgtggattgaatttgagagcgagaagggcctggactatggaggagtggcccgggagtggttcttcctgctgagcaaggagatgttcaacccctactacggcctgtttgagtacagcgccacagacaactacaccctgcagatcaaccccaacagcggcctgtgcaatgaagaccacctgagctacttcaccttcatcggccgggtggccggcctggccgtgttccacggcaagctgctggatggcttcttcatccggcccttctacaagatgatgctgggcaagcagatcaccctgaatgacatggagagcgtggacagcgagtactacaacagcctgaagtggatcctggagaatgaccccacagagctggacctgatgttctgcattgatgaggagaactttggccagacctaccaggtggacctgaagcccaatggaagtgagatcatggtgaccaatgaaaacaagcgggagtacatcgacctggtgatccagtggaggtttgtgaacagagtgcagaagcagatgaatgccttcctggagggcttcacagagctgctgcccatcgacctgatcaagatctttgatgaaaatgagctggagctgctgatgtgtggcctgggagatgtggatgtgaatgactggaggcagcacagcatctacaagaatggctactgccccaaccaccctgtgatccagtggttctggaaggctgtgctgctgatggatgctgagaagaggatccggctgctgcagtttgtgacaggcaccagccgggtgcccatgaatggatttgctgagctgtatggcagcaatggcccccagctgttcaccatcgagcagtggggcagccctgagaagctgccccgggcccacacctgcttcaaccggctggacctgcccccctatgagacctttgaggacctgcgggagaagctgctgatggctgtggagaatgcccagggctttgaaggagtggactag

SEQ ID NO: 56790 - DNA, 2505 bp, Artificial Sequence
  derived and/or modified sequence
atggagcggccctacaccttcaaggacttcctgctgcggcccaggagccacaagagccgggtgaagggcttcctgcggctgaagatggcctacatgcccaagaatggaggccaggatgaagaaaattctgaccagagagatgacatggagcacggctgggaggtggtggacagcaatgattctgccagccagcaccaggaggagctgcccccaccacccctgcccccaggctgggaggagaaggtggacaacctgggccgcacctactacgtgaaccacaacaacagaaccacccagtggcaccggcccagcctgatggatgtgagcagcgagagtgacaacaacatccggcagatcaaccaggaggccgcccaccggcgcttccgcagcagaagacacatcagcgaggacctggagcctgagcccagcgagggcggagatgtgcctgagccctgggagaccatcagcgaggaggtgaacattgctggggacagcctgggcctggccctgcccccacctccagccagccctggcagcaggaccagcccccaggagctgtctgaggagctgagccggcggctgcagatcaccccagacagcaatggagagcagttcagcagcctcatccagcgggagcccagcagccggctgcggagctgcagcgtgacagatgctgtggccgagcagggccacctgcccccacccagcgtggcctacgtgcacaccaccccaggcctgcccagcggctgggaggagaggaaggatgccaagggccgcacctactacgtgaaccacaacaacagaaccaccacctggacccggcccatcatgcagctggctgaagatggagccagcggcagcgccaccaacagcaacaaccacctgattgagccccagatcagaagacccaggagcctgagcagccccaccgtgaccctgagcgcccccctggagggcgccaaggacagccctgtgcggcgggctgtgaaggacaccctgagcaacccccagagcccccagcccagcccctacaacagccccaagccccagcacaaggtgacccagagcttcctgcccccaggctgggagatgagaattgccccaaatggccggcccttcttcatcgaccacaacaccaagaccaccacctgggaggacccccggctgaagtttcctgtgcacatgaggagcaagaccagcctgaaccccaatgacctgggccccctgcccccaggctgggaggagcgcatccacctggatggccgcaccttctacatcgaccacaacagcaagatcacccagtgggaggacccccggctgcagaacccagccatcaccggccctgctgtgccctacagccgggagttcaagcagaagtatgactacttcaggaagaagctgaagaagccagctgacatccccaacagatttgagatgaagctgcacaggaacaacatctttgaggagagctaccgccgcatcatgtctgtgaagaggccagatgtgctgaaggcccggctgtggattgaatttgaaagtgagaagggcctggactatggaggagtggcccgggagtggttcttcctgctgagcaaggagatgttcaacccctactacggcctgtttgagtacagcgccacagacaactacaccctgcagatcaaccccaacagcggcctgtgcaatgaagaccacctgagctacttcaccttcatcggccgggtggccggcctggccgtgttccacggcaagctgctggatggcttcttcatccggcccttctacaagatgatgctgggcaagcagatcaccctgaatgacatggagagcgtggacagcgagtactacaacagcctgaagtggatcctggagaatgaccccacagagctggacctgatgttctgcattgatgaagaaaattttggccagacctaccaggtggacctgaagcccaacggcagcgagatcatggtgaccaatgaaaacaagcgggagtacatcgacctggtgatccagtggaggtttgtgaacagagtgcagaagcagatgaatgccttcctggagggcttcacagagctgctgcccatcgacctgatcaagatctttgatgaaaatgagctggagctgctgatgtgtggcctgggagatgtggatgtgaatgactggaggcagcacagcatctacaagaatggctactgccccaaccaccctgtgatccagtggttctggaaggctgtgctgctgatggatgctgagaagaggatccggctgctgcagtttgtgacaggcaccagccgggtgcccatgaatggatttgctgagctgtatggcagcaatggcccccagctgttcaccatcgagcagtggggcagccctgagaagctgccccgggcccacacctgcttcaaccggctggacctgcccccctatgagacctttgaggacctgcgggagaagctgctgatggctgtggagaatgcccagggctttgagggcgtggactag

SEQ ID NO: 56791 - DNA, 2508 bp, Artificial Sequence
  derived and/or modified sequence
atggagcggccctacaccttcaaggacttcctgctgcggccccggtcccacaaatcccgagtcaagggctttctccgtctcaagatggcgtacatgccgaagaacggggggcaagatgaggaaaattctgaccaaagggacgacatggaacacggttgggaggtggttgacagtaatgattcggcatctcagcaccaggaagagctccctccgccccccctgccaccaggatgggaggaaaaggtcgataatctcggcagaacttattatgttaatcataacaaccgaacaacccagtggcacagaccgagtcttatggatgtgtcttctgagagcgacaataacatcagacagattaatcaggaggcggcccatagaaggttccgcagtcgccgacacatttccgaggatctggaaccagaaccctctgaaggcggcgacgtccctgagccgtgggaaactataagcgaagaagtgaacatcgccggcgactccctcggcctggcccttccccctccgccggcgtccccaggatctaggacctctccccaggaacttagcgaggagctctctcgcagactccagataacacccgatagcaacggcgaacaattttcctctctcatacaaagagagccctcctcacgcctgagaagctgttctgtgaccgacgctgtggccgaacagggccacctgccccccccttccgttgcctacgtacataccacacccgggctgcctagcggatgggaggagcgtaaggacgccaagggcaggacctattacgtgaatcataacaacagaaccactacctggactcggccgatcatgcagctagccgaggatggagcctccggtagcgccaccaatagcaataatcacctgattgagccccaaatacggaggccaaggtccttgtcatcgccaactgtcacacttagtgctcctcttgaaggcgcaaaagacagtccagttcgacgggccgtcaaggacacactgagtaatccacagagcccccagcctagtccttacaactcccctaagccacaacacaaagtgacacagtctttcttacctccggggtgggagatgcggatagcgcccaatggtaggcccttctttatcgaccacaacacgaaaaccacgacctgggaagacccgcgtctgaagtttcccgtacacatgagatcaaagaccagtctgaatccaaatgacctgggccccctccccccaggctgggaggagcggatacatttagacgggaggactttctacatcgaccacaacagcaagatcacacaatgggaggaccctcgactgcagaaccctgccatcaccgggccaaaagcagtgccgtacagtagagaattcaagcagaaatatgactactttagaaaaaaactgaagaagcccgctgatatacctaaccgctttgagatgaagctccaccggaacaacatttttgaggagtcctaccgccggattatgtccgtgaaaaggcctgacgtgctgaaggcaaggttatggattgaattcgagagtgagaaggggctggactacggcggcgtggctcgagagtggttctttctactctctaaagagatgtttaatccgtactatggcctgtttgagtattcagcgaccgacaactacacgctgcagataaacccgaactctggcctgtgcaacgaggatcacctttcttattttaccttcatcggacgcgtcgcagggttagccgtttttcacggcaagctgctggacggcttcttcatccggcccttttacaagatgatgcttggcaagcagatcactctcaatgacatggaaagcgtggactcggagtactacaactccctgaagtggatcctggagaacgatccaacagagctggacttgatgttttgtattgacgaggagaattttggtcagacataccaggtggatctgaaacccaacggctccgaaatcatggttacgaacgagaacaagagggagtatatcgatctagtgatccaatggcgctttgtcaacagggtccagaaacagatgaatgcatttctcgaaggcttcaccgagctgctcccaatcgacttgattaaaattttcgacgagaacgaactcgagctgctaatgtgcggcctcggggacgtagatgtaaatgactggcgtcagcactctatatacaagaatggctattgcccaaatcacccagtgatccagtggttctggaaagcagtgttattaatggacgccgagaagaggatacgactgctgcagttcgtcactggtaccagtagggttcctatgaacggttttgccgagctctatggatcaaatgggcctcagttgttcaccatcgagcaatggggttctccggagaagctgccaagggcccacacttgttttaaccgcttggacctcccaccttatgaaacttttgaggacctgcgcgaaaaattgttaatggccgtagaaaatgcgcagggatttgaaggcgtggattag

SEQ ID NO: 56792 - DNA, 2505 bp, Artificial Sequence
  derived and/or modified sequence
atggagcggccctacaccttcaaggacttcctgctgcggccccggtctcacaagtccagggtcaaggggttcctgcggttgaaaatggcgtacatgccgaagaatggtggccaggatgaagaaaactccgaccagagagacgatatggaacacggttgggaggtagtcgacagtaacgatagcgcaagtcagcatcaagaagaactgccaccaccacccctgcccccaggatgggaggaaaaggtagataacttgggccgcacatattacgttaaccacaacaacaggacaactcaatggcaccggccctcgctgatggacgtgtcctccgagtccgataacaatatcaggcagattaatcaggaggccgcccataggagattccggtcccggcgacatattagtgaagatcttgagccagaacctagcgaggggggcgacgttcccgagccctgggagacaatatcggaagaggttaacatcgcgggcgacagcctgggactcgccctgcctcctccccctgccagtcctgggtctaggacttctccacaggagttgtctgaggaactaagcagacggcttcaaataacacctgattcaaacggcgagcagttcagcagcttgatccagcgagagccctcatccaggctgcggtcatgcagtgtgacagacgcagttgcggagcaaggacacttgcccccaccttccgtggcatatgtacatacgacacctggactgcccagcggatgggaagaaagaaaagatgccaaggggagaacctactatgtcaaccacaataatcgtaccactacctggacgagaccgatcatgcagctggcggaagacggcgcctccggcagcgctactaactccaataaccacctgattgagccccagatccgtcgtccaaggtccctgagcagccctaccgtaaccctgagcgctccgttggaaggagccaaggatagccccgtgagacgggctgtgaaggacaccctctcgaatccacagagccctcagccaagcccctacaactctccaaaaccacagcataaggtgacccagtcattcttaccccctggatgggagatgcggatcgccccaaacgggcggcccttctttattgaccacaatacaaaaaccaccacatgggaagacccgcgcctaaagttcccggtccatatgcggtcgaagacttcactgaatcctaacgatctggggcccctcccaccgggttgggaggagaggatccacttagacggcagaaccttttatatcgatcacaactcaaaaatcacacaatgggaggacccccgcctgcagaacccggcaattacaggacccgctgtgccctactcaagagaatttaagcagaagtacgattatttcagaaagaagctcaaaaaacctgctgatatccctaaccggtttgagatgaagcttcatcgaaataatattttcgaagagtcttaccgccgcatcatgtccgtgaagaggcccgatgtgctgaaggctcggctctggatcgaattcgagtcagagaaaggtctcgattacggaggcgttgccagggagtggttttttctgctaagtaaggaaatgttcaacccttattacggcttatttgaatatagcgccactgacaattatactctccaaattaaccctaatagtggtctctgcaatgaggatcacctcagctactttacattcattggacgggttgctggattagctgtgtttcatggcaagctgctggacggtttttttatccgcccattctataaaatgatgcttggcaaacagataactctgaacgacatggaaagcgttgattccgagtattacaatagcttgaaatggatcctggagaatgacccaaccgagctcgatctgatgttctgcatagatgaagaaaactttggacagacatatcaagttgaccttaagcccaacgggtcagaaatcatggtgactaacgagaataaaagagaatatattgatctggtgattcagtggaggtttgttaatcgggttcaaaaacagatgaatgcttttttggagggttttactgagctgttaccaattgacctcatcaagatttttgacgagaatgagctggaattgctgatgtgtggcctcggggacgtcgatgtcaatgattggcgccagcactcaatctacaagaatggctactgccccaatcacccagtgatccagtggttctggaaggccgtgctgctaatggacgccgagaagaggatacgcctgttgcagttcgtgactgggacttcacgcgtgccgatgaacggtttcgccgaactatatggaagcaatggcccacagctttttactattgagcagtgggggagccctgagaagctgccacgggcccacacctgctttaaccggctggacttaccaccatacgagaccttcgaggatctgcgcgaaaaactactcatggcagtcgagaatgcccaggggtttgagggcgtggattag

SEQ ID NO: 56793 - DNA, 2505 bp, Artificial Sequence
  derived and/or modified sequence
atggagcggccctacaccttcaaggacttcctgctgcggccccggagccacaagagccgtgtcaaaggcttcctccgcctaaaaatggcatacatgcccaagaacggtggccaggacgaagaaaattccgaccaacgcgacgacatggagcacgggtgggaggtggtcgatagtaatgattccgcctcacagcatcaggaggaactgccacccccgcctctccctcccggctgggaggagaaagtggataatctgggaagaacctattatgtgaaccacaataaccgcactacacaatggcatcggcctagcctgatggacgttagctccgaatctgacaataatattaggcagatcaatcaggaggccgcccatcgaaggttccgatctcgcaggcatatctctgaagacctcgaaccggaacctagcgagggcggagacgtccctgagccctgggagaccatttctgaggaagtgaatatagccggagattctctgggactggcactcccacctcctccggctagccccggctcaagaaccagcccgcaggaactatcagaagagctcagcagaagactacagatcaccccagattccaatggggagcagttcagctctctcatacagcgggagccctccagccgactgcgcagttgttccgtgacagatgccgtggccgaacagggacatctgccacctcctagcgtagcctacgtacacaccacgccggggttaccttcaggttgggaagagaggaaagacgccaaaggacgtacttattacgtgaatcacaataaccgtactaccacgtggacccgtccaatcatgcaattggccgaggacggagcgtcaggctctgctaccaactcaaataatcatttaatcgagccgcagataaggcggcctcggtctctgtcttcgccaacagtgaccctgtctgccccactggagggggcaaaagactctcctgtccgtcgtgccgtcaaggatactctctcgaatcctcagtcgccccagccctctccatacaattccccaaagcctcaacataaggtgactcagtcctttcttccccctggttgggagatgagaatagcaccaaacggccgcccgttctttatagaccataataccaagacaacaacgtgggaggacccccggcttaaatttccggtgcacatgagatctaagacgagcctgaacccaaacgacctcggcccattacctcccggatgggaagagagaattcatctcgatggacgtaccttctatatcgaccacaacagcaaaattacacagtgggaggatccccgactccagaaccctgcgatcaccggacctgccgtcccgtatagtcgggaattcaagcaaaaatatgactatttcagaaagaagctgaagaagcctgccgatatccccaatcggtttgaaatgaaactgcaccgtaacaacatttttgaagagagttatagacgcatcatgagtgtaaaacgccctgatgtattaaaggccagactctggattgaattcgagtctgagaaaggccttgactacggtggggtggctcgggagtggttttttctcctgtcaaaggaaatgttcaatccatattacggtctgttcgaatactctgccactgataactatactctgcagattaatcctaactccggcctgtgcaatgaagatcacttgagttactttacgttcattggaagggtcgccggactcgcagtctttcacgggaagttgctcgacggatttttcataagaccattctacaaaatgatgctggggaaacagattactcttaatgacatggagagcgttgacagcgagtattacaatagcctcaagtggattctggagaacgatccaaccgagctcgacctcatgttctgtatcgatgaagaaaacttcggtcagacgtaccaggtggatcttaagcccaatggaagcgaaataatggtgacaaacgagaataaacgagagtatattgacttggtgatacagtggcggttcgtgaatcgtgttcagaaacagatgaatgcattcttggaaggattcaccgaactgttaccaattgacttgatcaagatatttgatgagaacgaactggaactgcttatgtgcgggcttggcgatgtagacgtcaacgactggcgccagcactcgatatataaaaatggctactgccctaaccaccccgtcattcagtggttttggaaggcggtcctactgatggacgcagaaaagcgtatccggcttttacaattcgtgacagggacttcccgcgtgcccatgaacgggtttgcagagctctatggatccaacggaccgcagctgttcaccattgaacaatggggctcgcctgagaagctccctcgagcccacacttgtttcaatcggctggacctacctccatacgagacattcgaagatttgcgggagaagctgctgatggcggtggagaacgcccagggcttcgaaggagtggattag

SEQ ID NO: 56794 - DNA, 2508 bp, Artificial Sequence
  derived and/or modified sequence
atggagcggccatacacatttaaggacttcttgcttagacctcgttctcacaagagtagagtcaaagggtttctcaggctgaagatggcttatatgcctaagaacggcggacaggacgaagaaaattctgaccagcgcgatgacatggaacatggctgggaggtggtcgactctaacgattccgctagtcaacaccaagaggaactgcctcctccacctttgccaccgggatgggaagaaaaagttgataatctcggcaggacatactatgtgaatcacaataaccggaccacacagtggcacaggccaagtctgatggacgtatccagcgagagcgataacaatatccggcagataaaccaggaagccgcacatagaagattccgctcaaggcggcatataagcgaagatctggagccggagccctctgaaggaggagatgtgccagaaccctgggaaacaattagcgaagaagtcaatattgctggcgacagcctggggttagctctacccccaccaccggctagccccggttcccgcacttcaccgcaggaactcagtgaagaattgtcccgcagactgcagatcacacctgatagcaacggagagcagttctcatctctgatccagagagaaccttcctctcggcttcgcagctgttctgtgaccgacgccgtcgccgagcaaggccatcttccgcctcctagcgtagcctacgtccataccactcctggactcccttcaggctgggaagagcgaaaggacgccaaggggaggacctactatgtgaatcacaacaacaggacaacaacctggacacgacctattatgcagctggccgaggatggggctagtggaagtgcaacaaacagcaataatcatcttatcgagccccagatacggaggccccgaagtctcagttctcccacagttaccctttcagctccactggaaggagccaaagatagccccgttcgccgagccgtcaaggacacactgtccaacccccaaagtcctcagccctccccttacaactctcctaagccccaacataaagtcacccagtcattcctgcccccaggatgggagatgagaatcgcccctaatggcagacccttctttatcgatcacaataccaagacgacaacctgggaagaccctcgactcaagttccccgtccacatgcgctccaaaacctcactgaaccctaatgacttggggcctctaccgccagggtgggaggagagaatccatcttgatggtagaacgttttacatcgaccacaactctaaaatcacccagtgggaagaccctcgcctgcaaaaccctgccatcacaggcccaaaggcagtgccctactctcgggagttcaagcagaagtacgattacttccggaaaaagttgaaaaaaccagccgatatccccaatagatttgagatgaagctgcaccggaacaacatatttgaagagtcttatagacggatcatgagtgtgaaacgacccgacgttctgaaggccagactttggatcgaattcgaatccgaaaaaggattggattacgggggagttgccagagaatggttctttttactgtccaaggagatgttcaacccttactacggtctgtttgagtattcggctaccgacaactacacactgcagattaatccaaattccggactgtgcaacgaagaccatctctcgtattttacgttcatcggacgggttgccggactggcagttttccacggtaaattactcgacggctttttcattcgacctttctataaaatgatgctcggcaaacagataaccctcaacgatatggaatccgtagattccgagtattataactcgctaaaatggattctggaaaatgaccccacggaactggacttgatgttttgcattgatgaggagaatttcggtcagacttaccaggtggacctgaaacccaacggatcagagatcatggtgacgaacgagaacaagagagagtatatagacttagttatacagtggcgattcgttaatagagtgcagaagcagatgaacgccttcctagaaggattcaccgagctcttgcccatcgatctcatcaaaatctttgatgagaacgagttggaactgctcatgtgtggccttggcgacgtcgatgtgaacgattggaggcaacatagcatttataagaatgggtactgtcctaatcacccagtcatccagtggttttggaaagcagtgctccttatggacgccgaaaagcgaatccgcctgctgcaattcgtgaccggtacatcccgggtgcctatgaacgggttcgccgaactgtatggtagcaacggaccacagctcttcactatcgagcaatggggctcacctgaaaagttgccaagggcgcacacatgctttaaccgactggacctccccccttatgagacctttgaggacttaagagagaaactgctgatggcggtggaaaatgcccaaggcttcgagggcgtagactag

SEQ ID NO: 56795 - DNA, 2505 bp, Artificial Sequence
  derived and/or modified sequence
atggaacgaccctacacctttaaagacttcctacttcggccaagaagtcataagtcccgcgtaaaaggcttcctgcgtttaaagatggcctacatgcctaagaatgggggacaagacgaagaaaacagtgatcagagggacgacatggaacacggatgggaggtggtcgattcaaacgactccgcaagccagcatcaagaggagctgccacctcctcctctgcctcctggctgggaagagaaagttgataatctcgggagaacttattacgtgaaccacaacaacagaaccactcaatggcacaggcccagcctgatggacgtgtcttctgagtccgacaataacatacgtcagatcaaccaggaggcagctcaccgtcgtttcagaagccgcagacacatttctgaagatctagaacccgagccttcagagggtggggacgtccccgaaccctgggaaacaatcagcgaagaggtgaatatcgctggcgatagccttggcctggctctccctccaccacccgcatctcccggatcccgaacgagccctcaggaactgtctgaggaattatcccgccgtctgcagatcacacccgatagtaatggggaacaattcagtagcctgattcagcgtgagccatcaagccggcttagatcttgttcagtgactgatgctgtcgctgaacagggccacctaccacccccatcagtggcctatgtccatactacccctggactcccctccggctgggaagaaaggaaagatgcaaaggggagaacctactatgtcaaccacaataaccgcacaactacttggactagaccaatcatgcagctagccgaggacggggcttccgggagcgccacaaactcaaataatcaccttatcgagccacagatcagaagacctcgaagcctttctagcccaacagtcaccttgagtgctcctctggaaggtgccaaggattcccctgtaagacgagcagtcaaggacacactgtctaaccctcagtcaccgcagccctcaccctacaactcacccaagccacagcacaaggttacccagagtttcctccctccgggttgggaaatgcggattgcccctaacggacgacctttttttattgatcataataccaaaaccaccacttgggaagacccacggctgaaattcccagtgcacatgagatctaaaacgtcactgaacccaaacgatctcggccctctcccccctggttgggaggagcggatacatctagatggaagaacgttctacatcgatcacaatagcaagatcactcagtgggaggatcctcgactgcagaatcccgctataacaggacccgctgttccctactctcgagaattcaaacaaaagtacgattattttagaaagaaactcaagaaaccagccgacatacccaacaggttcgagatgaagctacaccgaaataatatttttgaggagtcttacagaaggataatgtcagtgaaaagaccagatgttctgaaggcccgtctctggattgaattcgaatccgagaagggccttgattatggaggcgttgcacgggagtggtttttcctgctctctaaagaaatgttcaatccttattacggattgttcgagtatagcgcaaccgataactataccttacagataaatcccaactcggggttgtgcaatgaagaccatcttagctacttcaccttcattggcagggttgctggtctggcagtgttccacggtaaacttctggacgggttttttatccgcccattctataaaatgatgctcggtaaacaaattacccttaatgatatggaaagtgtggactcagaatattataattccttaaaatggattcttgagaacgaccccactgagctcgatctaatgttctgcatcgacgaagagaattttggccagacttaccaggttgacctcaagccaaacgggtccgaaatcatggtcacaaatgagaacaaacgtgaatacattgatctggtgatccaatggcggtttgtaaacagggtacagaaacagatgaacgcgttcctagaaggttttactgagctgctgcctatcgacttgatcaaaatattcgatgaaaacgagctagaactgctcatgtgtggcctaggcgacgttgacgtgaatgactggagacagcattccatttacaagaacggttattgtccaaatcaccccgtgattcagtggttctggaaagcagtgctgctgatggacgctgagaaaagaatcagactgctgcagttcgtcaccggaacatcccgagtcccaatgaatggctttgcggaactatatggatccaacgggccacagctctttacaattgaacagtggggctcccccgagaagctgcccagggcccatacctgctttaacagactcgacctacctccgtacgaaacattcgaggacctgcgcgagaaactgctgatggctgtggagaacgcccagggtttcgaaggcgttgactag

SEQ ID NO: 56796 - DNA, 2505 bp, Artificial Sequence
  derived and/or modified sequence
atggaacgcccttatacttttaaggatttcttgttgcgccctcgttcccataagtcgcgcgtgaaggggttcctgcgcctcaagatggcttatatgcctaagaatgggggtcaggatgaggagaactctgaccagagagatgatatggagcatggatgggaagtcgtggattcaaacgactccgcatctcagcaccaggaggagctgccacctcccccacttcctcccggttgggaggagaaggtcgataatttaggcaggacatattacgtgaaccataataaccgaactactcagtggcaccgcccttccctgatggatgtgagttccgagagtgacaacaacattagacagattaaccaggaggccgcacacaggagattccgctctagaaggcacattagcgaagaccttgaaccagaaccaagcgaaggcggagatgtgcccgagccttgggagacaatctcagaggaggtgaacatagccggagattccctgggcctagcactcccacccccaccggcatcaccaggatcccgcacatctcctcaggaactgtcagaagaactttctagaagacttcagatcactccggactctaacggcgagcagttctcttccttgatacagcgggagcctagctcccgcttgcggtcatgttctgtcacagatgcagtggccgagcaggggcacctcccgcctccatctgtggcctatgtgcacaccaccccaggactcccatcaggctgggaggagagaaaagacgctaaggggcgtacatactacgtgaatcacaacaacagaacgaccacatggacgcggccaatcatgcagcttgccgaagatggcgcttccgggtctgcaacaaattccaacaaccatttaatcgaaccacaaattaggcggcctcgaagcctctcatcccccaccgtgaccctgagcgcacctttggaaggggcaaaggactctcccgttaggagagctgtgaaagatacactgtcaaatccgcagtctccacagccttcaccatataacagccccaaacctcagcacaaggtcactcagagcttcctgccccctgggtgggaaatgagaatcgcacccaatggcagaccgttctttattgaccacaacacaaagacaacaacatgggaagatcccaggctgaagttccccgtgcacatgcggagcaagacctctttgaaccctaacgatcttggccctctccctcctgggtgggaagagcgtatccatcttgacgggagaaccttctacattgaccacaattctaaaatcactcaatgggaagatccgagactacagaatccagcgatcaccggccctgccgtgccatacagccgcgaattcaaacagaagtacgactattttagaaaaaagctgaaaaagccggcagacatacctaaccggtttgagatgaagcttcacaggaataacatattcgaagaatcataccgcagaattatgtcagtgaaacgccctgacgtccttaaagcacggctgtggatcgagtttgaatcagagaagggtctggattacggaggcgtggccagggaatggttcttccttctgagcaaggaaatgttcaatccttattacggcttgttcgaatattccgctactgacaactacacattgcagatcaatcctaattctggcttatgcaacgaggaccacctctcctacttcactttcattggccgtgtagctggtctcgccgtttttcacggcaagttactggatgggttttttatccgccctttctacaaaatgatgcttggaaagcagataacacttaatgacatggaatctgtcgattcagaatactataattcactgaaatggattctggagaatgacccaacagaacttgatctgatgttctgtattgatgaagaaaactttggccagacctaccaggttgatcttaagcctaatggttctgagatcatggtcactaatgagaataagcgcgagtacattgatctcgtgattcagtggaggtttgtgaatagggttcagaagcagatgaacgctttcctcgaggggttcactgagctactgccaattgacctcattaaaatttttgacgaaaacgagctggagctcctaatgtgtggcctgggagatgtcgacgtgaacgattggcgccaacacagcatatacaagaacgggtactgcccaaaccacccggtgatccaatggttctggaaagcagtcctgttgatggacgctgagaagaggataagattgctgcagtttgttaccggaactagcagggtgccaatgaatggatttgctgaattatacggctctaacggaccccagctatttactattgaacagtggggaagtccagagaaactgcctcgagcccatacttgcttcaaccggctggatcttcctccgtacgaaactttcgaagatctgcgggaaaaactgctaatggcagtggaaaatgcacagggcttcgagggcgtagattag

SEQ ID NO: 56797 - DNA, 2508 bp, Artificial Sequence
  derived and/or modified sequence
atggagagaccctacaccttcaaggacttcctgctgagacccagaagccacaagagcagagtgaagggcttcctgagactgaagatggcctacatgcccaagaacggcggccaggacgaggagaacagcgaccagagagacgacatggagcacggctgggaggtggtggacagcaacgacagcgccagccagcaccaggaggagctgccccccccccccctgccccccggctgggaggagaaggtggacaacctgggcagaacctactacgtgaaccacaacaacagaaccacccagtggcacagacccagcctgatggacgtgagcagcgagagcgacaacaacatcagacagatcaaccaggaggccgcccacagaagattcagaagcagaagacacatcagcgaggacctggagcccgagcccagcgagggcggcgacgtgcccgagccctgggagaccatcagcgaggaggtgaacatcgccggcgacagcctgggcctggccctgccccccccccccgccagccccggcagcagaaccagcccccaggagctgagcgaggagctgagcagaagactgcagatcacccccgacagcaacggcgagcagttcagcagcctgatccagagagagcccagcagcagactgagaagctgcagcgtgaccgacgccgtggccgagcagggccacctgcccccccccagcgtggcctacgtgcacaccacccccggcctgcccagcggctgggaggagagaaaggacgccaagggcagaacctactacgtgaaccacaacaacagaaccaccacctggaccagacccatcatgcagctggccgaggacggcgccagcggcagcgccaccaacagcaacaaccacctgatcgagccccagatcagaagacccagaagcctgagcagccccaccgtgaccctgagcgcccccctggagggcgccaaggacagccccgtgagaagagccgtgaaggacaccctgagcaacccccagagcccccagcccagcccctacaacagccccaagccccagcacaaggtgacccagagcttcctgccccccggctgggagatgagaatcgcccccaacggcagacccttcttcatcgaccacaacaccaagaccaccacctgggaggaccccagactgaagttccccgtgcacatgagaagcaagaccagcctgaaccccaacgacctgggccccctgccccccggctgggaggagagaatccacctggacggcagaaccttctacatcgaccacaacagcaagatcacccagtgggaggaccccagactgcagaaccccgccatcaccggccccaaggccgtgccctacagcagagagttcaagcagaagtacgactacttcagaaagaagctgaagaagcccgccgacatccccaacagattcgagatgaagctgcacagaaacaacatcttcgaggagagctacagaagaatcatgagcgtgaagagacccgacgtgctgaaggccagactgtggatcgagttcgagagcgagaagggcctggactacggcggcgtggccagagagtggttcttcctgctgagcaaggagatgttcaacccctactacggcctgttcgagtacagcgccaccgacaactacaccctgcagatcaaccccaacagcggcctgtgcaacgaggaccacctgagctacttcaccttcatcggcagagtggccggcctggccgtgttccacggcaagctgctggacggcttcttcatcagacccttctacaagatgatgctgggcaagcagatcaccctgaacgacatggagagcgtggacagcgagtactacaacagcctgaagtggatcctggagaacgaccccaccgagctggacctgatgttctgcatcgacgaggagaacttcggccagacctaccaggtggacctgaagcccaacggcagcgagatcatggtgaccaacgagaacaagagagagtacatcgacctggtgatccagtggagattcgtgaacagagtgcagaagcagatgaacgccttcctggagggcttcaccgagctgctgcccatcgacctgatcaagatcttcgacgagaacgagctggagctgctgatgtgcggcctgggcgacgtggacgtgaacgactggagacagcacagcatctacaagaacggctactgccccaaccaccccgtgatccagtggttctggaaggccgtgctgctgatggacgccgagaagagaatcagactgctgcagttcgtgaccggcaccagcagagtgcccatgaacggcttcgccgagctgtacggcagcaacggcccccagctgttcaccatcgagcagtggggcagccccgagaagctgcccagagcccacacctgcttcaacagactggacctgcccccctacgagaccttcgaggacctgagagagaagctgctgatggccgtggagaacgcccagggcttcgagggcgtggactag

SEQ ID NO: 56798 - DNA, 2505 bp, Artificial Sequence
  derived and/or modified sequence
atggagagaccctacaccttcaaggacttcctgctgagacccagaagccacaagagcagagtgaagggcttcctgagactgaagatggcctacatgcccaagaacggcggccaggacgaggagaacagcgaccagagagacgacatggagcacggctgggaggtggtggacagcaacgacagcgccagccagcaccaggaggagctgccccccccccccctgccccccggctgggaggagaaggtggacaacctgggcagaacctactacgtgaaccacaacaacagaaccacccagtggcacagacccagcctgatggacgtgagcagcgagagcgacaacaacatcagacagatcaaccaggaggccgcccacagaagattcagaagcagaagacacatcagcgaggacctggagcccgagcccagcgagggcggcgacgtgcccgagccctgggagaccatcagcgaggaggtgaacatcgccggcgacagcctgggcctggccctgccccccccccccgccagccccggcagcagaaccagcccccaggagctgagcgaggagctgagcagaagactgcagatcacccccgacagcaacggcgagcagttcagcagcctgatccagagagagcccagcagcagactgagaagctgcagcgtgaccgacgccgtggccgagcagggccacctgcccccccccagcgtggcctacgtgcacaccacccccggcctgcccagcggctgggaggagagaaaggacgccaagggcagaacctactacgtgaaccacaacaacagaaccaccacctggaccagacccatcatgcagctggccgaggacggcgccagcggcagcgccaccaacagcaacaaccacctgatcgagccccagatcagaagacccagaagcctgagcagccccaccgtgaccctgagcgcccccctggagggcgccaaggacagccccgtgagaagagccgtgaaggacaccctgagcaacccccagagcccccagcccagcccctacaacagccccaagccccagcacaaggtgacccagagcttcctgccccccggctgggagatgagaatcgcccccaacggcagacccttcttcatcgaccacaacaccaagaccaccacctgggaggaccccagactgaagttccccgtgcacatgagaagcaagaccagcctgaaccccaacgacctgggccccctgccccccggctgggaggagagaatccacctggacggcagaaccttctacatcgaccacaacagcaagatcacccagtgggaggaccccagactgcagaaccccgccatcaccggccccgccgtgccctacagcagagagttcaagcagaagtacgactacttcagaaagaagctgaagaagcccgccgacatccccaacagattcgagatgaagctgcacagaaacaacatcttcgaggagagctacagaagaatcatgagcgtgaagagacccgacgtgctgaaggccagactgtggatcgagttcgagagcgagaagggcctggactacggcggcgtggccagagagtggttcttcctgctgagcaaggagatgttcaacccctactacggcctgttcgagtacagcgccaccgacaactacaccctgcagatcaaccccaacagcggcctgtgcaacgaggaccacctgagctacttcaccttcatcggcagagtggccggcctggccgtgttccacggcaagctgctggacggcttcttcatcagacccttctacaagatgatgctgggcaagcagatcaccctgaacgacatggagagcgtggacagcgagtactacaacagcctgaagtggatcctggagaacgaccccaccgagctggacctgatgttctgcatcgacgaggagaacttcggccagacctaccaggtggacctgaagcccaacggcagcgagatcatggtgaccaacgagaacaagagagagtacatcgacctggtgatccagtggagattcgtgaacagagtgcagaagcagatgaacgccttcctggagggcttcaccgagctgctgcccatcgacctgatcaagatcttcgacgagaacgagctggagctgctgatgtgcggcctgggcgacgtggacgtgaacgactggagacagcacagcatctacaagaacggctactgccccaaccaccccgtgatccagtggttctggaaggccgtgctgctgatggacgccgagaagagaatcagactgctgcagttcgtgaccggcaccagcagagtgcccatgaacggcttcgccgagctgtacggcagcaacggcccccagctgttcaccatcgagcagtggggcagccccgagaagctgcccagagcccacacctgcttcaacagactggacctgcccccctacgagaccttcgaggacctgagagagaagctgctgatggccgtggagaacgcccagggcttcgagggcgtggactag

SEQ ID NO: 56799 - protein, 102 aa, Artificial Sequence
  derived and/or modified sequence
MASPEHPGSPGCMGPITQCTARTQQEAPATGPDLPHPGPDGHLDTHSGLSSNSSMTTRELQQYWQNQKCRWKHVKLLFEIASARIEERKVSKFVAPAPDATP

SEQ ID NO: 56800 - DNA, 309 bp, Artificial Sequence
  derived and/or modified sequence
atggccagccccgagcaccccggcagccccggctgcatgggccccatcacccagtgcaccgccagaacccagcaggaggcccccgccaccggccccgacctgccccaccccggccccgacggccacctggacacccacagcggcctgagcagcaacagcagcatgaccaccagagagctgcagcagtactggcagaaccagaagtgcagatggaagcacgtgaagctgctgttcgagatcgccagcgccagaatcgaggagagaaaggtgagcaagttcgtggcccccgcccccgacgccaccccctag

SEQ ID NO: 56801 - DNA, 309 bp, Artificial Sequence
  derived and/or modified sequence
atggcttcaccggagcacccagggtccccaggatgtatgggaccaataacccagtgtaccgccaggacccagcaagaagcccccgctacagggcccgatctgccccaccctgggcccgacggccacctggatactcattcaggactctcgagcaattcttccatgaccaccagagaactccagcaatattggcagaatcagaaatgcagatggaaacatgtaaaactgctattcgaaatcgctagcgcaagaatcgaggagagaaaggtgtccaaatttgtcgctcctgcacccgatgctaccccttag

SEQ ID NO: 56802 - DNA, 309 bp, Artificial Sequence
  derived and/or modified sequence
atggccagccctgagcaccctggcagccctggctgcatgggccccatcacccagtgcacagcccggacccagcaggaggccccagccaccggccctgacctgccccaccctggcccagatggccacctggacacccacagcggcctgagcagcaacagctccatgaccacccgggagctgcagcagtactggcagaaccagaagtgccgctggaagcacgtgaagctgctgtttgagatcgccagcgccagaattgaggagaggaaggtgtccaagtttgtggccccagccccagatgccaccccctag

SEQ ID NO: 56803 - DNA, 309 bp, Artificial Sequence
  derived and/or modified sequence
atggccagccccgagcaccccggcagccccggctgcatgggccccatcacacagtgtactgcacggacacagcaggaggcgcctgctacaggcccggacctgccacatcctggcccggacggtcacctggacacccattccggcttgtcctctaattctagcatgactacccgagagctgcaacagtactggcaaaaccaaaagtgtcggtggaagcacgtgaagctgttgttcgagattgcttccgctcgaatcgaggagcgcaaggtgtccaagtttgtcgctcccgctcctgatgccactccatag

SEQ ID NO: 56804 - DNA, 309 bp, Artificial Sequence
  derived and/or modified sequence
atggcatcaccagagcatcccggaagccccggttgcatggggccaatcacccagtgcaccgcaaggacacagcaggaggcccctgcaacagggccagacttgcctcaccccggaccagacggccaccttgacacacactccggattgtctagcaattcttctatgactaccagagagctccagcaatattggcagaatcagaaatgccgatggaaacacgtcaagctgctcttcgaaatagcttccgcgaggattgaggaacgcaaggtgtctaagttcgttgcccctgcccctgatgccaccccttag

SEQ ID NO: 56805 - DNA, 2197 bp, Artificial Sequence
  derived and/or modified sequence
gggcgatcagaagcaggtcacacagcctgtttcctgttttcaaacggggaacttagaaagtggcagcccctcggcttgtcgccggagctgagaaccaagagctcgaaggggccatatgacactcctcccggacccctggacacacacagccctggagactggagccttggagcatggcaagtccagagcaccctgggagccctggctgcatgggacccataacccagtgcacggcaaggacccagcaggaagcaccagccactggccccgacctcccgcacccaggacctgacgggcacttagacacacacagtggcctgagctccaactccagcatgaccacgcgggagcttcagcagtactggcagaaccagaaatgccgctggaagcacgtcaaactgctctttgagatcgcttcagctcgcatcgaggagagaaaagtctctaagtttgtggctccggctcctgacgccacaccctgatatcaagaccctcagatggagcgagcgttctgggctggtcgaagcctgaagccgcagtatgtccttgagtgggtccccccctacccatctagctgttgcccccatggtaagatcaagaaaatgccctcccctccaaaagtccccacgccgagccctcatctgtcagctcccaggctcggccccctcactagctccaggctgggaggcacagttcagggcagactgtggcccctcagcatagcatggacttagctctgctctctagtggctgtccccatagctagaactctgttttggagcagcaaaactagttccacctgctggtagggctaagttgactcccaacatgtccccagcgtgttggtgttgggaaccttgatctagctgctcgttttctcagtaaccaaagatccctggcactcctacgatgtctcaggccttatctagagctggggatacagcagtgaccaggacagaactggtccctgcctcacggaagtgaagtgtcaggaggccactcccaaagcaaatggaagctgggacagaatgatgtcctcagccaggtggtcagggaaggcttctcagagggggcgctgttcaaagaatcacagagcatacaaaggagctggccctgggagcacagagaggggagaattttaggcaaagaggtagcaggagcacagccctgaggcaggaaactacccccccaccaccctcggcatcctcagttctggtttgcacccagaaagggggtaggtccaggacacacccggactgatgtgtcacactggctgtgccagctgagagagtgggctccaggcaccactaacagagaagccttgcaaggcaggtccatgcaccgcccgcctccagttaccactcattgcaaaggaaatgagctgggagcctgtgtgtgggccgtgcagacccttttggttacaagccacaaaaacccaggttaatctgatgaggaaggaatttattatctgtaaagtccaggagcaggctagctttacaccaagcaggatccaaggacccacacttgtcacctcatatctctctctctctcccactttcgctttctctgtctcttcttagttctgctttcctccactgtgccttcgctctcagagagagctctcccctggcagtgacaagatggctgcagcagctccagcaacctcagaggactcccccatccagggtccttgtgagctcctcatctgtaggatgtgcagtaaacactcacgtgtcctttcctgaggagcccagtggctggggtgggggctgaggggcagcccctatgccctcacagtgcagcaaccttggttagctcacccatcagggcagacttgggcagaaatcatgtcttggcatattgttttgtaatctgctttttaaattgtcactatatattatgagcatttccctataatatacaatattcttccacattatgtttaatggtttcattgtattctaatgcatattctatagttattttaaccaccccacaatgttgcaaaatgtccttatttgggacaacactgctgcaaacactttgacccatatgtcctttttgtgtgcactcttatggcaacttctaacggtggcatttctgaatcatagacacttttttgacttctacatattttatttttttagttgacaaaaactgtatttatgaatcataaacacttaatgattttgctatt

SEQ ID NO: 56806 - protein, 1141 aa, Artificial Sequence
  derived and/or modified sequence
MAGARSRDPWGASGICYLFGSLLVELLFSRAVAFNLDVMGALRKEGEPGSLFGFSVALHRQLQPRPQSWLLVGAPQALALPGQQANRTGGLFACPLSLEETDCYRVDIDQGADMQKESKENQWLGVSVRSQGPGGKIVTCAHRYEARQRVDQILETRDMIGRCFVLSQDLAIRDELDGGEWKFCEGRPQGHEQFGFCQQGTAAAFSPDSHYLLFGAPGTYNWKGTARVELCAQGSADLAHLDDGPYEAGGEKEQDPRLIPVPANSYFGFSIDSGKGLVRAEELSFVAGAPRANHKGAVVILRKDSASRLVPEVMLSGERLTSGFGYSLAVADLNSDGWPDLIVGAPYFFERQEELGGAVYVYLNQGGHWAGISPLRLCGSPDSMFGISLAVLGDLNQDGFPDIAVGAPFDGDGKVFIYHGSSLGVVAKPSQVLEGEAVGIKSFGYSLSGSLDMDGNQYPDLLVGSLADTAVLFRARPILHVSHEVSIAPRSIDLEQPNCAGGHSVCVDLRVCFSYIAVPSSYSPTVALDYVLDADTDRRLRGQVPRVTFLSRNLEEPKHQASGTVWLKHQHDRVCGDAMFQLQENVKDKLRAIVVTLSYSLQTPRLRRQAPGQGLPPVAPILNAHQPSTQRAEIHFLKQGCGEDKICQSNLQLVRARFCTRVSDTEFQPLPMDVDGTTALFALSGQPVIGLELMVTNLPSDPAQPQADGDDAHEAQLLVMLPDSLHYSGVRALDPAEKPLCLSNENASHVECELGNPMKRGAQVTFYLILSTSGISIETTELEVELLLATISEQELHPVSARARVFIELPLSIAGMAIPQQLFFSGVVRGERAMQSERDVGSKVKYEVTVSNQGQSLRTLGSAFLNIMWPHEIANGKWLLYPMQVELEGGQGPGQKGLCSPRPNILHLDVDSRDRRRRELEPPEQQEPGERQEPSMSWWPVSSAEKKKNITLDCARGTANCVVFSCPLYSFDRAAVLHVWGRLWNSTFLEEYSAVKSLEVIVRANITVKSSIKNLMLRDASTVIPVMVYLDPMAVVAEGVPWWVILLAVLAGLLVLALLVLLLWKMGFFKRAKHPEATVPQYHAVKIPREDRQQFKEEKTGTILRNNWGSPRREGPDAHPILAADGHPELGPDGHPGPGTA

SEQ ID NO: 56807 - DNA, 3426 bp, Artificial Sequence
  derived and/or modified sequence
atggccggcgccagaagcagagacccctggggcgccagcggcatctgctacctgttcggcagcctgctggtggagctgctgttcagcagagccgtggccttcaacctggacgtgatgggcgccctgagaaaggagggcgagcccggcagcctgttcggcttcagcgtggccctgcacagacagctgcagcccagaccccagagctggctgctggtgggcgccccccaggccctggccctgcccggccagcaggccaacagaaccggcggcctgttcgcctgccccctgagcctggaggagaccgactgctacagagtggacatcgaccagggcgccgacatgcagaaggagagcaaggagaaccagtggctgggcgtgagcgtgagaagccagggccccggcggcaagatcgtgacctgcgcccacagatacgaggccagacagagagtggaccagatcctggagaccagagacatgatcggcagatgcttcgtgctgagccaggacctggccatcagagacgagctggacggcggcgagtggaagttctgcgagggcagaccccagggccacgagcagttcggcttctgccagcagggcaccgccgccgccttcagccccgacagccactacctgctgttcggcgcccccggcacctacaactggaagggcaccgccagagtggagctgtgcgcccagggcagcgccgacctggcccacctggacgacggcccctacgaggccggcggcgagaaggagcaggaccccagactgatccccgtgcccgccaacagctacttcggcttcagcatcgacagcggcaagggcctggtgagagccgaggagctgagcttcgtggccggcgcccccagagccaaccacaagggcgccgtggtgatcctgagaaaggacagcgccagcagactggtgcccgaggtgatgctgagcggcgagagactgaccagcggcttcggctacagcctggccgtggccgacctgaacagcgacggctggcccgacctgatcgtgggcgccccctacttcttcgagagacaggaggagctgggcggcgccgtgtacgtgtacctgaaccagggcggccactgggccggcatcagccccctgagactgtgcggcagccccgacagcatgttcggcatcagcctggccgtgctgggcgacctgaaccaggacggcttccccgacatcgccgtgggcgcccccttcgacggcgacggcaaggtgttcatctaccacggcagcagcctgggcgtggtggccaagcccagccaggtgctggagggcgaggccgtgggcatcaagagcttcggctacagcctgagcggcagcctggacatggacggcaaccagtaccccgacctgctggtgggcagcctggccgacaccgccgtgctgttcagagccagacccatcctgcacgtgagccacgaggtgagcatcgcccccagaagcatcgacctggagcagcccaactgcgccggcggccacagcgtgtgcgtggacctgagagtgtgcttcagctacatcgccgtgcccagcagctacagccccaccgtggccctggactacgtgctggacgccgacaccgacagaagactgagaggccaggtgcccagagtgaccttcctgagcagaaacctggaggagcccaagcaccaggccagcggcaccgtgtggctgaagcaccagcacgacagagtgtgcggcgacgccatgttccagctgcaggagaacgtgaaggacaagctgagagccatcgtggtgaccctgagctacagcctgcagacccccagactgagaagacaggcccccggccagggcctgccccccgtggcccccatcctgaacgcccaccagcccagcacccagagagccgagatccacttcctgaagcagggctgcggcgaggacaagatctgccagagcaacctgcagctggtgagagccagattctgcaccagagtgagcgacaccgagttccagcccctgcccatggacgtggacggcaccaccgccctgttcgccctgagcggccagcccgtgatcggcctggagctgatggtgaccaacctgcccagcgaccccgcccagccccaggccgacggcgacgacgcccacgaggcccagctgctggtgatgctgcccgacagcctgcactacagcggcgtgagagccctggaccccgccgagaagcccctgtgcctgagcaacgagaacgccagccacgtggagtgcgagctgggcaaccccatgaagagaggcgcccaggtgaccttctacctgatcctgagcaccagcggcatcagcatcgagaccaccgagctggaggtggagctgctgctggccaccatcagcgagcaggagctgcaccccgtgagcgccagagccagagtgttcatcgagctgcccctgagcatcgccggcatggccatcccccagcagctgttcttcagcggcgtggtgagaggcgagagagccatgcagagcgagagagacgtgggcagcaaggtgaagtacgaggtgaccgtgagcaaccagggccagagcctgagaaccctgggcagcgccttcctgaacatcatgtggccccacgagatcgccaacggcaagtggctgctgtaccccatgcaggtggagctggagggcggccagggccccggccagaagggcctgtgcagccccagacccaacatcctgcacctggacgtggacagcagagacagaagaagaagagagctggagccccccgagcagcaggagcccggcgagagacaggagcccagcatgagctggtggcccgtgagcagcgccgagaagaagaagaacatcaccctggactgcgccagaggcaccgccaactgcgtggtgttcagctgccccctgtacagcttcgacagagccgccgtgctgcacgtgtggggcagactgtggaacagcaccttcctggaggagtacagcgccgtgaagagcctggaggtgatcgtgagagccaacatcaccgtgaagagcagcatcaagaacctgatgctgagagacgccagcaccgtgatccccgtgatggtgtacctggaccccatggccgtggtggccgagggcgtgccctggtgggtgatcctgctggccgtgctggccggcctgctggtgctggccctgctggtgctgctgctgtggaagatgggcttcttcaagagagccaagcaccccgaggccaccgtgccccagtaccacgccgtgaagatccccagagaggacagacagcagttcaaggaggagaagaccggcaccatcctgagaaacaactggggcagccccagaagagagggccccgacgcccaccccatcctggccgccgacggccaccccgagctgggccccgacggccaccccggccccggcaccgcctag

SEQ ID NO: 56808 - DNA, 3426 bp, Artificial Sequence
  derived and/or modified sequence
atggctggcgctcggtcgcgcgatccctggggcgcctccgggatatgttacttgttcggcagtttacttgtggagctgctcttcagtagggccgtggctttcaatttagacgtaatgggcgccctgcgtaaggaaggcgagcccggatccctattcgggttttccgttgcgctgcacagacagctccagccccggccccagagctggctgctagtgggggccccccaagcactggcattgccaggacagcaggccaaccgcacgggcggcctcttcgcctgtccactgtctttagaggagactgattgctacagagtggacatcgaccaaggcgcagatatgcaaaaagagtcaaaggaaaatcaatggttaggcgtcagcgtcaggagccaggggcccggcggtaagatcgtaacatgtgcccatagatacgaggccaggcagcgtgtggatcagatcctggaaacgcgcgatatgatcggacggtgcttcgtcctgtctcaggacctggcaattcgagacgagctcgacggaggggaatggaagttctgcgaaggcagacctcagggacacgaacagttcggcttttgtcagcagggaacagccgcggcgttctctcccgatagccactaccttctatttggggccccaggtacgtacaactggaagggcactgcccgtgtcgaactctgcgctcaaggcagtgctgatctggcgcacctggatgacggaccttatgaggccgggggagaaaaggaacaagacccacggctaattccggtccccgctaactcttacttcgggttcagcattgacagcggaaaaggactggttcgcgcagaggaactgagctttgttgcgggagcaccaagggctaatcacaaaggggccgttgtgatcctgagaaaggattctgcatccaggctggtccccgaagtcatgctgagcggtgagcgtttaacatcaggctttggctacagcctggctgttgcagacttaaattccgacgggtggcccgacctgatcgtgggtgcgccatactttttcgaaaggcaggaggagttaggcggagctgtctatgtctacctgaaccagggagggcattgggcaggtatttcccctctcaggctgtgcggatctccagattctatgttcggtatcagcctcgccgtactgggtgacttaaatcaggacggctttcctgacattgcggttggcgcacccttcgacggcgacggtaaggtgtttatttaccacggctccagcttaggagtggtagccaaaccttctcaggtattggagggagaggcagttggcattaagagtttcggatattcactgtccggtagtttggatatggatgggaatcagtatcccgatctcctggtagggagtcttgctgacactgccgtactgtttagagccaggcccatcctacatgtgtcacacgaagtgagtatagcccccaggtctattgaccttgaacagcctaactgtgctggggggcatagtgtgtgtgtggatctgagggtgtgtttctcttacatcgccgtgcctagttcttactctcctactgtggcgctcgactacgttcttgatgctgacactgaccgacggctgcgtgggcaggtgccgcgggtgacgttcttgagccgcaaccttgaagagcccaaacatcaggcatctggaacagtgtggctgaaacatcagcacgatcgtgtgtgcggcgatgcaatgtttcagctccaggagaatgtgaaagataagctacgggcaattgttgttacacttagctacagcctacaaactccgagactgagaagacaggctccaggccagggcctgccgcccgtggcccctatcctcaatgcccaccagcccagcacccagcgggccgagatccatttcctcaaacaaggctgtggggaggacaaaatctgccagtcaaacttacaattggttcgagcccggttctgcactagggtctccgacactgaatttcagcccttgcctatggacgtggacggcactaccgccctgttcgccctttctgggcagcccgtcattggtttagaattgatggtgacaaacctgccctctgatcctgctcagccacaggctgatggggacgatgctcatgaagcccagctgctggtaatgctgccagattccctgcactactctggtgtgagggctctggaccctgccgagaaaccactttgtctgagcaatgaaaacgcctctcatgtggagtgcgaactcggaaaccccatgaagcgtggcgcacaggtgactttctatcttattttgtccacatccggaatctccattgaaactaccgaactggaagttgaactgctcctggccaccatcagtgaacaagagcttcaccccgtgagcgcgcgcgcgagggtttttattgaacttccactgagtatagcagggatggctatcccgcaacagctgttttttagcggggtcgtgaggggggagagagctatgcagtcagaacgcgacgtcggttcaaaggtcaagtatgaggtaacagtgtccaatcagggtcagtctctgcgcacactgggatctgctttccttaacattatgtggccacacgagattgccaacggaaagtggctgctgtatccgatgcaggtcgaactcgagggcgggcagggtccagggcaaaagggcctgtgttctccccgccccaacattttacatttggacgttgactctcgagaccggcgacgcagagaacttgagccacccgagcagcaggagccaggtgaacgtcaagaaccgagcatgagctggtggcctgtttcttcagccgaaaagaagaaaaatatcaccctagactgtgcacgagggaccgcaaattgtgtggtgtttagctgtcccctttattctttcgacagagccgccgtgttgcacgtctggggccgactgtggaactctacctttctagaggagtatagcgccgttaaatctttagaagtgatagtaagggctaacatcaccgttaaatcaagcatcaagaacctgatgttgcgggatgcgtccaccgtcataccggttatggtgtacctggatccaatggccgtagtcgccgaaggcgtcccttggtgggttattcttctcgcagtgctggccggtctgttggttctggcattgctggtcctcctgctttggaaaatggggttcttcaagagggctaagcaccccgaggcaacagttccacaataccatgccgttaagataccacgtgaggacagacagcagtttaaagaagagaaaacaggaactatccttcggaacaattggggttcaccccgccgagagggccccgacgcacatccaattctggccgctgatgggcatcccgaacttgggccagacggccacccaggacccgggacagcttag

SEQ ID NO: 56809 - DNA, 3426 bp, Artificial Sequence
  derived and/or modified sequence
atggccggggcccggagccgggacccctggggcgccagcggcatctgctacctgtttggcagcctgctggtggagctgctcttcagcagagctgtggccttcaacctggatgtgatgggcgccctgaggaaggagggggagcccggcagcctgtttggcttctctgtggccctgcaccggcagctgcagccccggccccagagctggctgctggtgggcgccccccaggccctggccctgcccggccagcaggccaacagaactggaggcctgtttgcctgccccctgagcctggaggagacagactgctacagagtggacatcgaccagggcgctgacatgcagaaggagagcaaggagaaccagtggctgggcgtgtctgtgcgcagccagggccctgggggcaagatcgtgacctgtgcccacagatatgaggcccggcagagggtggaccagatcctggagacccgggacatgattggccgctgctttgtgctgagccaggacctggccatcagagatgagctggatggaggagagtggaagttctgtgagggccggccccagggccacgagcagtttggcttctgccagcagggcacagctgctgccttctccccagacagccactacctgctgtttggagcccctggcacctacaactggaagggcacagcccgggtggagctgtgtgcccagggcagcgctgacctggcccacctggatgatggcccctatgaggccggcggggagaaggagcaggaccccaggctcatccctgtgcctgccaacagctacttcggcttcagcattgattctgggaagggcctggtgcgggcagaggagctgagctttgtggccggggccccccgggccaaccacaagggagctgtggtgatcctgaggaaggacagcgccagccggctggtgcctgaggtgatgctgagcggggagcggctgaccagcggcttcggctacagcctggccgtggccgacctgaacagtgatggctggccagacctgattgtgggcgccccctacttctttgagcggcaggaggagctgggcggcgctgtgtatgtgtacctgaaccagggcggccactgggccggcatcagccccctgcggctgtgtggcagcccagacagcatgtttggcatcagcctggccgtgctgggggacctgaaccaggacggcttcccagacattgctgtgggcgccccctttgatggagatggcaaggtgttcatctaccacggcagcagcctgggcgtggtggccaagcccagccaggtgctggagggggaggccgtgggcatcaagagctttggctacagcctgagcggcagcctggacatggatggcaaccagtacccagacctgctggtgggcagcctggccgacacagctgtgctcttccgggcccggcccatcctgcacgtgtcccatgaggtgtccatcgcccccaggagcattgacctggagcagcccaactgtgccggcggccacagcgtgtgtgtggacctgcgggtgtgcttctcctacatcgctgtgcccagcagctacagccccaccgtggccctggactatgtgctggatgctgacacagaccggcggctgcggggccaggtgccccgggtgaccttcctgagcaggaacctggaggagcccaagcaccaggccagcggcaccgtgtggctgaagcaccagcacgacagagtgtgtggagatgccatgttccagctgcaggagaatgtgaaggacaagctgcgggccatcgtggtgaccctgagctacagcctgcagaccccccggctgcggcggcaggcccctggccagggcctgccccctgtggcccccatcctgaatgcccaccagcccagcacccagagagctgagatccacttcctgaagcagggctgtggggaggacaagatctgccagagcaacctgcagctggtgcgggcccgcttctgcaccagggtgtctgacacagagttccagcccctgcccatggatgtggatggcaccacagccctgtttgccctgagcggccagcctgtgattggcctggagctgatggtgaccaacctgcccagcgaccctgcccagccccaggctgatggagatgatgcccacgaggcccagctgctggtgatgctgcctgacagcctgcactacagcggcgtgcgggccctggaccctgctgagaagcccctgtgcctgagcaatgaaaatgccagccacgtggagtgtgagctgggcaaccccatgaagagaggagcccaggtgaccttctacctgatcctgagcaccagcggcatcagcattgagaccacagagctggaggtggagctgctgctggccaccatcagcgagcaggagctgcaccctgtgtctgcccgggcccgggtcttcatcgagctgcccctgagcattgctggcatggccatcccccagcagctgttcttctctggagtggtgcggggggagcgggccatgcagagcgagagagatgtgggcagcaaggtgaagtatgaggtgacagtgagcaaccagggccagagcctgcggaccctgggcagcgccttcctgaacatcatgtggccccatgaaattgccaacgggaagtggctgctgtaccccatgcaggtggagctggagggcggccagggccctggccagaagggcctgtgcagcccccggcccaacatcctgcacctggatgtggacagccgggacagaagaagaagagagctggagcccccagagcagcaggagcccggggagcggcaggagcccagcatgtcctggtggcctgtgtcctctgctgagaagaagaagaacatcaccctggactgtgcccggggcacagccaactgtgtggtgttcagctgccccctgtacagctttgacagagctgctgtgctgcacgtgtggggccgcctgtggaacagcaccttcctggaggagtacagcgctgtgaagagcctggaggtgattgtgcgggccaacatcaccgtgaagagcagcatcaagaacctgatgctgagagatgccagcaccgtcatccctgtgatggtgtacctggaccccatggctgtggtggccgagggcgtgccctggtgggtgatcctgctggccgtgctggccggcctgctggtgctggccctgctggtgctgctgctgtggaagatgggcttcttcaagagggccaagcaccctgaggccaccgtgccccagtaccacgctgtgaagatcccccgggaggaccggcagcagttcaaggaggagaagacaggcaccatcctgaggaacaactggggcagcccccggcgggagggcccagatgcccaccccatcctggccgcagatggccaccctgagctgggcccagatggccaccctggccctggaacagcctag

SEQ ID NO: 56810 - DNA, 3935 bp, Artificial Sequence
  derived and/or modified sequence
ctcgcgcagggatcgtcccatggccggggctcggagccgcgacccttggggggcctccgggatttgctacctttttggctccctgctcgtcgaactgctcttctcacgggctgtcgccttcaatctggacgtgatgggtgccttgcgcaaggagggcgagccaggcagcctcttcggcttctctgtggccctgcaccggcagttgcagccccgaccccagagctggctgctggtgggtgctccccaggccctggctcttcctgggcagcaggcgaatcgcactggaggcctcttcgcttgcccgttgagcctggaggagactgactgctacagagtggacatcgaccagggagctgatatgcaaaaggaaagcaaggagaaccagtggttgggagtcagtgttcggagccaggggcctgggggcaagattgttacctgtgcacaccgatatgaggcaaggcagcgagtggaccagatcctggagacgcgggatatgattggtcgctgctttgtgctcagccaggacctggccatccgggatgagttggatggtggggaatggaagttctgtgagggacgcccccaaggccatgaacaatttgggttctgccagcagggcacagctgccgccttctcccctgatagccactacctcctctttggggccccaggaacctataattggaagggcacggccagggtggagctctgtgcacagggctcagcggacctggcacacctggacgacggtccctacgaggcggggggagagaaggagcaggacccccgcctcatcccggtccctgccaacagctactttggcttctctattgactcggggaaaggtctggtgcgtgcagaagagctgagctttgtggctggagccccccgcgccaaccacaagggtgctgtggtcatcctgcgcaaggacagcgccagtcgcctggtgcccgaggttatgctgtctggggagcgcctgacctccggctttggctactcactggctgtggctgacctcaacagtgatggctggccagacctgatagtgggtgccccctacttctttgagcgccaagaagagctggggggtgctgtgtatgtgtacttgaaccaggggggtcactgggctgggatctcccctctccggctctgcggctcccctgactccatgttcgggatcagcctggctgtcctgggggacctcaaccaagatggctttccagatattgcagtgggtgccccctttgatggtgatgggaaagtcttcatctaccatgggagcagcctgggggttgtcgccaaaccttcacaggtgctggagggcgaggctgtgggcatcaagagcttcggctactccctgtcaggcagcttggatatggatgggaaccaataccctgacctgctggtgggctccctggctgacaccgcagtgctcttcagggccagacccatcctccatgtctcccatgaggtctctattgctccacgaagcatcgacctggagcagcccaactgtgctggcggccactcggtctgtgtggacctaagggtctgtttcagctacattgcagtccccagcagctatagccctactgtggccctggactatgtgttagatgcggacacagaccggaggctccggggccaggttccccgtgtgacgttcctgagccgtaacctggaagaacccaagcaccaggcctcgggcaccgtgtggctgaagcaccagcatgaccgagtctgtggagacgccatgttccagctccaggaaaatgtcaaagacaagcttcgggccattgtagtgaccttgtcctacagtctccagacccctcggctccggcgacaggctcctggccaggggctgcctccagtggcccccatcctcaatgcccaccagcccagcacccagcgggcagagatccacttcctgaagcaaggctgtggtgaagacaagatctgccagagcaatctgcagctggtccgcgcccgcttctgtacccgggtcagcgacacggaattccaacctctgcccatggatgtggatggaacaacagccctgtttgcactgagtgggcagccagtcattggcctggagctgatggtcaccaacctgccatcggacccagcccagccccaggctgatggggatgatgcccatgaagcccagctcctggtcatgcttcctgactcactgcactactcaggggtccgggccctggaccctgcggagaagccactctgcctgtccaatgagaatgcctcccatgttgagtgtgagctggggaaccccatgaagagaggtgcccaggtcaccttctacctcatccttagcacctccgggatcagcattgagaccacggaactggaggtagagctgctgttggccacgatcagtgagcaggagctgcatccagtctctgcacgagcccgtgtcttcattgagctgccactgtccattgcaggaatggccattccccagcaactcttcttctctggtgtggtgaggggcgagagagccatgcagtctgagcgggatgtgggcagcaaggtcaagtatgaggtcacggtttccaaccaaggccagtcgctcagaaccctgggctctgccttcctcaacatcatgtggcctcatgagattgccaatgggaagtggttgctgtacccaatgcaggttgagctggagggcgggcaggggcctgggcagaaagggctttgctctcccaggcccaacatcctccacctggatgtggacagtagggataggaggcggcgggagctggagccacctgagcagcaggagcctggtgagcggcaggagcccagcatgtcctggtggccagtgtcctctgctgagaagaagaaaaacatcaccctggactgcgcccggggcacggccaactgtgtggtgttcagctgcccactctacagctttgaccgcgcggctgtgctgcatgtctggggccgtctctggaacagcacctttctggaggagtactcagctgtgaagtccctggaagtgattgtccgggccaacatcacagtgaagtcctccataaagaacttgatgctccgagatgcctccacagtgatcccagtgatggtatacttggaccccatggctgtggtggcagaaggagtgccctggtgggtcatcctcctggctgtactggctgggctgctggtgctagcactgctggtgctgctcctgtggaagatgggattcttcaaacgggcgaagcaccccgaggccaccgtgccccagtaccatgcggtgaagattcctcgggaagaccgacagcagttcaaggaggagaagacgggcaccatcctgaggaacaactggggcagcccccggcgggagggcccggatgcacaccccatcctggctgctgacgggcatcccgagctgggccccgatgggcatccagggccaggcaccgcctaggttcccatgtcccagcctggcctgtggctgccctccatcccttccccagagatggctccttgggatgaagagggtagagtgggctgctggtgtcgcatcaagatttggcaggatcggcttcctcaggggcacagacctctcccacccacaagaactcctcccacccaacttccccttagagtgctgtgagatgagagtgggtaaatcagggacagggccatggggtagggtgagaagggcaggggtgtcctgatgcaaaggtggggagaagggatcctaatcccttcctctcccattcaccctgtgtaacaggaccccaaggacctgcctccccggaagtgccttaacctagagggtcggggaggaggttgtgtcactgactcaggctgctccttctctagtttcccctctcatctgaccttagtttgctgccatcagtctagtggtttcgtggtttcgtctatttattaaaaaatatttgagaacaaaa

SEQ ID NO: 56811 - DNA, 3426 bp, Artificial Sequence
  derived and/or modified sequence
atggccggcgcccggagccgggacccctggggcgccagcggcatctgttatctgttcggttctctgctcgttgaactgctttttagccgagcggtagcgttcaacctggatgtgatgggggccctgaggaaagagggagaacctggcagtcttttcgggttttcggtggccctgcaccgtcagctgcagcctagacctcaaagttggcttctggtaggggccccccaagcactcgctctccctgggcagcaagcaaatcggactggcggcttattcgcttgccccctgtcccttgaggaaaccgactgttaccgggtcgacattgatcagggagccgatatgcaaaaggaatccaaggagaaccagtggctgggggtttccgtgaggtctcaaggacctggcggaaaaatagttacctgtgcacacagatatgaggctagacagcgcgtggatcagattctggagacccgcgacatgattggcagatgcttcgtgctgagccaggatctggcaattagagacgaactggacggcggagaatggaaattctgcgagggcaggccacaggggcacgaacaatttggtttctgccagcagggtaccgctgcagcgttctctcctgatagtcactacctcctgtttggtgcccccggcacttacaactggaaagggaccgcgagagtagagttgtgtgctcagggttcagccgacctggctcatctcgacgatgggccatacgaggctgggggggagaaggagcaggacccacggctcataccagtccccgctaattcatatttcgggttctcaatagactcaggaaaggggctggtgagggccgaagagttgtctttcgtggcaggcgctccgagagccaatcacaagggtgcagtggtcattctgagaaaagacagcgcatccaggctggtacccgaggtgatgctgagtggcgagaggttgacttccggctttggctacagcctggctgtggcggatctcaactcagacggatggccagatctgattgtcggcgctccctactttttcgagagacaggaagagctgggaggcgccgtttatgtgtatctgaaccagggcgggcactgggcggggatctccccactccggctctgcggttcgcccgactccatgttcggcatttcactggccgtgctgggagacttaaaccaggacggcttccctgatatcgccgtcggcgcgccgtttgatggagacggaaaagtgtttatttaccatggcagtagcctgggggtggtcgcaaagccctcccaggtgcttgagggcgaggccgtcggtatcaagtcctttggatattcccttagcggatcgcttgacatggacggtaatcagtaccccgacttacttgtgggcagtctggccgacaccgccgtactctttcgggcccgcccgatactgcatgtcagtcacgaagtttccatcgcacccagatctatagatctggaacagccaaactgtgccggcggccattcagtctgcgttgatctgcgagtctgtttctcctatatcgctgttccctcttcctactcacccaccgtggcactagattacgtactcgacgccgatactgatcgtcggctgcgcggacaggtgcctcgagttaccttcctttcccgcaacctcgaagagccaaaacaccaggcctctgggacagtgtggttgaagcaccaacacgacagagtatgtggtgatgccatgtttcagttgcaggagaacgtgaaagacaaactgagagctattgttgtcaccttgagttacagcttacagacaccccggcttcgaagacaggcccctgggcaagggctgcctcccgtggcacccattttgaatgcacatcagccttcaactcagcgagctgaaattcattttcttaagcaaggctgcggcgaagataagatttgccagagcaatttacagctcgtgagagccaggttttgcaccagggtgagtgacactgagtttcagcctctgccaatggacgtggacggtactaccgcgttgtttgccctgagcgggcagcccgtcatcggcctggaactgatggtgaccaaccttccctcagatcccgctcagccccaggccgacggcgacgatgcccatgaagcccagctattggtgatgttgccagattctttacattactccggcgtgcgagcgctggatcccgctgaaaagccactttgtctaagcaacgagaatgcttcccatgttgagtgtgaattgggcaacccaatgaagaggggcgcacaggtaacattttatctgattctctccactagcgggattagcattgaaacaactgaactggaagtcgaactacttctggctactattagcgaacaagagctgcacccagtgtcagctcgcgcccgggtgtttatagaactaccccttagtatcgccggaatggcaatccctcagcaactattctttagtggcgtggtgcgaggcgaacgggccatgcagtccgagcgggacgtgggttcaaaagtgaaatatgaagttaccgtcagcaatcagggccaatcgctccggacactaggatcagccttcctgaacatcatgtggcctcacgagatcgccaacggcaaatggctgctttatcctatgcaggtggaactagaaggtgggcagggcccgggacaaaagggcctgtgtagccctcgtccaaatatactccatcttgatgtggattctagagaccgccggcgtcgggaactcgaaccccccgagcagcaggaaccgggagagcggcaggaaccatccatgtcttggtggcccgtttctagcgctgaaaaaaagaagaacatcaccctcgactgcgccagggggactgccaactgcgtcgtgttctcctgtccactctactcgtttgaccgggccgccgtgttacatgtgtggggacggctgtggaattctactttcctggaagagtacagcgctgttaaaagtctggaggtgattgtccgcgccaatattacggttaagtcaagcatcaagaatctgatgctgcgggacgcaagcacggttattcccgtgatggtctacctcgatcctatggcggtggtggcggagggggtgccctggtgggtgatcctgttggccgttcttgccggcctacttgtgctggcacttttagttctcttgctttggaagatgggttttttcaagagagcaaagcacccagaagcgactgtcccccagtatcacgcggtgaaaatcccacgggaggacagacaacagtttaaggaggagaaaactggaaccatactgcggaacaactggggctccccccgtcgtgaaggacctgatgcccaccccatcttggctgcagatggacatcctgaactaggacctgacgggcatcctgggcccggtactgcctag

SEQ ID NO: 56812 - DNA, 3426 bp, Artificial Sequence
  derived and/or modified sequence
atggctggcgctcggagccgcgacccctggggagcttccgggatctgttacctgttcgggagcctactcgtggagttacttttctctcgggctgtagccttcaatctggatgtcatgggggctttgcgcaaagaaggggagccagggtcactgtttggtttttcagtggctctgcatcgacagctacagcccagaccccagtcttggctgctagtgggcgctccacaggctctcgcactccctggacagcaggccaatagaactggaggactcttcgcttgtcccttgtctctggaagagaccgactgctatcgagtcgacatcgatcagggggctgacatgcagaaagagagtaaggagaaccaatggctcggagtctccgtaagaagtcaagggccagggggtaagattgtgacgtgcgcccatagatacgaggctagacaacgggtggatcaaatccttgaaactagggatatgattggcagatgcttcgtcctctcacaggatcttgctattcgggacgaattggatggaggggagtggaagttttgcgaagggaggccgcaggggcatgagcaatttggattctgtcagcagggcactgcagcagccttctctcccgactcgcactatctgctgtttggggctcccggaacttataactggaaaggaaccgcccgagtcgagctttgcgcccagggctcagccgacctagcgcacctggatgacggcccatacgaagctggcggagagaaggagcaagatccacgactaatccccgtgccggctaatagctactttggattcagtatcgactccgggaagggattggtccgggctgaggagttatcgttcgttgcaggtgcacctcgcgctaaccacaaaggcgctgtggtgattctcaggaaggattctgcctctcgtttagtgccggaggtcatgctctcaggagaaagactcacgtccggcttcggatactccctggctgttgccgacctgaactccgatggctggccagacttgatcgtcggcgctccatatttttttgagcggcaggaagagctgggaggagcagtgtatgtgtatctgaaccaggggggtcactgggctggcattagtcccctccggttgtgcggcagccctgatagtatgtttggtatctcactggcagttctcggggatctgaatcaggacggcttcccagatatcgccgttggcgctcctttcgacggcgatgggaaggtgttcatttaccatggtagttccctcggtgtggtagctaagccctcccaggtcctcgagggagaggctgttggaatcaaatcgtttggctactccctctccggttccctggatatggatggaaaccagtaccccgaccttctggttggctctctagccgatactgcagtgctattccgagcgaggcccatccttcacgtgagtcacgaagtaagtatcgccccacgctccatcgacttggagcaacccaattgcgccggtggtcatagcgtgtgcgtggacttgcgggtatgcttctcttacatcgccgtccccagttcctattcccccacagtggcgcttgactatgtcctcgacgctgatacagacaggcggctgagagggcaagttccgagagtcacctttctctccaggaacctcgaagagccaaaacaccaggccagtggcactgtgtggttgaagcaccagcacgatagggtgtgcggagatgctatgtttcagctacaggaaaatgtgaaggacaagctaagagcaatcgtggtgacactgtcatactctctgcagacaccaagacttaggcggcaggcaccgggacagggcctgccaccagtggccccaatcctgaatgctcaccagccaagcacacagagagcagagatccactttcttaagcagggatgtggagaagacaagatctgtcaaagcaacctgcagctcgtgcgtgctaggttttgcacaagggtctcagacaccgagtttcagcccctgccaatggacgtcgacgggacaactgctctctttgcactgtctggccagcccgtgattggtctcgaactcatggtcaccaacctgccatcagaccccgcacaaccacaggccgacggggatgatgcacatgaggcccagctgttggtaatgctgcccgattctctacactactccggcgtccgagccctggacccggctgagaagcccttatgtctgtctaacgagaacgcttcacatgtagagtgcgaactagggaacccaatgaaacggggagcacaggtgacattctacctaattttgtcgacgtcagggatctcaatagagactactgagctggaagtggagctgctgctggccacaatttctgagcaagagctccaccctgtgtcagccagggcaagggtgtttatcgagcttcccttatcgatagcgggaatggcaatcccacagcagttgttcttcagtggtgttgttagaggagagcgagcaatgcagagcgaacgcgatgttgggagtaaagtgaaatacgaagtgacagtcagcaaccagggacagtctctaagaaccctaggttctgctttcttaaacatcatgtggcctcatgaaatcgctaatggaaagtggctgctgtacccaatgcaggtggagctcgagggaggtcagggcccaggacaaaaaggcctgtgctcccctagaccaaatatactgcatcttgatgttgacagtcgggaccggagaaggagagaactcgagcccccagagcaacaggaaccaggggagcgccaggaaccgagcatgagctggtggcctgtcagtagcgcagaaaagaaaaagaacataactcttgactgcgccagggggacagcaaattgcgtcgtgttttcttgtccactctactcattcgacagagcggcagtcctccatgtgtggggacggctctggaacagtaccttccttgaggaatactctgcggtcaaaagcttggaagttatcgtcagggctaacattactgtcaaaagcagtattaaaaatctgatgctgcgcgatgccagcaccgtgataccagtgatggtctacctggatccgatggctgtagttgccgagggtgtgccctggtgggtgatcctattagccgtgctggctggcctgctggttttggctttgcttgtcttgctgctttggaaaatgggttttttcaagagggccaagcatcccgaagctaccgttccacaataccacgcagtcaaaatcccaagggaagataggcaacaattcaaagaagaaaagacaggtaccatactccgaaacaactggggcagtcctcgtcgtgagggccctgatgcccacccaattctcgctgctgacggccatccagagctgggcccagacggacaccccggacctgggacagcctag

SEQ ID NO: 56813 - protein, 1044 aa, Artificial Sequence
  derived and/or modified sequence
MAPFATPMVQALTTTRIQRQAEGFQCWRECGTRRSPFEGKETCAHRYEARQRVDQILETRDMIGRCFVLSQDLAIRDELDGGEWKFCEGRPQGHEQFGFCQQGTAAAFSPDSHYLLFGAPGTYNWKGTARVELCAQGSADLAHLDDGPYEAGGEKEQDPRLIPVPANSYFGFSIDSGKGLVRAEELSFVAGAPRANHKGAVVILRKDSASRLVPEVMLSGERLTSGFGYSLAVADLNSDGWPDLIVGAPYFFERQEELGGAVYVYLNQGGHWAGISPLRLCGSPDSMFGISLAVLGDLNQDGFPDIAVGAPFDGDGKVFIYHGSSLGVVAKPSQVLEGEAVGIKSFGYSLSGSLDMDGNQYPDLLVGSLADTAVLFRARPILHVSHEVSIAPRSIDLEQPNCAGGHSVCVDLRVCFSYIAVPSSYSPTVALDYVLDADTDRRLRGQVPRVTFLSRNLEEPKHQASGTVWLKHQHDRVCGDAMFQLQENVKDKLRAIVVTLSYSLQTPRLRRQAPGQGLPPVAPILNAHQPSTQRAEIHFLKQGCGEDKICQSNLQLVRARFCTRVSDTEFQPLPMDVDGTTALFALSGQPVIGLELMVTNLPSDPAQPQADGDDAHEAQLLVMLPDSLHYSGVRALDPAEKPLCLSNENASHVECELGNPMKRGAQVTFYLILSTSGISIETTELEVELLLATISEQELHPVSARARVFIELPLSIAGMAIPQQLFFSGVVRGERAMQSERDVGSKVKYEVTVSNQGQSLRTLGSAFLNIMWPHEIANGKWLLYPMQVELEGGQGPGQKGLCSPRPNILHLDVDSRDRRRRELEPPEQQEPGERQEPSMSWWPVSSAEKKKNITLDCARGTANCVVFSCPLYSFDRAAVLHVWGRLWNSTFLEEYSAVKSLEVIVRANITVKSSIKNLMLRDASTVIPVMVYLDPMAVVAEGVPWWVILLAVLAGLLVLALLVLLLWKMGFFKRAKHPEATVPQYHAVKIPREDRQQFKEEKTGTILRNNWGSPRREGPDAHPILAADGHPELGPDGHPGPGTA

SEQ ID NO: 56814 - DNA, 3135 bp, Artificial Sequence
  derived and/or modified sequence
atggcccccttcgccacccccatggtgcaggccctgaccaccaccagaatccagagacaggccgagggcttccagtgctggagagagtgcggcaccagaagaagccccttcgagggcaaggagacctgcgcccacagatacgaggccagacagagagtggaccagatcctggagaccagagacatgatcggcagatgcttcgtgctgagccaggacctggccatcagagacgagctggacggcggcgagtggaagttctgcgagggcagaccccagggccacgagcagttcggcttctgccagcagggcaccgccgccgccttcagccccgacagccactacctgctgttcggcgcccccggcacctacaactggaagggcaccgccagagtggagctgtgcgcccagggcagcgccgacctggcccacctggacgacggcccctacgaggccggcggcgagaaggagcaggaccccagactgatccccgtgcccgccaacagctacttcggcttcagcatcgacagcggcaagggcctggtgagagccgaggagctgagcttcgtggccggcgcccccagagccaaccacaagggcgccgtggtgatcctgagaaaggacagcgccagcagactggtgcccgaggtgatgctgagcggcgagagactgaccagcggcttcggctacagcctggccgtggccgacctgaacagcgacggctggcccgacctgatcgtgggcgccccctacttcttcgagagacaggaggagctgggcggcgccgtgtacgtgtacctgaaccagggcggccactgggccggcatcagccccctgagactgtgcggcagccccgacagcatgttcggcatcagcctggccgtgctgggcgacctgaaccaggacggcttccccgacatcgccgtgggcgcccccttcgacggcgacggcaaggtgttcatctaccacggcagcagcctgggcgtggtggccaagcccagccaggtgctggagggcgaggccgtgggcatcaagagcttcggctacagcctgagcggcagcctggacatggacggcaaccagtaccccgacctgctggtgggcagcctggccgacaccgccgtgctgttcagagccagacccatcctgcacgtgagccacgaggtgagcatcgcccccagaagcatcgacctggagcagcccaactgcgccggcggccacagcgtgtgcgtggacctgagagtgtgcttcagctacatcgccgtgcccagcagctacagccccaccgtggccctggactacgtgctggacgccgacaccgacagaagactgagaggccaggtgcccagagtgaccttcctgagcagaaacctggaggagcccaagcaccaggccagcggcaccgtgtggctgaagcaccagcacgacagagtgtgcggcgacgccatgttccagctgcaggagaacgtgaaggacaagctgagagccatcgtggtgaccctgagctacagcctgcagacccccagactgagaagacaggcccccggccagggcctgccccccgtggcccccatcctgaacgcccaccagcccagcacccagagagccgagatccacttcctgaagcagggctgcggcgaggacaagatctgccagagcaacctgcagctggtgagagccagattctgcaccagagtgagcgacaccgagttccagcccctgcccatggacgtggacggcaccaccgccctgttcgccctgagcggccagcccgtgatcggcctggagctgatggtgaccaacctgcccagcgaccccgcccagccccaggccgacggcgacgacgcccacgaggcccagctgctggtgatgctgcccgacagcctgcactacagcggcgtgagagccctggaccccgccgagaagcccctgtgcctgagcaacgagaacgccagccacgtggagtgcgagctgggcaaccccatgaagagaggcgcccaggtgaccttctacctgatcctgagcaccagcggcatcagcatcgagaccaccgagctggaggtggagctgctgctggccaccatcagcgagcaggagctgcaccccgtgagcgccagagccagagtgttcatcgagctgcccctgagcatcgccggcatggccatcccccagcagctgttcttcagcggcgtggtgagaggcgagagagccatgcagagcgagagagacgtgggcagcaaggtgaagtacgaggtgaccgtgagcaaccagggccagagcctgagaaccctgggcagcgccttcctgaacatcatgtggccccacgagatcgccaacggcaagtggctgctgtaccccatgcaggtggagctggagggcggccagggccccggccagaagggcctgtgcagccccagacccaacatcctgcacctggacgtggacagcagagacagaagaagaagagagctggagccccccgagcagcaggagcccggcgagagacaggagcccagcatgagctggtggcccgtgagcagcgccgagaagaagaagaacatcaccctggactgcgccagaggcaccgccaactgcgtggtgttcagctgccccctgtacagcttcgacagagccgccgtgctgcacgtgtggggcagactgtggaacagcaccttcctggaggagtacagcgccgtgaagagcctggaggtgatcgtgagagccaacatcaccgtgaagagcagcatcaagaacctgatgctgagagacgccagcaccgtgatccccgtgatggtgtacctggaccccatggccgtggtggccgagggcgtgccctggtgggtgatcctgctggccgtgctggccggcctgctggtgctggccctgctggtgctgctgctgtggaagatgggcttcttcaagagagccaagcaccccgaggccaccgtgccccagtaccacgccgtgaagatccccagagaggacagacagcagttcaaggaggagaagaccggcaccatcctgagaaacaactggggcagccccagaagagagggccccgacgcccaccccatcctggccgccgacggccaccccgagctgggccccgacggccaccccggccccggcaccgcctag

SEQ ID NO: 56815 - DNA, 3135 bp, Artificial Sequence
  derived and/or modified sequence
atggctccctttgcgaccccgatggttcaggctctcaccacaacaagaattcagcgacaggccgagggtttccagtgctggcgagagtgcggcactcgccgttctcctttcgagggcaaggaaacttgtgctcatcgctacgaggccaggcagagagtagaccagatccttgagacaagggacatgattgggcgatgtttcgttcttagccaggacctggctatcagagatgagctcgatggcggcgagtggaagttttgtgagggccgcccccaaggccatgagcagttcggtttttgccaacagggcacagccgctgcgttcagtcctgatagccactatctcctctttggcgccccgggaacatataattggaagggaacagccagagttgaactgtgcgcccaaggttctgcagacctggcgcatttagacgatggcccctatgaggccggaggagaaaaggagcaggacccaagactcattccagttccagctaacagttactttgggtttagtattgacagtggcaagggtctggtccgcgccgaggagctgtcctttgtggccggcgcacccagggcaaatcataaaggcgccgtggtcatcctgcgcaaagatagtgccagccgcctggtccctgaagtgatgctgtctggagaacggctgacttctggattcggctactcccttgccgtggcagacttgaactcagatggctggcctgatctgattgtgggcgcaccttacttctttgaaagacaggaggagcttggaggtgctgtgtatgtttatctgaaccagggaggccactgggccggaatctcgccgttacgactctgcggcagcccggactctatgttcggaatttcgttagccgtgctgggcgacctcaaccaggacggatttccagacattgccgttggagcacccttcgacggggatgggaaagtgtttatctatcatggtagctcgcttggggtcgtggcaaaaccctctcaggtgctggagggggaggctgtcgggatcaagtccttcggatactctctgtcgggcagtttagacatggatggcaaccagtaccctgatctcctggtcgggagcctcgccgacacggccgtgctcttccgtgctcggcccatcctccacgtttctcatgaggtgtcaatcgcacctagaagcatcgacctggaacagcccaattgcgcaggaggacactctgtctgtgtggatctgagggtgtgcttttcttacattgccgttccgtcctcctacagccctaccgtcgccctcgactatgtgctggatgccgatactgaccggagactgaggggacaggtaccacgggttacctttctctcccggaacctggaggagcccaagcaccaggcaagtggtacagtgtggcttaagcaccaacacgaccgcgtttgtggcgacgcgatgttccagctacaggagaatgtgaaggacaagctgagagccatcgtggtcacactgtcctatagccttcagactcctcggctgcgaaggcaggcacccggccagggcctgccccctgtggctcccatacttaatgcacaccagcctagcacccagagggcagaaattcactttctgaagcagggctgcggcgaggataagatctgtcagagcaacttgcagttggtgagggcccggttctgtacaagagtgagcgacactgaatttcaaccactgcctatggacgtcgatggaaccaccgcattattcgccctgtctggtcagcctgttatcggtctagagctgatggtaaccaacctcccctccgatcccgctcagccacaggccgacggagacgatgcccacgaggcccagttattagtaatgcttcccgattctttgcactactctggagtccgggcattagaccccgccgagaaacctctatgtttgagcaacgagaatgccagtcatgtcgagtgcgaacttggcaaccccatgaaacgcggggcacaggtcaccttttatctcatcttgagcacatccggcatcagcatcgaaaccaccgagcttgaggtggagctcttactggcgacgatatctgagcaggaacttcacccagttagcgccagagccagggtgttcattgagttgccactttcaattgctggaatggccatcccccagcagctgttcttcagcggtgtcgtgagaggagagagagctatgcagagcgaacgcgacgtggggagcaaggtgaagtatgaggtaactgtgtctaatcagggccagtccctgagaaccctgggctcagcctttcttaacattatgtggcctcatgaaatcgccaacgggaagtggttgctgtatcccatgcaggttgagctagaaggcggccagggccccgggcagaaggggctttgtagcccccgtcctaatattttacacctcgacgtcgattcacgtgaccggagacggagagagctggagccgccggaacaacaggagcccggggagcgacaggaacccagtatgtcttggtggcctgtctctagtgctgagaagaaaaaaaatatcactctggactgcgcccgaggcactgctaattgtgttgtctttagttgtccactgtattccttcgaccgggctgcagttttacatgtgtgggggcggctgtggaactccactttcctggaagaatacagcgctgtcaagagcctggaggttatagtgagagccaacattaccgtgaagtcttccattaagaatcttatgctgcgcgacgcgagtactgtgattcccgtgatggtttacctcgatcctatggccgtggtcgctgagggcgtcccatggtgggttattctgttggccgtgctcgccggattgctggtgctcgccctgttggtactattgctgtggaaaatgggcttttttaaacgggcgaaacaccctgaagcaacagtgccccagtaccatgctgtcaagattccaagggaagacagacagcagttcaaggaggagaaaacgggaaccattctgaggaacaattggggatctcctcggagagaggggccagacgctcaccctatcctggctgcagatgggcaccctgagctggggcccgatggccatccaggccctggaaccgcctag

SEQ ID NO: 56816 - DNA, 3135 bp, Artificial Sequence
  derived and/or modified sequence
atggccccctttgccacccccatggtgcaggccctgaccaccacccgcatccagaggcaggccgagggcttccagtgctggagagaatgtggcaccaggaggagcccctttgagggcaaggagacctgtgcccacagatatgaggcccggcagagggtggaccagatcctggagacccgggacatgattggccgctgctttgtgctgagccaggacctggccatcagagatgagctggatggaggagagtggaagttctgtgagggccggccccagggccacgagcagtttggcttctgccagcagggcacagctgctgccttctccccagacagccactacctgctgtttggagcccctggcacctacaactggaagggcacagcccgggtggagctgtgtgcccagggcagcgctgacctggcccacctggatgatggcccctatgaagctggaggagagaaggagcaggaccccaggctcatccctgtgcctgccaacagctacttcggcttcagcattgacagcggcaagggcctggtgcgggcagaggagctgagctttgtggccggggccccccgggccaaccacaagggagctgtggtgatcctgaggaaggacagcgccagccggctggtgcctgaggtgatgctgtctggagagcggctgaccagcggcttcggctacagcctggccgtggccgacctgaacagtgatggctggccagacctgattgtgggcgccccctacttctttgagcggcaggaggagctgggcggcgctgtgtatgtgtacctgaaccagggcggccactgggccggcatcagccccctgcggctgtgtggcagcccagacagcatgtttggcatcagcctggccgtgctgggggacctgaaccaggacggcttcccagacattgctgtgggcgccccctttgatggagatggcaaggtgttcatctaccacggcagcagcctgggcgtggtggccaagcccagccaggtgctggagggggaggccgtgggcatcaagagctttggctacagcctgagcggcagcctggacatggatggcaaccagtacccagacctgctggtgggcagcctggccgacacagctgtgctcttccgggcccggcccatcctgcacgtgtcccatgaggtgtccatcgcccccaggagcattgacctggagcagcccaactgtgccggcggccacagcgtgtgtgtggacctgcgggtgtgcttctcctacatcgctgtgcccagcagctacagccccaccgtggccctggactatgtgctggatgctgacacagaccggcggctgcggggccaggtgccccgggtgaccttcctgagcaggaacctggaggagcccaagcaccaggccagcggcaccgtgtggctgaagcaccagcacgacagagtgtgtggagatgccatgttccagctgcaggagaatgtgaaggacaagctgcgggccatcgtggtgaccctgagctacagcctgcagaccccccggctgcggcggcaggcccctggccagggcctgccccctgtggcccccatcctgaatgcccaccagcccagcacccagagagctgagatccacttcctgaagcagggctgtggggaggacaagatctgccagagcaacctgcagctggtgcgggcccgcttctgcaccagggtgtctgacacagagttccagcccctgcccatggatgtggatggcaccacagccctgtttgccctgagcggccagcccgtcatcggcctggagctgatggtgaccaacctgcccagcgaccctgcccagccccaggctgatggagatgatgcccacgaggcccagctgctggtgatgctgcctgacagcctgcactacagcggcgtgcgggccctggaccctgctgagaagcccctgtgcctgagcaatgaaaatgccagccacgtggagtgtgagctgggcaaccccatgaagagaggagcccaggtgaccttctacctgatcctgagcaccagcggcatcagcattgagaccacagagctggaggtggagctgctgctggccaccatcagcgagcaggagctgcaccctgtgtctgcccgggcccgggtcttcatcgagctgcccctgagcattgctggcatggccatcccccagcagctgttcttcagcggcgtggtgcggggggagcgggccatgcagagcgagagagatgtgggcagcaaggtgaagtatgaggtgacagtgagcaaccagggccagagcctgcggaccctgggcagcgccttcctgaacatcatgtggccccatgagatcgccaacgggaagtggctgctgtaccccatgcaggtggagctggagggcggccagggccctggccagaagggcctgtgcagcccccggcccaacatcctgcacctggatgtggacagccgggacagaagaagaagagagctggagcccccagagcagcaggagcctggagagcggcaggagcccagcatgtcctggtggcctgtgagcagcgctgagaagaagaagaacatcaccctggactgtgcccggggcacagccaactgtgtggtgttcagctgccccctgtacagctttgacagagctgctgtgctgcacgtgtggggccgcctgtggaacagcaccttcctggaggagtacagcgctgtgaagagcctggaggtgattgtgcgggccaacatcaccgtgaagagcagcatcaagaacctgatgctgagagatgccagcaccgtcatccctgtgatggtgtacctggaccccatggctgtggtggccgagggcgtgccctggtgggtgatcctgctggccgtgctggccggcctgctggtgctggccctgctggtgctgctgctgtggaagatgggcttcttcaagagggccaagcaccctgaggccaccgtgccccagtaccacgctgtgaagatccccagagaagatcggcagcagttcaaggaggagaagacaggcaccatcctgaggaacaactggggcagcccccggcgggagggcccagatgcccaccccatcctggccgcagatggccaccctgagctgggcccagatggccaccctggccctggaacagcctag

SEQ ID NO: 56817 - DNA, 3763 bp, Artificial Sequence
  derived and/or modified sequence
gacacagagtgagtagacaaggcttcacatactgggagatctggctgggcttcaagagagggggttggtggtggtgtggctaagttccaaatgttggcctgaagccagtgctcaaagaaagggggcccttgagacagtccaaatggctccctttgccactcccatggttcaagctttgactacaaccagaattcagaggcaggcagaaggattccagtgctggagagaatgtggaacaaggagatctccatttgagggcaaggaaacctgtgcacaccgatatgaggcaaggcagcgagtggaccagatcctggagacgcgggatatgattggtcgctgctttgtgctcagccaggacctggccatccgggatgagttggatggtggggaatggaagttctgtgagggacgcccccaaggccatgaacaatttgggttctgccagcagggcacagctgccgccttctcccctgatagccactacctcctctttggggccccaggaacctataattggaagggcacggccagggtggagctctgtgcacagggctcagcggacctggcacacctggacgacggtccctacgaggcggggggagagaaggagcaggacccccgcctcatcccggtccctgccaacagctactttggcttctctattgactcggggaaaggtctggtgcgtgcagaagagctgagctttgtggctggagccccccgcgccaaccacaagggtgctgtggtcatcctgcgcaaggacagcgccagtcgcctggtgcccgaggttatgctgtctggggagcgcctgacctccggctttggctactcactggctgtggctgacctcaacagtgatggctggccagacctgatagtgggtgccccctacttctttgagcgccaagaagagctggggggtgctgtgtatgtgtacttgaaccaggggggtcactgggctgggatctcccctctccggctctgcggctcccctgactccatgttcgggatcagcctggctgtcctgggggacctcaaccaagatggctttccagatattgcagtgggtgccccctttgatggtgatgggaaagtcttcatctaccatgggagcagcctgggggttgtcgccaaaccttcacaggtgctggagggcgaggctgtgggcatcaagagcttcggctactccctgtcaggcagcttggatatggatgggaaccaataccctgacctgctggtgggctccctggctgacaccgcagtgctcttcagggccagacccatcctccatgtctcccatgaggtctctattgctccacgaagcatcgacctggagcagcccaactgtgctggcggccactcggtctgtgtggacctaagggtctgtttcagctacattgcagtccccagcagctatagccctactgtggccctggactatgtgttagatgcggacacagaccggaggctccggggccaggttccccgtgtgacgttcctgagccgtaacctggaagaacccaagcaccaggcctcgggcaccgtgtggctgaagcaccagcatgaccgagtctgtggagacgccatgttccagctccaggaaaatgtcaaagacaagcttcgggccattgtagtgaccttgtcctacagtctccagacccctcggctccggcgacaggctcctggccaggggctgcctccagtggcccccatcctcaatgcccaccagcccagcacccagcgggcagagatccacttcctgaagcaaggctgtggtgaagacaagatctgccagagcaatctgcagctggtccgcgcccgcttctgtacccgggtcagcgacacggaattccaacctctgcccatggatgtggatggaacaacagccctgtttgcactgagtgggcagccagtcattggcctggagctgatggtcaccaacctgccatcggacccagcccagccccaggctgatggggatgatgcccatgaagcccagctcctggtcatgcttcctgactcactgcactactcaggggtccgggccctggaccctgcggagaagccactctgcctgtccaatgagaatgcctcccatgttgagtgtgagctggggaaccccatgaagagaggtgcccaggtcaccttctacctcatccttagcacctccgggatcagcattgagaccacggaactggaggtagagctgctgttggccacgatcagtgagcaggagctgcatccagtctctgcacgagcccgtgtcttcattgagctgccactgtccattgcaggaatggccattccccagcaactcttcttctctggtgtggtgaggggcgagagagccatgcagtctgagcgggatgtgggcagcaaggtcaagtatgaggtcacggtttccaaccaaggccagtcgctcagaaccctgggctctgccttcctcaacatcatgtggcctcatgagattgccaatgggaagtggttgctgtacccaatgcaggttgagctggagggcgggcaggggcctgggcagaaagggctttgctctcccaggcccaacatcctccacctggatgtggacagtagggataggaggcggcgggagctggagccacctgagcagcaggagcctggtgagcggcaggagcccagcatgtcctggtggccagtgtcctctgctgagaagaagaaaaacatcaccctggactgcgcccggggcacggccaactgtgtggtgttcagctgcccactctacagctttgaccgcgcggctgtgctgcatgtctggggccgtctctggaacagcacctttctggaggagtactcagctgtgaagtccctggaagtgattgtccgggccaacatcacagtgaagtcctccataaagaacttgatgctccgagatgcctccacagtgatcccagtgatggtatacttggaccccatggctgtggtggcagaaggagtgccctggtgggtcatcctcctggctgtactggctgggctgctggtgctagcactgctggtgctgctcctgtggaagatgggattcttcaaacgggcgaagcaccccgaggccaccgtgccccagtaccatgcggtgaagattcctcgggaagaccgacagcagttcaaggaggagaagacgggcaccatcctgaggaacaactggggcagcccccggcgggagggcccggatgcacaccccatcctggctgctgacgggcatcccgagctgggccccgatgggcatccagggccaggcaccgcctaggttcccatgtcccagcctggcctgtggctgccctccatcccttccccagagatggctccttgggatgaagagggtagagtgggctgctggtgtcgcatcaagatttggcaggatcggcttcctcaggggcacagacctctcccacccacaagaactcctcccacccaacttccccttagagtgctgtgagatgagagtgggtaaatcagggacagggccatggggtagggtgagaagggcaggggtgtcctgatgcaaaggtggggagaagggatcctaatcccttcctctcccattcaccctgtgtaacaggaccccaaggacctgcctccccggaagtgccttaacctagagggtcggggaggaggttgtgtcactgactcaggctgctccttctctagtttcccctctcatctgaccttagtttgctgccatcagtctagtggtttcgtggtttcgtctatttattaaaaaatatttgagaac

SEQ ID NO: 56818 - DNA, 3135 bp, Artificial Sequence
  derived and/or modified sequence
atggcccccttcgccacccccatggtgcaggccctgaccaccacccggatacagcgtcaggctgaaggttttcagtgctggagagaatgcgggacgcgcaggagcccttttgaaggaaaggaaacgtgcgcacacagatatgaagcccgccagagggttgaccagatcctggaaacccgtgatatgattggccggtgctttgtgttgagccaagacctggccatccgcgacgaactagacggaggagaatggaaattttgcgaaggcagaccccaggggcacgaacaattcggattctgccagcagggaacagccgccgcgttttcccccgactctcactatctgctctttggcgctcctggtacctacaattggaagggcaccgcgagggtggagctttgtgcccaggggagtgcagacttagcccacctggatgacgggccatacgaagccggaggagaaaaagaacaggacccacgcctgatcccagtgccggccaacagttactttggatttagtattgactccggtaagggcttggttagagcggaagaacttagcttcgttgctggggcgccccgggcaaaccacaagggggcagtcgtcatattgagaaaagacagtgcctctcggcttgttcctgaggtcatgctaagcggtgaacggcttactagtggcttcgggtatagcttggcggtagctgatctgaattctgacggatggcctgatctgatagtgggcgccccctactttttcgaaagacaagaggagctgggcggggccgtgtacgtctacctgaatcaggggggtcactgggctggaatctcaccattaaggctgtgcggatcccccgatagtatgttcggcataagcctcgcagtcctgggggacttaaaccaagacggctttccagacattgcagtcggagccccctttgacggagatggtaaggtgttcatctaccacgggtcatccttaggagtggtggcaaaaccttcacaagtcctcgaaggcgaggccgtgggtattaaatcctttggctattctctttcgggtagtctggatatggacgggaatcagtatccagacctgctggtagggagcctggccgacaccgctgtgttgtttagagcacggcctatccttcatgtgtcgcacgaggtgagtattgcacctcgttctatcgatctcgaacagccaaactgtgccgggggccatagcgtgtgcgtggatttacgcgtttgcttttcctacatcgcagttccatcgtcatattcgcctaccgttgccttggactatgtgctggatgccgataccgaccggaggcttaggggccaggttccccgcgtaacattcctctccaggaacctagaagagcctaaacaccaggcaagcggaaccgtgtggctgaagcaccagcacgatagagtctgtggggatgctatgttccagctgcaagaaaacgttaaagacaagctgcgagctattgtggtgacgttgagttactcactgcagactcctcggttacggcgccaggcccccggtcaaggcttgccacctgtggcccccatcctgaacgcccaccaaccttctacacagcgggctgaaatacatttcctcaagcagggttgcggggaagacaagatctgccaatcgaatcttcagttagtcagagccagattctgtacgcgcgtatctgacaccgagtttcagccgcttcctatggatgtggacgggacaacggcactgtttgctctcagcggacagccggtgatcggcctggagctcatggtgaccaacctgccttcagatcccgcccagcctcaggcggatggggatgacgctcacgaagctcaactgctggtaatgctgcctgactctcttcattattccggagtcagagccttggaccccgcagagaagccactctgtttgtccaatgagaacgcaagccacgtggaatgcgagctgggcaacccaatgaagagaggcgcgcaggttaccttttacctcatattatctactagtggaatttctattgagacaactgagcttgaggtggaactattgctcgccaccatttccgagcaggagttacatcccgtctctgcgagagctcgagtgttcatcgaacttcccctttcaatcgccggtatggccataccacagcagctgtttttttccggtgtcgtcagaggggaaagggccatgcagtccgaacgcgacgtggggtctaaggtgaaatacgaggtcacagtgagtaatcagggccaatcactcagaacactaggcagtgccttcctgaacattatgtggcctcatgaaatagccaatggtaaatggctgctgtatcctatgcaggtcgagctggaagggggccagggtccagggcaaaaaggactttgctctcctagaccgaacattttacatcttgatgtcgacagccgggatagaaggcggagggaattggagccccctgaacagcaggaacccggcgagcggcaggagccctccatgtcctggtggcctgtgagttcagctgagaaaaagaaaaatatcactctggactgcgcgcgggggacagctaattgtgtcgtgttcagctgccccctgtattcctttgatagagctgccgttctgcatgtgtggggaaggctgtggaactcaacattcctggaggaatatagcgctgtaaaatcactggaggttattgtgcgtgctaatatcactgttaagtcatccattaaaaatctcatgcttcgagatgccagtactgtaatacctgtgatggtataccttgatcccatggctgttgtagccgagggcgtcccatggtgggtgatcctgctcgcagtgctagccggcctactggtactggcgctgttggtgctgttgttgtggaagatgggattctttaaacgggcaaagcacccagaagccacagtgccccaataccatgccgtaaagattccccgcgaagacagacagcagtttaaagaggagaaaaccggcactatcctgcggaacaactggggatctcccagacgcgaggggccggatgctcatcccatccttgctgccgacggccaccccgaactgggtcccgacggacaccccggccctgggactgcatag

SEQ ID NO: 56819 - DNA, 3135 bp, Artificial Sequence
  derived and/or modified sequence
atggctccattcgccaccccaatggtccaggccctcacaaccacccgcattcagaggcaggccgaaggtttccagtgttggcgcgaatgcggcaccagacggagcccttttgagggcaaggaaacttgcgctcatagatacgaagccagacagcgagtagaccagatcctcgaaacaagagatatgatcggccgatgtttcgtcctatcacaagacctggccattcgagatgaactggatggcggagaatggaaattctgtgagggccgaccacagggccacgagcagttcggattctgtcagcagggtacggctgctgcattctccccagactcacactatctcctgttcggggctccgggaacatacaattggaaggggactgcccgtgtggagctgtgcgcacagggctccgccgatctagcccacctcgatgacggaccctacgaagcgggtggggagaaagaacaggacccacgtcttattccagtccctgccaactcctactttggtttttccatcgattccgggaaagggttagtccgggctgaagaattgtcgttcgtggccggagctcctcgcgcaaaccacaagggcgctgtcgtcattctcaggaaagactcagcatcccgccttgttcctgaggtcatgctgtccggtgagcgcctcacaagtgggtttggatactctctggcagtagccgatctgaactcagatggatggccagacctgatagtgggagccccatacttctttgagcggcaggaggagctgggtggcgcagtgtatgtctaccttaatcagggcggacattgggccggtatctctcccttacgtctgtgtgggagtccagacagcatgttcggaataagcctggctgtcctgggggatctgaatcaggacggtttccctgatattgccgtgggtgctccttttgacggtgacggcaaagtctttatctaccacggctcttcgctgggagttgttgccaagccatcacaggtattagagggggaagcggttggaattaaaagcttcggctatagtctgagtgggtcactagatatggatggtaatcaatatcccgacctgttagtcggttctcttgctgatactgcagtcctatttagagcccgtccaattctgcacgtgagccacgaggtttctattgcccctcggtctatcgatttggagcagccaaattgcgcaggcggacattccgtatgcgtggatctcagagtttgttttagttatattgccgtccctagctcctattcgcccacagttgcgcttgattacgtgcttgatgccgacactgataggagactgaggggccaagtcccacgtgtcacttttctctctcgcaatttggaagagccaaaacatcaggcaagcggtactgtatggctgaagcaccagcatgaccgggtctgcggtgacgcaatgttccaactccaggagaatgtgaaagataaactgagggcgattgtggtaacactttcctactcgctccagactcccaggctgaggcgtcaagcacccggtcaggggctgcctcccgtggcacctatcttgaacgcccatcagcccagcactcaaagggccgaaattcattttctgaagcaaggatgcggagaggataagatatgtcagagcaacctccagctggtgcgcgctcggttctgcacacgcgtgtctgatacagaatttcagcccttacccatggacgtggacggtaccacagccctattcgccctgagcggtcaacccgtaatcggcctagagttgatggtcacgaacctgccttctgaccccgctcagccacaggctgacggtgatgacgcacatgaagctcagctcctggtaatgctccccgactcactgcactacagtggagtgagggccttggatcctgccgagaagccactttgcctttccaacgaaaatgcttcacacgtcgaatgcgagctcggcaatccgatgaaaagaggagcccaggtgaccttctacctgatcctaagcactagtgggatatctatcgagacaacagagctcgaagtagagctcctgctcgcaacaatctcagagcaggagttgcaccccgtgagcgcccgtgcccgtgtgtttatcgaactccctcttagtattgcaggcatggccatccctcagcagctctttttcagcggcgtggttagaggggagcgagcaatgcaatcggagcgggatgtggggtccaaggtcaagtatgaagtgacagtctcgaaccaaggtcaatctttgcgaactttgggaagcgcgtttctgaatattatgtggccacatgaaatcgccaatggaaaatggttgttgtatccaatgcaggttgagcttgaaggcggacaggggcctggtcagaaaggcttatgttcccccagacctaacatcctgcacctagacgttgattcacgggatcggaggaggcgagaactcgagcctccagaacaacaagagcctggtgaacgccaggagccgtccatgtcatggtggcctgtgtcctctgcggagaaaaaaaagaatattaccctggactgcgccagaggcacagctaactgcgtcgtcttttcctgcccattatacagtttcgatagggcggctgttttgcatgtgtggggtcgattgtggaactctacattcctcgaagagtattccgctgtaaagtctcttgaagtgattgtcagggctaatattactgtaaaatcttctattaaaaatctcatgctgagggacgcaagcacagtcatccctgttatggtatatctggacccgatggcagtcgtggcggaaggagtgccgtggtgggtcattctcctggctgtgctggcagggctgttggtgttggcccttctcgttctgctcttatggaagatgggtttcttcaaaagggccaaacaccctgaggcaaccgtccctcaataccatgctgttaaaatcccgagggaagacagacaacaattcaaggaggaaaaaacaggcacaattctgagaaacaattggggcagcccacggagggaaggaccggacgcccaccccattctcgccgctgacggccacccggaactaggaccggacgggcatccgggacccggtaccgcatag

SEQ ID NO: 56820 - protein, 1002 aa, Artificial Sequence
  derived and/or modified sequence
MLLGTLLLILYILMLCRMFLLVGAPKANTTQPGIVEGGQVLKCDWSSTRRCQPIEFDATGNRDYAKDDPLEFKSHQWFGASVRSKQDKILACAPLYHWRTEMKQEREPVGTCFLQDGTKTVEYAPCRSQDIDADGQGFCQGGFSIDFTKADRVLLGGPGSFYWQGQLISDQVAEIVSKYDPNVYSIKYNNQLATRTAQAIFDDSYLGYSVAVGDFNGDGIDDFVSGVPRAARTLGMVYIYDGKNMSSLYNFTGEQMAAYFGFSVAATDINGDDYADVFIGAPLFMDRGSDGKLQEVGQVSVSLQRASGDFQTTKLNGFEVFARFGSAIAPLGDLDQDGFNDIAIAAPYGGEDKKGIVYIFNGRSTGLNAVPSQILEGQWAARSMPPSFGYSMKGATDIDKNGYPDLIVGAFGVDRAILYRARPVITVNAGLEVYPSILNQDNKTCSLPGTALKVSCFNVRFCLKADGKGVLPRKLNFQVELLLDKLKQKGAIRRALFLYSRSPSHSKNMTISRGGLMQCEELIAYLRDESEFRDKLTPITIFMEYRLDYRTAADTTGLQPILNQFTPANISRQAHILLDCGEDNVCKPKLEVSVDSDQKKIYIGDDNPLTLIVKAQNQGEGAYEAELIVSIPLQADFIGVVRNNEALARLSCAFKTENQTRQVVCDLGNPMKAGTQLLAGLRFSVHQQSEMDTSVKFDLQIQSSNLFDKVSPVVSHKVDLAVLAAVEIRGVSSPDHVFLPIPNWEHKENPETEEDVGPVVQHIYELRNNGPSSFSKAMLHLQWPYKYNNNTLLYILHYDIDGPMNCTSDMEINPLRIKISSLQTTEKNDTVAGQGERDHLITKRDLALSEGDIHTLGCGVAQCLKIVCQVGRLDRGKSAILYVKSLLWTETFMNKENQNHSYSLKSSASFNVIEFPYKNLPIEDITNSTLVTTNVTWGIQPAPMPVPVWVIILAVLAGLLLLAVLVFVMYRMGFFKRVRPPQEEQEREQLQPHENGEGNSET

SEQ ID NO: 56821 - DNA, 3009 bp, Artificial Sequence
  derived and/or modified sequence
atgctgctgggcaccctgctgctgatcctgtacatcctgatgctgtgcagaatgttcctgctggtgggcgcccccaaggccaacaccacccagcccggcatcgtggagggcggccaggtgctgaagtgcgactggagcagcaccagaagatgccagcccatcgagttcgacgccaccggcaacagagactacgccaaggacgaccccctggagttcaagagccaccagtggttcggcgccagcgtgagaagcaagcaggacaagatcctggcctgcgcccccctgtaccactggagaaccgagatgaagcaggagagagagcccgtgggcacctgcttcctgcaggacggcaccaagaccgtggagtacgccccctgcagaagccaggacatcgacgccgacggccagggcttctgccagggcggcttcagcatcgacttcaccaaggccgacagagtgctgctgggcggccccggcagcttctactggcagggccagctgatcagcgaccaggtggccgagatcgtgagcaagtacgaccccaacgtgtacagcatcaagtacaacaaccagctggccaccagaaccgcccaggccatcttcgacgacagctacctgggctacagcgtggccgtgggcgacttcaacggcgacggcatcgacgacttcgtgagcggcgtgcccagagccgccagaaccctgggcatggtgtacatctacgacggcaagaacatgagcagcctgtacaacttcaccggcgagcagatggccgcctacttcggcttcagcgtggccgccaccgacatcaacggcgacgactacgccgacgtgttcatcggcgcccccctgttcatggacagaggcagcgacggcaagctgcaggaggtgggccaggtgagcgtgagcctgcagagagccagcggcgacttccagaccaccaagctgaacggcttcgaggtgttcgccagattcggcagcgccatcgcccccctgggcgacctggaccaggacggcttcaacgacatcgccatcgccgccccctacggcggcgaggacaagaagggcatcgtgtacatcttcaacggcagaagcaccggcctgaacgccgtgcccagccagatcctggagggccagtgggccgccagaagcatgccccccagcttcggctacagcatgaagggcgccaccgacatcgacaagaacggctaccccgacctgatcgtgggcgccttcggcgtggacagagccatcctgtacagagccagacccgtgatcaccgtgaacgccggcctggaggtgtaccccagcatcctgaaccaggacaacaagacctgcagcctgcccggcaccgccctgaaggtgagctgcttcaacgtgagattctgcctgaaggccgacggcaagggcgtgctgcccagaaagctgaacttccaggtggagctgctgctggacaagctgaagcagaagggcgccatcagaagagccctgttcctgtacagcagaagccccagccacagcaagaacatgaccatcagcagaggcggcctgatgcagtgcgaggagctgatcgcctacctgagagacgagagcgagttcagagacaagctgacccccatcaccatcttcatggagtacagactggactacagaaccgccgccgacaccaccggcctgcagcccatcctgaaccagttcacccccgccaacatcagcagacaggcccacatcctgctggactgcggcgaggacaacgtgtgcaagcccaagctggaggtgagcgtggacagcgaccagaagaagatctacatcggcgacgacaaccccctgaccctgatcgtgaaggcccagaaccagggcgagggcgcctacgaggccgagctgatcgtgagcatccccctgcaggccgacttcatcggcgtggtgagaaacaacgaggccctggccagactgagctgcgccttcaagaccgagaaccagaccagacaggtggtgtgcgacctgggcaaccccatgaaggccggcacccagctgctggccggcctgagattcagcgtgcaccagcagagcgagatggacaccagcgtgaagttcgacctgcagatccagagcagcaacctgttcgacaaggtgagccccgtggtgagccacaaggtggacctggccgtgctggccgccgtggagatcagaggcgtgagcagccccgaccacgtgttcctgcccatccccaactgggagcacaaggagaaccccgagaccgaggaggacgtgggccccgtggtgcagcacatctacgagctgagaaacaacggccccagcagcttcagcaaggccatgctgcacctgcagtggccctacaagtacaacaacaacaccctgctgtacatcctgcactacgacatcgacggccccatgaactgcaccagcgacatggagatcaaccccctgagaatcaagatcagcagcctgcagaccaccgagaagaacgacaccgtggccggccagggcgagagagaccacctgatcaccaagagagacctggccctgagcgagggcgacatccacaccctgggctgcggcgtggcccagtgcctgaagatcgtgtgccaggtgggcagactggacagaggcaagagcgccatcctgtacgtgaagagcctgctgtggaccgagaccttcatgaacaaggagaaccagaaccacagctacagcctgaagagcagcgccagcttcaacgtgatcgagttcccctacaagaacctgcccatcgaggacatcaccaacagcaccctggtgaccaccaacgtgacctggggcatccagcccgcccccatgcccgtgcccgtgtgggtgatcatcctggccgtgctggccggcctgctgctgctggccgtgctggtgttcgtgatgtacagaatgggcttcttcaagagagtgagacccccccaggaggagcaggagagagagcagctgcagccccacgagaacggcgagggcaacagcgagacctag

SEQ ID NO: 56822 - DNA, 3009 bp, Artificial Sequence
  derived and/or modified sequence
atgctgttaggaaccctcctgttaatcctgtatatcctgatgctttgtagaatgttcctgctggtcggcgctcccaaagcaaatactactcagcctggaattgtggaagggggccaggtgcttaaatgcgattggtcgtctaccaggaggtgtcagcccatcgagttcgatgcaactgggaatagggattacgccaaagatgaccccctagaatttaaatcccatcagtggtttggcgcgtccgtccgctctaaacaggacaagatattggcctgcgcaccactataccactggcggacagaaatgaaacaagagcgcgagcctgtcggaacctgtttcctccaagacgggacaaagacagtcgaatatgcaccgtgccgctcgcaggacatcgacgccgatggtcagggtttctgccaaggagggttcagtattgattttacaaaagctgaccgcgttctgctcggcggtcccggaagtttttactggcagggccagctgatctccgaccaggtggcagaaatagttagcaaatatgatccaaacgtttatagtattaagtataataatcaactggcgacacgaactgcacaagctatattcgatgacagctacctaggctacagcgtggccgttggcgattttaacggagacggaattgatgattttgtgtcaggcgtccctcgagccgcacgcacgctgggaatggtgtatatatacgacgggaagaacatgtcatctctttataattttacaggcgagcagatggctgcgtactttggattttctgttgcagcaacagacatcaacggcgatgattatgccgatgtgttcatcggcgctcctctcttcatggacaggggatcagatggcaagctgcaagaggtgggccaagtgtctgtctccctgcagagggctagcggcgactttcagactactaaacttaatgggttcgaggtgtttgcgagatttggctctgcaattgcccccctgggtgacctggaccaggatggattcaatgatattgctatagctgccccttacggcggggaggacaaaaaaggaatagtgtacatttttaacggacggtccaccggtctgaacgccgtgccctcacaaattctggaaggccagtgggcagcccgctcaatgcctccctcttttggatacagtatgaagggcgcaactgatatcgacaaaaacgggtacccggatctgatagtgggcgcattcggagtggatagggcgatactttaccgggcccgaccagtcattacggtgaacgctggactggaagtgtatccttccatactgaaccaagacaacaagacctgttccttgcctggaacggcattaaaagtgtcttgttttaatgtcaggttctgcttgaaggccgatggcaaaggggtccttcccagaaagctgaacttccaggtcgagttgctgctggacaagttaaaacagaaaggtgccatcagacgagcattattcctatatagccgctctccctcccactctaagaacatgaccatcagcaggggtggtcttatgcagtgtgaagaactgattgcgtacttgcgagatgaatccgaattcagagacaagcttacacccatcactatttttatggagtaccggttagactataggacggcagcggacacaacgggattacaacctatccttaatcaattcacgccggcaaatatatctcggcaggcccatattctccttgactgcggcgaggacaacgtgtgtaagccaaagcttgaggtgagcgttgattccgaccagaagaagatttacattggcgatgataacccactcaccctaatcgttaaagcacagaatcagggagagggggcttatgaagccgaactcatagtcagcatccctctccaagctgatttcattggcgtggtccgaaataacgaggccctggcccgactgtcttgcgcgtttaagacagagaatcagactcgccaggtcgtgtgcgacctgggcaatcctatgaaggctggaacccagctcctggccgggttacgattcagcgtccatcagcagtcagagatggatacgagcgtcaaatttgacctgcagattcagagctctaatctcttcgacaaagtctcccctgtggtgtcccataaggtggacctagccgttttagcagctgtggaaatccggggggtcagctcccccgaccacgtttttctgcccattccaaattgggagcacaaagaaaatcccgaaaccgaggaggatgtgggccccgtagtgcagcatatttacgaactgagaaacaacggacccagtagcttttccaaagcgatgttgcacctccagtggccttacaaatacaataataatacactgctgtacatactgcactatgatattgatgggccaatgaattgtacttctgacatggagatcaatccacttcgaattaagatctcaagcttgcaaacaactgagaagaacgacaccgtggccggacagggtgagagggatcacctcattactaaacgggatttggccttgagcgagggcgacattcacaccctcggatgcggggttgcacaatgcttgaaaatcgtctgtcaagtcgggcgcctggatcgtggtaagtccgccattctctacgttaaatcgctcttatggactgagacatttatgaataaggaaaatcagaatcacagctacagcctcaagagttcagcttccttcaacgtcatagagtttccatacaagaacttgcccatcgaggatattacaaactctaccttagtgacaaccaatgttacttgggggattcagcccgcacccatgccggtgcccgtgtgggtgatcatcctggcagtcctggccggacttctcctgttggctgtcctagtgttcgtgatgtacaggatgggatttttcaaacgggtccgacccccgcaggaagagcaggaacgcgagcagctacagccgcacgagaatggagaaggcaacagcgagacctag

SEQ ID NO: 56823 - DNA, 3009 bp, Artificial Sequence
  derived and/or modified sequence
atgctgctgggcaccctgctgctgatcctgtacatcctgatgctgtgcaggatgttcctgctggtgggcgcccccaaggccaacaccacccagcccggcatcgtggagggcggccaggtgctgaagtgtgactggagcagcacccggcgctgccagcccatcgagtttgatgccactggaaacagagattatgccaaggatgaccccctggagttcaagagccaccagtggtttggagcctctgtgcgcagcaagcaggacaagatcctggcctgtgcccccctgtaccactggaggacagagatgaagcaggagcgggagcctgtgggcacctgcttcctgcaggacggcaccaagacagtggagtatgccccctgccgcagccaggacattgatgctgatggccagggcttctgccagggcggcttcagcattgacttcaccaaggctgacagagtgctgctgggcggccctggcagcttctactggcagggccagctgatcagtgaccaggtggccgagatcgtgtccaaatatgaccccaacgtgtacagcatcaagtacaacaaccagctggccaccaggacagcccaggccatctttgatgacagctacctgggctacagcgtggccgtgggggacttcaatggagatggcattgatgactttgtgtctggagtgccccgggccgcccggaccctgggcatggtgtacatctatgatggcaagaacatgagcagcctgtacaacttcaccggggagcagatggccgcctacttcggcttctctgtggccgccacagacatcaatggagatgattatgcagatgtgttcatcggggcccccctcttcatggaccggggcagtgatggcaagctgcaggaggtgggccaggtgtctgtgtccctgcagagggccagcggggacttccagaccaccaagctgaatggatttgaggtgtttgcccgcttcggcagcgccatcgcccccctgggggacctggaccaggacggcttcaatgacatcgccatcgccgccccctatggaggagaggacaagaagggcatcgtgtacatcttcaacggccgcagcacaggcctgaatgctgtgcccagccagatcctggagggccagtgggccgcccgctccatgcctccttcctttggctacagcatgaagggggccacagacatcgacaagaatggctacccagacctgattgtgggcgcctttggagtggaccgggccatcctgtaccgggcccggcctgtgatcaccgtgaatgccggcctggaggtgtaccccagcatcctgaaccaggacaacaagacctgcagcctgcccggcacagccctgaaggtgtcctgcttcaacgtgcgcttctgcctgaaggcagatggcaagggcgtgctgcccaggaagctgaacttccaggtggagctgctgctggacaagctgaagcagaagggggccatcagaagagccctcttcctgtacagccgcagccccagccacagcaagaacatgaccatcagccggggcggcctgatgcagtgtgaggagctgattgcctacctgagagatgagagcgagttccgggacaagctgacccccatcaccatcttcatggagtaccgcctggactacagaacagctgctgacaccaccggcctgcagcccatcctgaaccagttcaccccagccaacatcagccggcaggcccacatcctgctggactgtggggaggacaacgtgtgcaagcccaagctggaggtgtctgtggacagcgaccagaagaagatctacatcggagatgacaaccccctgaccctcatcgtgaaggcccagaaccagggcgagggcgcctatgaagctgagctgattgtgtccatccccctgcaggccgacttcatcggcgtggtgaggaacaatgaggccctggcccggctgagctgtgccttcaagacagagaaccagacccggcaggtggtgtgtgacctgggcaaccccatgaaggccggcacccagctgctggccggcctgcgcttctctgtgcaccagcagagcgagatggacacctctgtgaagtttgacctgcagatccagagcagcaacctgtttgacaaggtgtcccctgtggtgagccacaaggtggacctggccgtgctggccgctgtggagatccggggcgtgagcagcccagaccacgtgttcctgcccatccccaactgggagcacaaggagaaccctgagacagaggaggatgtgggccctgtggtgcagcacatctatgagctgagaaataatggccccagcagcttcagcaaggccatgctgcacctgcagtggccctacaagtacaacaacaacaccctgctgtacatcctgcactatgacattgatggccccatgaactgcaccagtgacatggagatcaaccccctgcgcatcaagatcagcagcctgcagaccacagagaagaatgacacagtggccggccagggcgagcgggaccacctgatcaccaagagggacctggccctgtctgagggggacatccacaccctgggctgcggcgtggcccagtgcctgaagatcgtgtgccaggtgggccgcctggaccggggcaagagcgccatcctgtatgtgaagagcctgctgtggacagagaccttcatgaacaaggagaaccagaaccacagctacagcctgaagagcagcgccagcttcaacgtgattgagttcccctacaagaacctgcccatcgaggacatcaccaacagcaccctggtgaccaccaacgtgacctggggcatccagcctgcccccatgcctgtgcctgtgtgggtgatcatcctggccgtgctggccggcctgctgctgctggccgtgctggtgtttgtgatgtacaggatgggcttcttcaagagggtgcggcccccccaggaggagcaggagcgggagcagctgcagccccatgaaaatggagagggcaacagcgagacctag

SEQ ID NO: 56824 - DNA, 3288 bp, Artificial Sequence
  derived and/or modified sequence
ctttgtagctcctggagattcaattctttcttgccagggtctttctacctctgcctcacatattccctccatctcttcattccacttccctcatccccaccccccactcccctccatcctcaatacacaaatgctcctaggcaccctccttctgatcctgtacatcttaatgttgtgccggatgtttcttctcgtgggagctcccaaagcaaacaccacccagcctgggattgtggaaggagggcaggtcctcaaatgtgactggtcttctacccgccggtgccagccaattgaatttgatgcaacaggcaatagagattatgccaaggatgatccattggaatttaagtcccatcagtggtttggagcatctgtgaggtcgaaacaggataaaattttggcctgtgccccattgtaccattggagaactgagatgaaacaggagcgagagcctgttggaacatgctttcttcaagatggaacaaagactgttgagtatgctccatgtagatcacaagatattgatgctgatggacagggattttgtcaaggaggattcagcattgattttactaaagctgacagagtacttcttggtggtcctggtagcttttattggcaaggtcagcttatttcggatcaagtggcagaaatcgtatctaaatacgaccccaatgtttacagcatcaagtataataaccaattagcaactcggactgcacaagctatttttgatgacagctatttgggttattctgtggctgtcggagatttcaatggtgatggcatagatgactttgtttcaggagttccaagagcagcaaggactttgggaatggtttatatttatgatgggaagaacatgtcctccttatacaattttactggcgagcagatggctgcatatttcggattttctgtagctgccactgacattaatggagatgattatgcagatgtgtttattggagcacctctcttcatggatcgtggctctgatggcaaactccaagaggtggggcaggtctcagtgtctctacagagagcttcaggagacttccagacgacaaagctgaatggatttgaggtctttgcacggtttggcagtgccatagctcctttgggagatctggaccaggatggtttcaatgatattgcaattgctgctccatatgggggtgaagataaaaaaggaattgtttatatcttcaatggaagatcaacaggcttgaacgcagtcccatctcaaatccttgaagggcagtgggctgctcgaagcatgccaccaagctttggctattcaatgaaaggagccacagatatagacaaaaatggatatccagacttaattgtaggagcttttggtgtagatcgagctatcttatacagggccagaccagttatcactgtaaatgctggtcttgaagtgtaccctagcattttaaatcaagacaataaaacctgctcactgcctggaacagctctcaaagtttcctgttttaatgttaggttctgcttaaaggcagatggcaaaggagtacttcccaggaaacttaatttccaggtggaacttcttttggataaactcaagcaaaagggagcaattcgacgagcactgtttctctacagcaggtccccaagtcactccaagaacatgactatttcaagggggggactgatgcagtgtgaggaattgatagcgtatctgcgggatgaatctgaatttagagacaaactcactccaattactatttttatggaatatcggttggattatagaacagctgctgatacaacaggcttgcaacccattcttaaccagttcacgcctgctaacattagtcgacaggctcacattctacttgactgtggtgaagacaatgtctgtaaacccaagctggaagtttctgtagatagtgatcaaaagaagatctatattggggatgacaaccctctgacattgattgttaaggctcagaatcaaggagaaggtgcctacgaagctgagctcatcgtttccattccactgcaggctgatttcatcggggttgtccgaaacaatgaagccttagcaagactttcctgtgcatttaagacagaaaaccaaactcgccaggtggtatgtgaccttggaaacccaatgaaggctggaactcaactcttagctggtcttcgtttcagtgtgcaccagcagtcagagatggatacttctgtgaaatttgacttacaaatccaaagctcaaatctatttgacaaagtaagcccagttgtatctcacaaagttgatcttgctgttttagctgcagttgagataagaggagtctcgagtcctgatcatgtctttcttccgattccaaactgggagcacaaggagaaccctgagactgaagaagatgttgggccagttgttcagcacatctatgagctgagaaacaatggtccaagttcattcagcaaggcaatgctccatcttcagtggccttacaaatataataataacactctgttgtatatccttcattatgatattgatggaccaatgaactgcacttcagatatggagatcaaccctttgagaattaagatctcatctttgcaaacaactgaaaagaatgacacggttgccgggcaaggtgagcgggaccatctcatcactaagcgggatcttgccctcagtgaaggagatattcacactttgggttgtggagttgctcagtgcttgaagattgtctgccaagttgggagattagacagaggaaagagtgcaatcttgtacgtaaagtcattactgtggactgagacttttatgaataaagaaaatcagaatcattcctattctctgaagtcgtctgcttcatttaatgtcatagagtttccttataagaatcttccaattgaggatatcaccaactccacattggttaccactaatgtcacctggggcattcagccagcgcccatgcctgtgcctgtgtgggtgatcattttagcagttctagcaggattgttgctactggctgttttggtatttgtaatgtacaggatgggcttttttaaacgggtccggccacctcaagaagaacaagaaagggagcagcttcaacctcatgaaaatggtgaaggaaactcagaaacttaactgcagtttttaagttatgctacatcttgacccactagaattagcaactttattatagatttaaactttcttcatgaggagtaaaaatccaaggctttactgctgatagtgctaattggcattaaccacaaaatgagaattatatttgt

SEQ ID NO: 56825 - DNA, 3009 bp, Artificial Sequence
  derived and/or modified sequence
atgctgctgggcaccctgctgctgatcctgtacatcctgatgctgtgcaggatgtttctgttagttggtgctccaaaagccaataccacccagccaggaattgttgagggcgggcaggtgctcaaatgtgattggtctagtacgcgcagatgtcaaccaattgagttcgatgccaccggaaatagggactacgcaaaggatgacccactggaatttaagagtcaccaatggttcggggccagcgtccggtcaaaacaggacaaaattctggcttgtgctcccctataccactggcggactgagatgaaacaggagagggaaccagtgggcacatgcttcctccaggatggaaccaagactgtggaatatgccccttgtcggagccaggacatcgacgcggacggacaaggcttctgccaggggggttttagcatcgacttcaccaaagccgaccgggttttgctcggcggtcccgggagcttctactggcaaggccaattaatttctgaccaggtagctgagattgtgagcaagtacgaccctaatgtctatagtatcaagtacaacaatcagctggcgacaagaacagcacaggccattttcgacgattcttatctgggctactcagtggccgttggagatttcaacggcgacgggattgacgatttcgtgtccggagtcccaagggcagcaagaactttgggcatggtatacatttacgacggaaagaacatgtcctctttgtataactttacaggtgagcaaatggctgcgtattttggatttagtgtagcagcaaccgacatcaatggagatgactatgcagacgtttttattggggcccccttatttatggatcgcggtagcgatggaaaacttcaggaggtcggccaagtctccgtctcactccagcgcgcgagcggggacttccagacaacgaagctgaatgggtttgaagtattcgcaagattcggatcagccatagcgccgttaggagacctcgatcaagatgggtttaacgacatcgctatcgccgctccatatggcggagaagataagaaagggattgtctatattttcaatgggaggtcaactggcttaaatgccgtgcctagtcagattcttgagggccagtgggcagcaaggagcatgcctccttcatttggctacagcatgaaaggcgcaacagacatcgataaaaacggctatcccgatctaatagtcggtgcatttggagtggatcgcgcaattctatatcgtgcaagacccgttattaccgtcaatgccggcctggaagtatatccatctattctaaatcaggacaataagacttgcagcttgcctggtaccgctcttaaagtgtcttgcttcaatgtgcgcttttgtctcaaagctgatggtaagggggtcctaccacggaagctcaacttccaggttgaattgttgctcgataagctgaaacagaagggcgctattcggcgagcgctgttcctctactcccgcagccccagccactcaaaaaatatgacaataagtcgcggtgggttaatgcagtgtgaggagttaattgcctaccttagagatgagtccgagtttagagataaactaacacctattacgatctttatggaatatagactggattatcgcacggccgccgatacaactggcctgcagccgatcctcaaccaattcacccctgccaacatcagcagacaggcccacatcctgctggattgtggtgaggataacgtctgcaagccgaaactcgaggtatctgtcgactctgatcagaaaaaaatttatatcggggatgacaacccactgactctgatcgttaaggcgcagaaccagggcgagggcgcctacgaggctgagctaatcgtaagtatacccctgcaggcggatttcattggagtagtgaggaacaatgaggcactggccagattatcttgcgctttcaagacagagaatcagacgaggcaggtcgtgtgtgaccttggaaaccctatgaaggcaggtacccaactgctcgcgggactgagattttcagtacatcagcagagcgaaatggatacctcagtgaagttcgatcttcaaatccaatcctcaaacttgtttgacaaagtttcccctgtggtgtcccataaggtggacttggcggtgctggccgccgtggaaatccggggcgtttcttcccccgaccacgtctttctgcctatccctaactgggagcataaagaaaaccccgaaaccgaggaggacgtcgggcctgtggtgcagcatatctacgaattacgcaacaacggcccatcgtcgttcagtaaggctatgctacacctccagtggccatacaaatacaacaacaatacactgctgtacatcctgcattatgacatcgacgggcccatgaactgtacctccgacatggagattaacccgctgcgtatcaaaatctcctctctgcaaaccacagagaagaatgacactgtggccgggcagggtgaaagggatcatctgatcactaagcgtgacctggccttgagtgaaggcgacatccataccctgggatgtggcgtcgcccagtgccttaagatcgtatgtcaggtgggtcggctcgaccgtggaaaaagtgcgatactgtacgtaaaaagcctcctgtggacagaaactttcatgaataaagagaaccagaaccattcctactccttgaaaagctcagcctctttcaatgtgatcgagttcccctacaagaacctcccgattgaggatattactaattcaactctggtgacgacaaatgtgacatggggcatacagccagccccaatgcccgtccctgtctgggtgatcattctggctgtgctggctgggcttctgctgttggcggtacttgtgtttgtcatgtataggatgggattctttaaaagagtacggcccccccaggaggaacaggagagggaacagttacagcctcatgagaacggtgagggcaatagtgagacttag

SEQ ID NO: 56826 - DNA, 3009 bp, Artificial Sequence
  derived and/or modified sequence
atgctgctgggaacgttgctccttatactctatatcttgatgctttgtcgcatgtttctgttggtcggagcgcctaaagccaataccacacagcctgggatcgtggaaggagggcaagttctgaaatgcgactggagtagcacacgtcgctgtcaacctatcgagtttgacgcgactggcaaccgcgactacgcgaaagacgaccctcttgaatttaaaagccaccagtggttcggcgcttctgttcggagtaagcaagacaaaatccttgcgtgtgcacctctctaccattggcgaacagagatgaaacaggaacgggagccggtaggaacttgtttcctgcaggacgggaccaaaaccgtcgagtacgctccttgcagaagtcaggacatagatgccgacggtcaggggttctgccaagggggtttcagtatcgattttactaaggcagaccgagtgctgctgggcggtcccggtagcttctactggcagggacagctgatcagtgaccaggtggccgaaatcgtctccaagtacgaccccaatgtgtattctatcaaatataacaatcagttagcgacgcggaccgcccaagccattttcgatgacagctatttggggtattccgtcgctgtgggcgattttaatggcgacggtattgatgacttcgtgtcaggggttcccagggccgcaagaaccctgggtatggtctatatctacgacggcaagaacatgagctccctgtataacttcaccggggagcaaatggcagcttactttgggttctcagtcgccgctaccgacatcaacggtgacgactatgctgacgtgtttatcggtgcccctctctttatggaccgaggcagcgacggtaagctgcaggaagttggacaggtctctgttagtttgcagcgtgcaagcggagattttcagaccacgaagctgaatggattcgaagtgttcgcaaggttcggaagcgctattgctcctttgggggacctggaccaggacggattcaatgacatagcaattgccgcaccctacgggggtgaagacaagaaggggattgtgtatatcttcaatggtcgaagcactggactgaatgccgtgcccagccagatccttgaggggcaatgggcagctagaagtatgccgcctagtttcggatactccatgaaaggcgctacagacatcgataaaaatggttacccagatctgatcgtaggcgcatttggcgttgatagggccatactctacagggccaggccagtcatcacagttaacgcagggctggaagtgtacccatctatactaaaccaggacaacaaaacttgtagcctgcccggaaccgcactgaaggtatcttgcttcaacgtccgtttctgcttgaaggccgatggtaagggcgtgctgcccagaaaactcaactttcaggtggagctgctgttggataaactaaaacagaagggcgctattaggagggccctcttcctctattctagatcaccatcccactcaaagaacatgacgatttctcgcggtgggctgatgcaatgtgaagagctgattgcttacctccgtgatgagagcgagtttagagataaactcactccaatcacaatattcatggaatacagactagattacagaaccgccgctgataccacgggactgcaacctattctcaaccagttcactcctgcaaatatttctcggcaggcccatattcttctggattgtggtgaagacaatgtctgtaaacctaagttagaggtgtctgtggattctgaccagaagaaaatctacatcggagacgataaccctctgaccctgatagtcaaggcacagaatcaaggtgaaggagcctacgaggctgaactgatagtctcaataccgctccaggccgacttcattggagtggtccggaacaacgaggccttagcccgtttgtcttgcgcctttaaaactgagaatcaaacgcggcaggtggtgtgcgatctgggcaatccaatgaaggcgggaacccaacttctcgcaggcctgagattttcggtccatcaacagtccgagatggacacgtcagtgaagtttgacctgcagatacagtcgagcaacttgtttgataaggtgagcccagtcgtatcgcacaaagtggacctggcagtgcttgccgctgttgagatcaggggtgtatcttctccggaccacgtgtttttacccattcccaattgggagcacaaggaaaatcctgagacggaagaagacgtaggtcctgtcgtccagcatatctacgagttaagaaataacggcccaagctcctttagcaaagcaatgttgcacttacagtggccttataagtacaacaacaacacactgctgtacatacttcactacgacatagatggacccatgaattgtaccagtgatatggagatcaacccgcttcggattaaaatcagctctctccagactaccgagaaaaacgatacagttgctggccaaggcgagcgggatcatctcatcacgaaaagggacttagctcttagcgagggagacatccacacattagggtgcggggtagctcagtgcttaaaaattgtttgtcaagtgggcaggttggaccgaggtaaaagcgccattctctatgtaaaaagcctcctgtggaccgagacattcatgaacaaggagaaccaaaatcacagctattctctgaagtcctcggcctcgtttaacgttatagagtttccctacaagaacctccctattgaagatatcacaaactccaccctggtgacgactaacgtgacctggggaatccagcccgctccaatgccggtacctgtgtgggtaataattctggctgtgttggccggtctcctgctattagcggttctagtgtttgttatgtaccgcatgggttttttcaagcgcgtgcgccctccgcaagaggaacaggaaagagaacagctgcagccacacgagaatggtgagggcaattctgagacctag

SEQ ID NO: 56827 - protein, 1012 aa, Artificial Sequence
  derived and/or modified sequence
MAFPPRRRLRLGPRGLPLLLSGLLLPLCRAFNLDVDSPAEYSGPEGSYFGFAVDFFVPSASSRMFLLVGAPKANTTQPGIVEGGQVLKCDWSSTRRCQPIEFDATGNRDYAKDDPLEFKSHQWFGASVRSKQDKILACAPLYHWRTEMKQEREPVGTCFLQDGTKTVEYAPCRSRQLISDQVAEIVSKYDPNVYSIKYNNQLATRTAQAIFDDSYLGYSVAVGDFNGDGIDDFVSGVPRAARTLGMVYIYDGKNMSSLYNFTGEQMAAYFGFSVAATDINGDDYADVFIGAPLFMDRGSDGKLQEVGQVSVSLQRASGDFQTTKLNGFEVFARFGSAIAPLGDLDQDGFNDIAIAAPYGGEDKKGIVYIFNGRSTGLNAVPSQILEGQWAARSMPPSFGYSMKGATDIDKNGYPDLIVGAFGVDRAILYRARPVITVNAGLEVYPSILNQDNKTCSLPGTALKVSCFNVRFCLKADGKGVLPRKLNFQVELLLDKLKQKGAIRRALFLYSRSPSHSKNMTISRGGLMQCEELIAYLRDESEFRDKLTPITIFMEYRLDYRTAADTTGLQPILNQFTPANISRQAHILLDCGEDNVCKPKLEVSVDSDQKKIYIGDDNPLTLIVKAQNQGEGAYEAELIVSIPLQADFIGVVRNNEALARLSCAFKTENQTRQVVCDLGNPMKAGTQLLAGLRFSVHQQSEMDTSVKFDLQIQSSNLFDKVSPVVSHKVDLAVLAAVEIRGVSSPDHVFLPIPNWEHKENPETEEDVGPVVQHIYELRNNGPSSFSKAMLHLQWPYKYNNNTLLYILHYDIDGPMNCTSDMEINPLRIKISSLQTTEKNDTVAGQGERDHLITKRDLALSEGDIHTLGCGVAQCLKIVCQVGRLDRGKSAILYVKSLLWTETFMNKENQNHSYSLKSSASFNVIEFPYKNLPIEDITNSTLVTTNVTWGIQPAPMPVPVWVIILAVLAGLLLLAVLVFVMYRMGFFKRVRPPQEEQEREQLQPHENGEGNSET

SEQ ID NO: 56828 - DNA, 3039 bp, Artificial Sequence
  derived and/or modified sequence
atggccttcccccccagaagaagactgagactgggccccagaggcctgcccctgctgctgagcggcctgctgctgcccctgtgcagagccttcaacctggacgtggacagccccgccgagtacagcggccccgagggcagctacttcggcttcgccgtggacttcttcgtgcccagcgccagcagcagaatgttcctgctggtgggcgcccccaaggccaacaccacccagcccggcatcgtggagggcggccaggtgctgaagtgcgactggagcagcaccagaagatgccagcccatcgagttcgacgccaccggcaacagagactacgccaaggacgaccccctggagttcaagagccaccagtggttcggcgccagcgtgagaagcaagcaggacaagatcctggcctgcgcccccctgtaccactggagaaccgagatgaagcaggagagagagcccgtgggcacctgcttcctgcaggacggcaccaagaccgtggagtacgccccctgcagaagcagacagctgatcagcgaccaggtggccgagatcgtgagcaagtacgaccccaacgtgtacagcatcaagtacaacaaccagctggccaccagaaccgcccaggccatcttcgacgacagctacctgggctacagcgtggccgtgggcgacttcaacggcgacggcatcgacgacttcgtgagcggcgtgcccagagccgccagaaccctgggcatggtgtacatctacgacggcaagaacatgagcagcctgtacaacttcaccggcgagcagatggccgcctacttcggcttcagcgtggccgccaccgacatcaacggcgacgactacgccgacgtgttcatcggcgcccccctgttcatggacagaggcagcgacggcaagctgcaggaggtgggccaggtgagcgtgagcctgcagagagccagcggcgacttccagaccaccaagctgaacggcttcgaggtgttcgccagattcggcagcgccatcgcccccctgggcgacctggaccaggacggcttcaacgacatcgccatcgccgccccctacggcggcgaggacaagaagggcatcgtgtacatcttcaacggcagaagcaccggcctgaacgccgtgcccagccagatcctggagggccagtgggccgccagaagcatgccccccagcttcggctacagcatgaagggcgccaccgacatcgacaagaacggctaccccgacctgatcgtgggcgccttcggcgtggacagagccatcctgtacagagccagacccgtgatcaccgtgaacgccggcctggaggtgtaccccagcatcctgaaccaggacaacaagacctgcagcctgcccggcaccgccctgaaggtgagctgcttcaacgtgagattctgcctgaaggccgacggcaagggcgtgctgcccagaaagctgaacttccaggtggagctgctgctggacaagctgaagcagaagggcgccatcagaagagccctgttcctgtacagcagaagccccagccacagcaagaacatgaccatcagcagaggcggcctgatgcagtgcgaggagctgatcgcctacctgagagacgagagcgagttcagagacaagctgacccccatcaccatcttcatggagtacagactggactacagaaccgccgccgacaccaccggcctgcagcccatcctgaaccagttcacccccgccaacatcagcagacaggcccacatcctgctggactgcggcgaggacaacgtgtgcaagcccaagctggaggtgagcgtggacagcgaccagaagaagatctacatcggcgacgacaaccccctgaccctgatcgtgaaggcccagaaccagggcgagggcgcctacgaggccgagctgatcgtgagcatccccctgcaggccgacttcatcggcgtggtgagaaacaacgaggccctggccagactgagctgcgccttcaagaccgagaaccagaccagacaggtggtgtgcgacctgggcaaccccatgaaggccggcacccagctgctggccggcctgagattcagcgtgcaccagcagagcgagatggacaccagcgtgaagttcgacctgcagatccagagcagcaacctgttcgacaaggtgagccccgtggtgagccacaaggtggacctggccgtgctggccgccgtggagatcagaggcgtgagcagccccgaccacgtgttcctgcccatccccaactgggagcacaaggagaaccccgagaccgaggaggacgtgggccccgtggtgcagcacatctacgagctgagaaacaacggccccagcagcttcagcaaggccatgctgcacctgcagtggccctacaagtacaacaacaacaccctgctgtacatcctgcactacgacatcgacggccccatgaactgcaccagcgacatggagatcaaccccctgagaatcaagatcagcagcctgcagaccaccgagaagaacgacaccgtggccggccagggcgagagagaccacctgatcaccaagagagacctggccctgagcgagggcgacatccacaccctgggctgcggcgtggcccagtgcctgaagatcgtgtgccaggtgggcagactggacagaggcaagagcgccatcctgtacgtgaagagcctgctgtggaccgagaccttcatgaacaaggagaaccagaaccacagctacagcctgaagagcagcgccagcttcaacgtgatcgagttcccctacaagaacctgcccatcgaggacatcaccaacagcaccctggtgaccaccaacgtgacctggggcatccagcccgcccccatgcccgtgcccgtgtgggtgatcatcctggccgtgctggccggcctgctgctgctggccgtgctggtgttcgtgatgtacagaatgggcttcttcaagagagtgagacccccccaggaggagcaggagagagagcagctgcagccccacgagaacggcgagggcaacagcgagacctag

SEQ ID NO: 56829 - DNA, 3039 bp, Artificial Sequence
  derived and/or modified sequence
atggcttttccaccacgacgacggttgcgtctcggaccacggggtcttcccctgctgctgagcgggctgttactgccgctttgtcgggcttttaatctagacgtcgactcccctgcggagtattctggcccagagggaagttattttgggttcgctgtggatttttttgtgccgtcagcctctagccggatgtttctgctggtcggggccccaaaagccaatacgactcagcccggaatcgtggaggggggacaggtcctcaaatgtgactggagtagcacacggcgctgtcagcctatagagttcgatgctaccggaaaccgtgactatgctaaagacgacccactagagttcaagtcgcaccagtggtttggcgctagcgtgagatccaagcaggacaagattctggcctgtgcaccgctttatcactggcggaccgagatgaagcaggagcgcgagccagtgggcacctgcttcctccaggacggtacaaagaccgtggagtacgccccctgtagatctcgacagctgataagcgaccaggttgctgaaatcgtgagtaaatacgacccaaatgtctattctatcaagtacaacaaccaacttgcgaccaggaccgcccaggcaatttttgacgacagctatttggggtattccgttgcagttggtgattttaacggagatgggatcgatgactttgtttctggagtccctcgcgcggctcggacacttggaatggtctacatatacgacggaaagaatatgtcttcgctgtacaacttcacaggcgagcagatggctgcttatttcgggttctcagtagccgctaccgatataaacggggacgattacgcagatgtgttcatcggcgcccccctattcatggatagggggtcagacggaaaactacaggaggtgggccaagtctcggtctcccttcagagagcttccggagactttcagacaactaagctcaatggattcgaggtctttgcccgatttggtagcgccatagctcctttgggagacttagatcaggatggatttaatgacatcgccatcgcagctccctacggcggtgaggataagaagggcatcgtgtacatttttaacggacgatcgaccggcctgaatgccgtgccctcacaaatccttgaaggacagtgggcagcaaggagtatgccaccttctttcggatattcaatgaagggtgctaccgatatagacaaaaatggatatccagacctcatcgtcggtgcctttggagtggatagagccatcctctatcgcgcccgcccggtcataaccgttaacgcaggactcgaggtgtaccctagcatcctaaaccaggacaacaaaacctgctcgttacctggaactgctcttaaggtctcttgttttaatgtgcgattttgccttaaagccgatgggaagggagttcttcccagaaaacttaatttccaagtggaactgctgctcgacaagttgaagcagaagggagctattaggcgggctctgttcctgtactcacgctcaccctctcacagtaaaaacatgacaattagcagggggggactcatgcaatgcgaagaactgatcgcgtatttaagggacgagtccgagtttcgcgacaaactgacacctattactattttcatggagtacaggttggattatagaaccgccgctgacaccactggccttcagccaattttgaatcagtttacacccgccaatataagtcgccaagcccacatcctgctcgactgcggggaggataatgtgtgtaagccaaaactggaagtgtcagttgactcagatcagaagaagatctatattggagatgataatccccttactcttattgtcaaggcccaaaatcaaggcgaaggtgcttacgaggccgaactgattgtcagtatcccactgcaggcagatttcatcggagttgttcgcaacaatgaggcgctcgcccgattgagttgcgcctttaaaactgagaatcaaaccagacaggtagtctgtgacctcggcaatcctatgaaagctggtacacagctgcttgccgggctgcgattcagtgtgcaccaacaaagtgaaatggacacctctgtgaaattcgatctacaaatacaaagctctaatctgtttgacaaagttagtcctgtagtgagtcataaagtcgatctcgccgtgctggccgccgtggagatccgcggcgtgtcctcccccgatcacgtcttcctgccaatccctaactgggaacacaaggaaaatccggagaccgaggaagacgtggggcccgtagttcagcatatatatgagctgagaaataacggcccctcatcattctctaaggcgatgttgcaccttcagtggccatacaaatataacaataatacgttgttgtatattctccactacgatatcgacggcccgatgaactgtaccagcgacatggagatcaatcctcttcgcataaaaatatcctctctgcagacaacagagaaaaacgatactgtggccggccagggggaaagagaccatctgatcacgaagcgcgacttggcactgagcgaaggggatatccacacactcggctgtggggtagcccagtgcctgaagatagtgtgtcaggtcggaaggctcgacagagggaagagtgccatcttgtacgttaaatctctgctgtggactgagacattcatgaataaggagaaccaaaatcattcttacagtctgaagtcctcagcgtcctttaatgtgatcgagtttccgtacaagaatctcccgatcgaggatattaccaatagcaccctggtcacaactaacgttacttggggcatccagcccgcgcccatgcctgtgccagtctgggtgatcatactggcggtgctggcggggctgctactattggctgtgctcgtctttgtgatgtaccgcatggggttttttaaaagagtccggccccctcaggaggaacaggaaagagagcagctgcagccccacgaaaacggtgaaggcaactcagagacctag

SEQ ID NO: 56830 - DNA, 3039 bp, Artificial Sequence
  derived and/or modified sequence
atggccttccccccccggcggcggctgcggctgggcccccggggcctgcccctgctgctgagcggcctgctgctgcccctgtgccgggccttcaacctggatgtggacagccctgctgagtacagcggccctgagggcagctactttggatttgctgtggacttctttgtgcccagcgccagcagcaggatgttcctgctggtgggcgcccccaaggccaacaccacccagcccggcatcgtggagggcggccaggtgctgaagtgtgactggagcagcacccggcgctgccagcccatcgagtttgatgccactggaaacagagattatgccaaggatgaccccctggagttcaagagccaccagtggtttggagcctctgtgcgcagcaagcaggacaagatcctggcctgtgcccccctgtaccactggaggacagagatgaagcaggagcgggagcctgtgggcacctgcttcctgcaggacggcaccaagacagtggagtatgccccctgccgcagccggcagctgatcagtgaccaggtggccgagatcgtgtccaaatatgaccccaacgtgtacagcatcaagtacaacaaccagctggccaccaggacagcccaggccatctttgatgacagctacctgggctacagcgtggccgtgggggacttcaatggagatggcattgatgactttgtgtctggagtgccccgggccgcccggaccctgggcatggtgtacatctatgatggcaagaacatgagcagcctgtacaacttcaccggggagcagatggccgcctacttcggcttctctgtggccgccacagacatcaatggagatgattatgcagatgtgttcatcggggcccccctcttcatggaccggggcagtgatggcaagctgcaggaggtgggccaggtgtctgtgtccctgcagagggccagcggggacttccagaccaccaagctgaatggatttgaggtgtttgcccgcttcggcagcgccatcgcccccctgggggacctggaccaggacggcttcaatgacatcgccatcgccgccccctatggaggagaggacaagaagggcatcgtgtacatcttcaacggccgcagcacaggcctgaatgctgtgcccagccagatcctggagggccagtgggccgcccgctccatgcctccttcctttggctacagcatgaagggggccacagacatcgacaagaatggctacccagacctgattgtgggcgcctttggagtggaccgggccatcctgtaccgggcccggcctgtgatcaccgtgaatgccggcctggaggtgtaccccagcatcctgaaccaggacaacaagacctgcagcctgcccggcacagccctgaaggtgtcctgcttcaacgtgcgcttctgcctgaaggcagatggcaagggcgtgctgcccaggaagctgaacttccaggtggagctgctgctggacaagctgaagcagaagggggccatcagaagagccctcttcctgtacagccgcagccccagccacagcaagaacatgaccatcagccggggcggcctgatgcagtgtgaggagctgattgcctacctgagagatgagagcgagttccgggacaagctgacccccatcaccatcttcatggagtaccgcctggactacagaacagctgctgacaccaccggcctgcagcccatcctgaaccagttcaccccagccaacatcagccggcaggcccacatcctgctggactgtggggaggacaacgtgtgcaagcccaagctggaggtgtctgtggacagcgaccagaagaagatctacatcggagatgacaaccccctgaccctcatcgtgaaggcccagaaccagggcgagggcgcctatgaagctgagctgattgtgtccatccccctgcaggccgacttcatcggcgtggtgaggaacaatgaggccctggcccggctgagctgtgccttcaagacagagaaccagacccggcaggtggtgtgtgacctgggcaaccccatgaaggccggcacccagctgctggccggcctgcgcttctctgtgcaccagcagagcgagatggacacctctgtgaagtttgacctgcagatccagagcagcaacctgtttgacaaggtgtcccctgtggtgagccacaaggtggacctggccgtgctggccgctgtggagatccggggcgtgagcagcccagaccacgtgttcctgcccatccccaactgggagcacaaggagaaccctgagacagaggaggatgtgggccctgtggtgcagcacatctatgagctgagaaataatggccccagcagcttcagcaaggccatgctgcacctgcagtggccctacaagtacaacaacaacaccctgctgtacatcctgcactatgacattgatggccccatgaactgcaccagtgacatggagatcaaccccctgcgcatcaagatcagcagcctgcagaccacagagaagaatgacacagtggccggccagggcgagcgggaccacctgatcaccaagagggacctggccctgtctgagggggacatccacaccctgggctgcggcgtggcccagtgcctgaagatcgtgtgccaggtgggccgcctggaccggggcaagagcgccatcctgtatgtgaagagcctgctgtggacagagaccttcatgaacaaggagaaccagaaccacagctacagcctgaagagcagcgccagcttcaacgtgattgagttcccctacaagaacctgcccatcgaggacatcaccaacagcaccctggtgaccaccaacgtgacctggggcatccagcctgcccccatgcctgtgcctgtgtgggtgatcatcctggccgtgctggccggcctgctgctgctggccgtgctggtgtttgtgatgtacaggatgggcttcttcaagagggtgcggcccccccaggaggagcaggagcgggagcagctgcagccccatgaaaatggagagggcaacagcgagacctag

SEQ ID NO: 56831 - DNA, 6903 bp, Artificial Sequence
  derived and/or modified sequence
ggagcggcggagccggagggaagcaaaggaccgtctgcgctgctgtccccgccccgcgcgctctgcgcccctcgtccctggcggtcgctccgaagctcagccctcttgcctgccccggagctgtcccgggctagccgagaagagagcggccggcaagtttgggcgcgcgcaggcggcgggccgcgggcactgggcgcctcgctggggcggggggaggtggctaccgctcccggcttggcgtcccgcgcgcacttcggcgatggcttttccgccgcggcgacggctgcgcctcggtccccgcggcctcccgcttcttctctcgggactcctgctacctctgtgccgcgccttcaacctagacgtggacagtcctgccgagtactctggccccgagggaagttacttcggcttcgccgtggatttcttcgtgcccagcgcgtcttcccggatgtttcttctcgtgggagctcccaaagcaaacaccacccagcctgggattgtggaaggagggcaggtcctcaaatgtgactggtcttctacccgccggtgccagccaattgaatttgatgcaacaggcaatagagattatgccaaggatgatccattggaatttaagtcccatcagtggtttggagcatctgtgaggtcgaaacaggataaaattttggcctgtgccccattgtaccattggagaactgagatgaaacaggagcgagagcctgttggaacatgctttcttcaagatggaacaaagactgttgagtatgctccatgtagatcacgtcagcttatttcggatcaagtggcagaaatcgtatctaaatacgaccccaatgtttacagcatcaagtataataaccaattagcaactcggactgcacaagctatttttgatgacagctatttgggttattctgtggctgtcggagatttcaatggtgatggcatagatgactttgtttcaggagttccaagagcagcaaggactttgggaatggtttatatttatgatgggaagaacatgtcctccttatacaattttactggcgagcagatggctgcatatttcggattttctgtagctgccactgacattaatggagatgattatgcagatgtgtttattggagcacctctcttcatggatcgtggctctgatggcaaactccaagaggtggggcaggtctcagtgtctctacagagagcttcaggagacttccagacgacaaagctgaatggatttgaggtctttgcacggtttggcagtgccatagctcctttgggagatctggaccaggatggtttcaatgatattgcaattgctgctccatatgggggtgaagataaaaaaggaattgtttatatcttcaatggaagatcaacaggcttgaacgcagtcccatctcaaatccttgaagggcagtgggctgctcgaagcatgccaccaagctttggctattcaatgaaaggagccacagatatagacaaaaatggatatccagacttaattgtaggagcttttggtgtagatcgagctatcttatacagggccagaccagttatcactgtaaatgctggtcttgaagtgtaccctagcattttaaatcaagacaataaaacctgctcactgcctggaacagctctcaaagtttcctgttttaatgttaggttctgcttaaaggcagatggcaaaggagtacttcccaggaaacttaatttccaggtggaacttcttttggataaactcaagcaaaagggagcaattcgacgagcactgtttctctacagcaggtccccaagtcactccaagaacatgactatttcaagggggggactgatgcagtgtgaggaattgatagcgtatctgcgggatgaatctgaatttagagacaaactcactccaattactatttttatggaatatcggttggattatagaacagctgctgatacaacaggcttgcaacccattcttaaccagttcacgcctgctaacattagtcgacaggctcacattctacttgactgtggtgaagacaatgtctgtaaacccaagctggaagtttctgtagatagtgatcaaaagaagatctatattggggatgacaaccctctgacattgattgttaaggctcagaatcaaggagaaggtgcctacgaagctgagctcatcgtttccattccactgcaggctgatttcatcggggttgtccgaaacaatgaagccttagcaagactttcctgtgcatttaagacagaaaaccaaactcgccaggtggtatgtgaccttggaaacccaatgaaggctggaactcaactcttagctggtcttcgtttcagtgtgcaccagcagtcagagatggatacttctgtgaaatttgacttacaaatccaaagctcaaatctatttgacaaagtaagcccagttgtatctcacaaagttgatcttgctgttttagctgcagttgagataagaggagtctcgagtcctgatcatgtctttcttccgattccaaactgggagcacaaggagaaccctgagactgaagaagatgttgggccagttgttcagcacatctatgagctgagaaacaatggtccaagttcattcagcaaggcaatgctccatcttcagtggccttacaaatataataataacactctgttgtatatccttcattatgatattgatggaccaatgaactgcacttcagatatggagatcaaccctttgagaattaagatctcatctttgcaaacaactgaaaagaatgacacggttgccgggcaaggtgagcgggaccatctcatcactaagcgggatcttgccctcagtgaaggagatattcacactttgggttgtggagttgctcagtgcttgaagattgtctgccaagttgggagattagacagaggaaagagtgcaatcttgtacgtaaagtcattactgtggactgagacttttatgaataaagaaaatcagaatcattcctattctctgaagtcgtctgcttcatttaatgtcatagagtttccttataagaatcttccaattgaggatatcaccaactccacattggttaccactaatgtcacctggggcattcagccagcgcccatgcctgtgcctgtgtgggtgatcattttagcagttctagcaggattgttgctactggctgttttggtatttgtaatgtacaggatgggcttttttaaacgggtccggccacctcaagaagaacaagaaagggagcagcttcaacctcatgaaaatggtgaaggaaactcagaaacttaactgcagtttttaagttatgctacatcttgacccactagaattagcaactttattatagatttaaactttcttcatgaggagtaaaaatccaaggctttactgctgatagtgctaattggcattaaccacaaaatgagaattatatttgtcaaccttctccttataaataagttcagacatacatttaataacatagggtgacttgtgtttttaggtatttaaataataaaatttcaagggatagtttttattcaatgtatataagacaggtagtgcctgatttactactttatataaaatagtacctccttcagttactgtttctgatttaatgtacggaactttatttgttgttgttgttgttgttgttgttgttgttttaaagcagtccaaatttggaccttagcaatcatgtcttttgtataggtacttaatgttaatacatattacactacagtttacttttcagaatactaaagactttataactgcatgaacttggatttttttaatcactcatatggtagaattttataaacacatacatgataccatccaaattcttgcttttaataacaaaggtacaatattttgttttagtatgaaaatctggtagatcctattacacttctgtttatattaaatccacaatattttattacatttttaacttgtataaattttaggtcaaatccttcaagccaacctatactaaaaattagttccataatcacaaatggctcttttgtgtaattgtttaatttcacctgaatatcataatgcttaaagccatatggagttggaaattatttccaaagcatatttattccattgttttagtctggctatttacagtataaaaaaagcatttttattaaaatactgtgtagttctttgagatagttgcttatgcatatagtaagtattacattcttagagtagagcagagtttttagttagtattaatttattttcctccattcatgtacttttccttatatttccaaaactgttactgagaatgggtcaagatcagtgagaaatctttacagttgacaggaacctggaccccttaccccaactttatgagtaatgcttggaataaaaactcttaaggcaactcactgatttacttctagcaatagcatgatgttacaggaatattacctctgtttaagcaaggtaatgtgtaaaatcagtctcggctgtcagaataacttctaaaaggtatttttataagcagttcaagttactgaaaaccttttaaacctttctgaagttcgttagtataaattacttttctaggattattaataaaagccacataggtggcaagttgtagttttatatggctctgtagagtggtgaaccttctagaggaatatatgatttattcacagttcctcaaggcctggggatgatgatcagttatacctatttttgtgcaattacatcatgttgtacattagaaatggagagtttaatagctctttaactgctgtcctcattaggtaatgataaatatttcccttaaataattgactattttgctgtgttttaaaaatgattgaaatttatcttgccatatctcataatttcatgcacaagttgactgagctaatcttgagaatatattcgtaaaataggagcacatttagttgaggtatacaaggtaggactctagacaaaaccttctattttagctttagtgaatttcaaaagtaatgggtcttggagtatagatttttattagtagcttgaaagagcttaatcatatgcagtaagtatttttattaccaataaatttaaaattttttaagaaaaatatttttatcctagggccaagtgttgcctgccaccaatcagtaagttagtctataacaaattttaccctaacagttttaccacctagtaacagtcatttctgaaaatatgttggatagaaagtcactctttggcaaaagtgttagaatttgcttttgtgccatctattccttttatggcatctatcttgaaagtaatcttgtattggagattgaaagatgctgtaatttagaaattaacatgatatcttaaattacctttatgaaatatagttttgtataatagcatagattttccttcaaaaaatgaacatttatatatctacaaaaatatggagaagagtaatttgaaagcctactttctgaagaaaatggtgggatttttttttatcatgattaaatatcaaaaaattgccctatgaaaactttaaatctctaaaacatttgaaatactaccatatttgtgatttattgagaataaaaatccattttgaaatgtaaaatttttatgatctgattcagttttaagaaaacatgaatgaactagaagatattaaaaacatttgacattggtaagaaatattgatactgatattgatttttatataggtatttatttcagaattgatattttgagaaaaatacatgtgagtcattttttctgtttctcttttctcttaacgattatcactgtaattctgaatctgaaaggtaaaacaattagtcaaaatattattgccatcattctacctgtgttatgaaactacttattcatagttaattctcattaacacttacatttccataaagaaaactcaagtattaataaaagagactttactggcttaagagggctgtgaaagatttttgatagtgaatcatgaccctaagggagagatttgtgtgataaaagtattgtatataatagatcagcgatttttgtaaggcaaacagaatttgtaagttggcagatcttcctaagttgcaaaatgtaatgatgagcttggtggagaagaatgagtcgttcttggaatacctatgtgcagccactacccatctcaatgtcaccttgtttgcattcttggatagcttgtatatgtagtagtttgatgaataatttaaagaaaaacacctaaaatttgaaaaatgattgtaggatcaaaaaaggcagatgaaattacttaatactcagtgttttggagagtattccttttagtttgttggttggctggtttgaacgatagaaatatgcagcatgcaatatatgcttatatttcattttaatttctgatatataatgaacttcttgggagaggtactgaatctttgatgttttttgtcattgttctcaagtgcaatataacaatgtaaccaaatctagataatttcaaagttgtcattaatttagtaagcctaatataaacaaatatttgtattatttttgttagcaggaaagagtgattaagtgaggttatttacccctaaatggtccattctgcattgtatttcaggctggaaatgaattattctttaccagttttgaaacactttgaaatatcctaaggtaacttggaagctgtgtagtatatcaaattaatttgctacctaataacatagaaagtaaatatctttgtggtcacccacattgggtgagacagaaaatgaatctgttctaaaatttgtaatttgctaacttgatttgagttagtgaaaactggtacagtgttctgcttgatttacaacatgtaacttgtgactgtacaataaacataagcatatggt

SEQ ID NO: 56832 - DNA, 3039 bp, Artificial Sequence
  derived and/or modified sequence
atggccttccccccccggcggcggctgcggctgggcccccggggccttcctttgttactctctggacttttgctacctctctgtagagcctttaatctggatgttgactcacccgctgagtactcgggccctgaaggatcatacttcgggtttgctgtcgatttcttcgtcccaagcgcctccagtcgaatgttcttattggttggggctcctaaagctaataccacacaaccaggaatcgtggaaggcgggcaggtgcttaagtgtgactggagcagtaccaggaggtgccagcctattgagttcgacgctaccgggaaccgcgactacgccaaggatgaccccctggagttcaaaagccaccaatggttcggcgcgtcagtgcgctctaagcaggataaaatcctggcttgtgctccgttatatcactggagaactgagatgaaacaggagagagaacccgttggcacctgcttcttgcaggacgggaccaaaacggttgaatacgcaccatgccgatcacgccaactgatctccgaccaggtagccgagattgtgagtaagtatgaccctaacgtatattctatcaagtacaataaccagttggcaactcgcaccgctcaagccattttcgacgactcatatctcggatatagtgtggctgtgggagattttaacggtgacggaatagatgactttgtgtcaggggtgccacgggccgccagaaccctggggatggtgtacatctatgacggtaagaacatgtcctctctgtacaattttacaggggagcagatggcagcatacttcggttttagcgtggccgccacagatataaatggggatgattacgctgatgtgtttattggtgcaccgttattcatggataggggcagcgatggcaagctgcaggaagtgggtcaggtcagcgttagcctgcaaagagccagtggagatttccagaccacaaaactgaacgggtttgaggtgtttgctcgttttggtagcgccatagcaccattgggggacctggaccaggatggctttaatgacatcgccattgccgccccctatggtggcgaggacaaaaagggcattgtgtacatttttaacggtcggtccaccgggctgaacgctgtgccctcccagatcctagagggacaatgggctgccaggtccatgcccccctcttttggttatagcatgaaaggggctacagatattgacaaaaacggctaccccgacctgatcgtcggtgctttcggggttgaccgcgcaattttgtaccgggcaagacccgtcataaccgttaatgccggcctcgaggtatatccctcgattctcaaccaggataacaaaacctgtagcctcccaggcacagccttaaaagtgtcgtgcttcaacgtgagattttgtctaaaggccgatggcaaaggcgtacttcctagaaaacttaactttcaggtggaattattgctcgacaagctaaagcaaaaaggcgccattaggcgcgcgctcttcctgtatagcagatctccttcccactctaagaatatgactatctctcgtggaggactcatgcaatgcgaggaactcatcgcctatcttagggatgaatcagagtttcgcgacaagttgaccccgataaccatctttatggagtaccggcttgactataggacagccgcagataccacgggtctgcaacccatcctcaatcagttcacgccggctaacatatcaagacaagctcatattcttcttgattgtggcgaggacaacgtgtgcaaaccgaaactagaggtctccgtcgatagcgaccagaagaagatatacataggtgatgataacccccttaccctgattgtgaaggctcaaaaccagggagagggggcttacgaagctgagctcatcgtgtccatcccactgcaagctgacttcatcggagtagtccgaaacaatgaagccttggctcggctgtcgtgtgcattcaaaactgagaatcagactagacaggttgtttgcgatttggggaaccctatgaaagcgggaacccagctgttggctgggttgcgatttagcgtgcaccagcagtccgagatggatacatctgttaaattcgatctgcagattcaatcctccaatttgttcgacaaggtttcgcctgtggtgtctcacaaggtggacctggccgtgctggctgccgtagagatccgcggcgtttcttcccccgatcacgtgttcttgccaatacccaactgggagcacaaagagaacccagaaacagaggaggatgtaggtcccgtggtccagcacatatacgaactgagaaataatgggccttcctctttcagtaaagcaatgctgcatctccagtggccttataaatacaacaataatacgctgctgtatattctccattatgacatcgacggacccatgaattgtacttctgacatggagatcaaccctttgaggattaagattagctcgcttcagaccaccgaaaaaaatgataccgtcgccggacagggcgaaagagatcaccttatcactaaacgggacctggccttgagcgagggggacatccataccctgggttgtggcgtggctcagtgcctgaagattgtgtgtcaagtggggagactcgacagaggtaaaagtgctatcctgtatgtgaagagcctactgtggacggagacctttatgaataaagagaaccagaaccacagctattcactcaagtcaagtgcaagcttcaacgtcatcgaatttccatataaaaatcttcctatcgaggatatcacaaacagcacactggtcacaaccaacgttacttgggggatccagcctgcgcctatgccagtgcccgtgtgggtgatcatactggcggtactggctggtctcctgctcctcgccgtgctggtgtttgtcatgtatagaatgggatttttcaaacgagtcagacctccccaagaagaacaggagcgcgagcaactgcagccacacgagaatggggaaggcaattcagagacctag

SEQ ID NO: 56833 - DNA, 3039 bp, Artificial Sequence
  derived and/or modified sequence
atggccttccctccgaggaggcgcctgcgtttggggccacgtggattgcccctgctgttaagtggcctgctccttccactctgtcgtgctttcaacctggatgtcgactctcccgcagaatatagtggcccagagggcagctattttggcttcgccgtggacttctttgttccttctgcctcatctcgaatgttcctcctggtgggcgctccaaaggcaaatacaactcagcccggtatagtcgagggtgggcaagtgctgaaatgtgactggtcctccacaagacgctgccagccaatcgagttcgacgccacaggtaaccgcgactacgctaaggatgatcctcttgaattcaaatcgcaccagtggttcggtgcaagtgtcaggtcaaaacaagataaaattcttgcatgtgcccctctgtatcattggaggacggagatgaagcaggaaagggagccggttggcacctgttttctgcaggatggaacaaagacagtggagtacgccccatgtagatctagacagttgatcagcgatcaagtggccgaaatcgttagtaagtacgatcctaacgtgtactcaatcaaatacaataaccagctcgctactcgaacggctcaggctatctttgatgacagctacctgggctatagtgttgccgtgggagacttcaatggggatggcatagacgatttcgtgtctggggtgccgagggcggcaagaaccctgggaatggtatacatatacgacggaaagaacatgtcaagtctctacaatttcacaggagaacagatggcagcatacttcgggttctctgtagccgctaccgacataaacggcgacgactatgctgatgtcttcatcggcgcaccattgttcatggacaggggatcggatggtaagctgcaagaggtggggcaggtgagcgtttccctgcaacgagcaagcggagactttcagaccaccaaactgaacggctttgaggtgttcgcgaggtttggctctgcaatcgctccgctgggtgatttggatcaggacggttttaatgacatcgccatcgcggcaccttacgggggtgaagataaaaaggggattgtctacatctttaatgggaggagtaccggcctaaatgccgtcccctcgcagatattggaaggacagtgggctgcaagatcgatgcccccatcttttgggtattcgatgaaaggagccactgacatagataagaacgggtatcccgatctgatcgtgggcgcattcggggtggaccgagccatactgtatagggcgcgacccgttatcacagtgaacgcgggactggaggtgtatcctagtatactcaatcaggataacaaaacgtgttccttacctggaaccgcactaaaggtttcatgctttaacgtacgattctgtctcaaagctgacggaaagggcgtgctgcctaggaagctaaacttccaagtcgaactgctgctggataagctcaaacagaagggcgctatccgcagagccctgtttttatacagccgttcccccagtcactcgaagaatatgacaatcagtcgcggtggacttatgcagtgtgaggagctgatagcctatctgcgcgacgagtccgaattcagggataagctgactcccattactatttttatggaataccgtttggactaccggactgccgctgataccaccggcctgcagccaatacttaatcagtttaccccagcaaatatcagcagacaggcccatatccttctcgattgcggcgaagacaacgtgtgcaagcccaaattagaagtgtccgtggatagcgatcagaagaaaatttacattggtgacgataatcctctcactctgatcgtgaaggcccagaatcagggagaaggggcttatgaagctgagctgattgtcagcattccactgcaagctgatttcataggagtcgtaagaaacaacgaagctttggccaggttgtcctgcgcattcaagaccgagaaccagacgcgccaagtagtgtgtgacctgggcaatcctatgaaggccggaacacagctactggctggtctaaggttctccgttcaccagcagagcgagatggatacaagtgttaagttcgacctgcaaatccagagctcgaatctgtttgacaaggtctctccagtcgtgagccacaaggttgacttggccgtccttgctgcagtggaaatcagaggggtctcctccccagatcacgtatttctgcctattccgaactgggaacacaaggagaaccctgaaacagaggaggacgtaggaccggtcgtccagcacatctacgagctgagaaacaacgggccatcctctttttccaaagcaatgctgcacctccagtggccctataaatataacaacaatactttattgtacatactgcattatgacattgacgggccaatgaattgcactagtgacatggagatcaatcctctgagaatcaagatttccagtcttcagacaactgaaaaaaacgacaccgtggcgggtcagggagaacgcgatcatttgatcactaagcgggacctcgcattgagcgaaggcgacatccacactctgggatgcggggttgcccagtgcctgaaaatagtgtgccaggttggcaggctggaccggggaaaaagtgcaatactgtacgtgaagtcactgctgtggaccgagacgtttatgaacaaagagaaccagaatcacagctacagccttaaaagtagcgcttctttcaatgtgattgaatttccttacaagaatttgcctatcgaggatattaccaatagtaccctggtcacgaccaacgtgacctggggaattcaaccagcccctatgcccgtgccagtgtgggtgattatcctcgcagtattggcaggactgctcttgctcgctgttctggtgtttgtgatgtaccgcatgggttttttcaaaagagtcagacctccgcaagaagagcaggaaagggagcagctgcagccacatgagaacggagagggtaacagcgaaacctag

SEQ ID NO: 56834 - protein, 347 aa, Artificial Sequence
  derived and/or modified sequence
MPRREVCWEAAHFRQEEQSLPRPRVRALVRLACRMAGQPGHMPHGGSSNNLCHTLGPVHPPDPQRHPNTLSFRCSLADFQIEKKIGRGQFSEVYKATCLLDRKTVALKKVQIFEMMDAKARQDCVKEIGLLKQLNHPNIIKYLDSFIEDNELNIVLELADAGDLSQMIKYFKKQKRLIPERTVWKYFVQLCSAVEHMHSRRVMHRDIKPANVFITATGVVKLGDLGLGRFFSSETTAAHSLVGTPYYMSPERIHENGYNFKSDIWSLGCLLYEMAALQSPFYGDKMNLFSLCQKIEQCDYPPLPGEHYSEKLRELVSMCICPDPHQRPDIGYVHQVAKQMHIWMSST

SEQ ID NO: 56835 - protein, 194 aa, Artificial Sequence
  derived and/or modified sequence
MPRREVCWEAAHFRQEEQSLPRPRVRALVRLACRMAGQPGHMPHGGSSNNLCHTLGPVHPPDPQRHPNTLSFRCSLADFQIEKKIGRGQFSEVYKATCLLDRKTVALKKVQIFEMMDAKARQDCVKEIGLLKQLNHPNIIKYLDSFIEDNELNIVLELADAGDLSQMIKYFKKQKRLIPERTVWKYFVQLCSAV

SEQ ID NO: 56836 - DNA, 1044 bp, Artificial Sequence
  derived and/or modified sequence
atgccacggagagaggtgtgctgggaggctgctcactttcgccaggaggaacagagcctgcccagacctagagttagggcactggtacgcttagcatgtcgaatggccggccagcccggacacatgcctcacggcgggagctcgaacaatctatgccacacactgggcccggtacatccaccagacccacagagacaccctaacaccttgagtttccggtgctctttggctgattttcagatcgaaaaaaaaattggcagaggtcagtttagtgaggtgtacaaagctacctgtcttttggataggaaaaccgttgccttaaaaaaggtacagatttttgaaatgatggatgcgaaggcaagacaagattgcgttaaggagattgggttactgaagcagctgaaccatcctaacataatcaaatacctggatagctttatcgaggataacgagcttaacattgtcttggagttagcggacgcaggagacctgtcccagatgatcaaatattttaagaaacagaagcgcctgatcccagagcggacagtctggaagtacttcgtgcagctgtgttctgcggttgagcacatgcacagccgccgcgtgatgcatagagacataaagccagcaaacgtgttcattactgctacaggcgtggttaaattaggcgatttaggcctgggcaggttctttagctcagaaactacagccgcccattcattagtgggtaccccttattacatgtctccagaacgtatacacgagaatgggtataattttaaaagcgacatttggtcccttggctgtttattgtacgagatggccgccctgcagtcccccttttacggggataaaatgaacttgttttccctatgtcagaagatcgagcaatgcgactatcctcctttgcctggagaacattattctgagaagttgagggaactagtgagcatgtgtatttgtcccgaccctcaccaacgccccgatattggctacgtgcatcaagttgccaagcagatgcacatctggatgtcttcgacctag

SEQ ID NO: 56837 - DNA, 1044 bp, Artificial Sequence
  derived and/or modified sequence
atgccgcgtcgcgaggtttgctgggaggctgcccacttccgtcaagaggaacagtcactcccccggcctagagtgcgggcgctcgtacgcctcgcctgcaggatggctgggcagccaggacacatgccccacggtgggtccagtaacaacttatgccatactcttggacctgttcatccgccagatcctcagaggcaccctaacacactatcgttcaggtgctcactggctgacttccaaatcgaaaaaaaaatcggcaggggccagttttctgaagtgtacaaggccacttgccttctggacaggaagacagtggcccttaagaaagtgcaaatcttcgagatgatggacgcaaaagcacgccaggactgcgtcaaggagatagggcttctaaaacagttgaatcatcctaacataataaagtacttggattccttcattgaggataatgagctgaacatcgttctcgagctagctgacgcgggcgatttgtctcaaatgatcaagtatttcaagaagcagaagagactgatcccagaacgcaccgtctggaagtatttcgtacagctttgctctgcggtagagcatatgcacagtcgccgagtgatgcatagagatatcaaaccagcgaacgtgttcattacagccacaggggtagttaagctcggagaccttgggctaggaagattcttctcctcagagacaacagcagctcacagtctcgttggcaccccttattatatgtctccagaacgaattcatgagaatggctataacttcaaatccgacatttggtcactagggtgtctcctttatgaaatggccgccctccaatcccccttctatggcgacaaaatgaacctcttctcactctgccaaaagatcgaacagtgtgactaccccccactgcccggggaacattacagcgagaagctgcgagagctcgtaagcatgtgtatttgtcctgatccacatcagcgtcctgatatcggctatgtgcaccaagtggcaaaacaaatgcacatttggatgtcctccacatag

SEQ ID NO: 56838 - DNA, 585 bp, Artificial Sequence
  derived and/or modified sequence
atgccccgccgtgaggtctgctgggaggcagcccattttaggcaggaggaacagtccctgcctcggccgcgcgtaagggcgctggtgcggctggcttgtcggatggccgggcagccaggacatatgccacatggtggatcatccaataacctgtgccacaccttaggtcccgtgcacccaccagatccccagaggcaccctaataccttgtcatttaggtgttcccttgctgacttccaaatcgagaaaaagattggccgcggacaatttagcgaggtctacaaggcaacctgtcttctggatagaaaaactgtcgccctcaagaaggtgcagatcttcgaaatgatggacgccaaagcccgtcaggactgtgtgaaggagatcggactgttgaaacagctaaaccaccccaacattattaaatacctggacagcttcattgaagacaacgaattaaatattgtactagagcttgccgacgcaggagacctgtcccagatgattaaatactttaagaagcaaaaaagactcattcccgagcggacagtctggaagtattttgtgcagttgtgctccgccgtctag

SEQ ID NO: 56839 - DNA, 1044 bp, Artificial Sequence
  derived and/or modified sequence
atgccccggcgggaggtgtgctgggaggccgcccacttccggcaggaggagcagagcctgccccggccccgggtgcgggccctggtgcggctggcctgcaggatggccggccagcccggccacatgccccacggcggcagcagcaacaacctgtgccacaccctgggccctgtgcaccccccagacccccagaggcaccccaacaccctgtccttccgctgcagcctggccgacttccagatcgagaagaagattggccggggccagttcagcgaggtgtacaaggccacctgcctgctggacaggaagacagtggccctgaagaaggtgcagatctttgagatgatggatgccaaggcccggcaggactgtgtgaaggagatcggcctgctgaagcagctgaaccaccccaacatcatcaagtacctggacagcttcatcgaggacaatgagctgaacatcgtgctggagctggctgatgctggggacctgagccagatgatcaagtacttcaagaagcagaagaggctcatccctgagaggacagtgtggaagtactttgtgcagctgtgcagcgctgtggagcacatgcacagccggcgggtgatgcaccgggacatcaagccagccaacgtgttcatcacagccactggagtggtgaagctgggggacctgggcctgggccgcttcttcagcagcgagaccacagctgcccacagcctggtgggcaccccctactacatgagccctgagcgcatccatgaaaatggctacaacttcaagagtgacatctggagcctgggctgcctgctgtatgagatggccgccctgcagagccccttctacggggacaagatgaacctcttcagcctgtgccagaagattgagcagtgtgactacccacccctgcccggggagcactacagcgagaagctgcgggagctggtgtccatgtgcatctgcccagacccccaccagaggccagacatcggctacgtgcaccaggtggccaagcagatgcacatctggatgagcagcacctag

SEQ ID NO: 56840 - DNA, 585 bp, Artificial Sequence
  derived and/or modified sequence
atgccccggcgggaggtgtgctgggaggccgcccacttccggcaggaggagcagagcctgccccggccccgggtgcgggccctggtgcggctggcctgcaggatggccggccagcccggccacatgccccacggcggcagcagcaacaacctgtgccacaccctgggccctgtgcaccccccagacccccagaggcaccccaacaccctgtccttccgctgcagcctggccgacttccagatcgagaagaagattggccggggccagttcagcgaggtgtacaaggccacctgcctgctggacaggaagacagtggccctgaagaaggtgcagatctttgagatgatggatgccaaggcccggcaggactgtgtgaaggagatcggcctgctgaagcagctgaaccaccccaacatcatcaagtacctggacagcttcatcgaggacaatgagctgaacatcgtgctggagctggctgatgctggggacctgagccagatgatcaagtacttcaagaagcagaagaggctcatccctgagaggacagtgtggaagtactttgtgcagctgtgcagcgctgtgtag

SEQ ID NO: 56841 - DNA, 1044 bp, Artificial Sequence
  derived and/or modified sequence
atgccccggcgggaggtgtgctgggaggccgcccacttccggcaggaggaacagtcacttcccaggccgagggttagagcccttgtacggttggcctgtagaatggccggtcaacccggtcacatgccacacggcggttcgtcgaacaatttgtgtcataccctgggaccagtccatccacccgaccctcagagacaccccaataccctgtcatttcgttgcagcctcgccgattttcagatagagaaaaagatcggacggggccagttcagcgaggtgtataaggccacatgtcttttggaccgcaaaactgtggccctgaaaaaggttcagatcttcgagatgatggacgccaaagcccgccaggattgtgtgaaggagatcgggctgttgaaacagctgaatcaccctaacattattaaatacctcgacagtttcatcgaggacaatgagttgaacatagtcctcgagctggccgacgctggggacctgtcacaaatgatcaaatacttcaagaaacagaaaagactcattcctgagcgcactgtatggaagtatttcgtccaactgtgttctgctgttgaacatatgcactcccgtagggtgatgcatagagatatcaagccagcaaatgttttcataacggccacaggcgtggtaaagttaggcgacctgggtctcggacgatttttttcttcagagaccaccgcggcacactctctagtcggcaccccatactacatgagcccagagagaattcacgagaacggttacaatttcaaatctgatatctggtcgctgggatgcctcctttacgagatggctgcgctgcaaagcccattctacggggacaagatgaaccttttcagcctgtgtcaaaaaattgagcagtgcgattatccgcccctgccaggtgaacattactctgaaaaactacgcgaactcgtgagtatgtgcatctgccccgacccacatcagcgtccggatatcggctacgttcaccaggttgccaagcagatgcatatttggatgtcctctacatag

SEQ ID NO: 56842 - DNA, 1044 bp, Artificial Sequence
  derived and/or modified sequence
atgccccggcgggaggtgtgctgggaggccgcccacttccggcaggaggaacagtctcttcctcgccctcgcgtgcgcgcactggtgaggctcgcctgccgcatggcaggacagccagggcatatgcctcatggaggttcaagtaataacctttgtcatactctgggccccgtgcacccgcccgacccacagcgacatccaaatacactttcctttagatgctctctggctgatttccagatagagaagaagatcgggagaggtcaattttctgaggtctataaggccacatgtttactggaccgcaagacagtggcactgaaaaaagtccagattttcgagatgatggatgccaaagctcgacaggattgcgttaaagagatcggcctgctcaagcagctgaatcatcccaacataatcaagtatctcgactccttcatcgaagacaacgaactgaatatcgtgctggagctggctgacgctggagacctcagtcagatgataaagtacttcaagaagcagaagcgcctcatcccagagcgaactgtctggaaatactttgttcagctctgctctgccgtcgagcacatgcacagtcggagggttatgcatcgcgacatcaagcccgctaatgtgtttatcaccgctaccggagtagttaagctgggcgaccttggtttgggaaggtttttcagctccgagacgaccgctgctcacagccttgttggtaccccctactatatgagtcccgagaggatccatgaaaatggctacaatttcaaaagcgacatctggagcctgggctgtctcctctatgagatggccgccctgcagtcccccttctacggagataaaatgaacttgttttccctctgccaaaagattgagcagtgtgattatccccccctgccgggagaacactattctgaaaagttgagagaacttgttagcatgtgcatttgcccagatcctcaccaaagaccggacatcgggtacgttcaccaagtggccaagcaaatgcatatatggatgagctccacatag

SEQ ID NO: 56843 - DNA, 585 bp, Artificial Sequence
  derived and/or modified sequence
atgccccggcgggaggtgtgctgggaggccgcccacttccggcaggaggagcagtctctgcctcgcccaagagtaagggctctggtgcggctcgcatgtaggatggctgggcaaccaggacatatgccacatggcggcagttccaacaatctctgtcacaccctcggcccggtccaccctccagatcctcagcgccacccaaataccctatcattcaggtgctctctcgcagatttccagattgagaagaagattgggcgcgggcagttttcagaggtctacaaggccacatgcctcttagatagaaaaaccgtggcactgaaaaaagtccagatttttgaaatgatggacgcgaaagcgcgtcaggattgtgttaaggagattggactcttaaagcaattaaatcacccaaacattatcaagtaccttgatagtttcattgaggacaacgaactcaatatcgtgctggagctggctgatgcaggcgatctcagtcagatgattaagtattttaaaaagcagaaaagactcataccagagaggaccgtgtggaaatatttcgttcagctgtgctcagccgtgtag

SEQ ID NO: 56844 - DNA, 3619 bp, Artificial Sequence
  derived and/or modified sequence
ggcggaaccgagctgacgggcgtgcggccgctgcgccgcaaactcgtgtgggacgcaccgctccagccgcccgcgggccagcgcaccggtcccccagcggcagccgagcccgcccgcgcgccggagaagaagacacatgaattagagacagcacgggggagcaggctgtggagctgggagtgacggggtgagtccaggaaggctgcctggaggagatgcccaggagagaagtttgctgggaggcagctcatttccggcaggaggagcagagcctgccaaggcctcgagttcgtgccctcgtgaggctggcatgcaggatggcaggacagcccggccacatgccccatggagggagttccaacaacctctgccacaccctggggcctgtgcatcctcctgacccacagaggcatcccaacacgctgtcttttcgctgctcgctggcggacttccagatcgaaaagaagataggccgaggacagttcagcgaggtgtacaaggccacctgcctgctggacaggaagacagtggctctgaagaaggtgcagatctttgagatgatggacgccaaggcgaggcaggactgtgtcaaggagatcggcctcttgaagcaactgaaccacccaaatatcatcaagtatttggactcgtttatcgaagacaacgagctgaacattgtgctggagttggctgacgcaggggacctctcgcagatgatcaagtactttaagaagcagaagcggctcatcccggagaggacagtatggaagtactttgtgcagctgtgcagcgccgtggagcacatgcattcacgccgggtgatgcaccgagacatcaagcctgccaacgtgttcatcacagccacgggcgtcgtgaagctcggtgaccttggtctgggccgcttcttcagctctgagaccaccgcagcccactccctagtggggacgccctactacatgtcaccggagaggatccatgagaacggctacaacttcaagtccgacatctggtccctgggctgtctgctgtacgagatggcagccctccagagccccttctatggagataagatgaatctcttctccctgtgccagaagatcgagcagtgtgactaccccccactccccggggagcactactccgagaagttacgagaactggtcagcatgtgcatctgccctgacccccaccagagacctgacatcggatacgtgcaccaggtggccaagcagatgcacatctggatgtccagcacctgagcgtggatgcaccgtgccttatcaaagccagcaccactttgccttacttgagtcgtcttctcttcgagtggccacctggtagcctagaacagctaagaccacagggttcagcaggttccccaaaaggctgcccagccttacagcagatgctgaaggcagagcagctgagggaggggcgctggccacatgtcactgatggtcagattccaaagtcctttctttatactgttgtggacaatctcagctgggtcaataagggcaggtggttcagcgagccacggcagccccctgtatctggattgtaatgtgaatctttagggtaattcctccagtgacctgtcaaggcttatgctaacaggagacttgcaggagaccgtgtgatttgtgtagtgagcctttgaaaatggttagtaccgggttcagtttagttcttagtatcttttcaatcaagctgtgtgcttaatttactctgttgtaaagggataaagtggaaatcatttttttccgtggagtggtgattctgctaacatttttatctacgttttataacttggtgagtgacgatgagagccctgcacctggccagagtgtcacaggcaaaaggcatcgggaagcaggagcatcttcttggcagccaggctgggccatcttctcctggacacctgctgtgtaccaggaacttcgtcacctccttgaatgctggcggttcatttcatgatcagtgttaagcattttcctccatgggaaggaagcatgggatatagaaaagcgaagggctgtcctttacaaattctggttctgcaacttcctagcgtgactttgggcttgggcaagtttcttagccgttctgagccttcatttcctcatctgtacaatgagattaatagtacctatcatctaccttcaggattgctgacagacagaatttgaaataaaatatgcaagttagctaatacaaaaagtagatgatccaaaaatggtagccactcacccttcacaaactgaagtccatggaccacggaagtcgagaattaatgtacacctgtatcatgtgtaggaaaccagaaatgtgttccttatttcttgttcccaaacaggattaactgtgaagactaatttataaatgtgaacctaagaaaactccacctctgaaggaaatcatttgaattttgtttttgtacgtaaagttaaccttccaattgtctgagctgtcgtcactgacttcatgacagtctggccctccagacaagagcagcgctggcatcgggcaggtgattcctgacacctgctgcctgcaggcattcactgaccaggcctttcctggaggaaacacccagggccgggcggctgctgtttccacacgtggactcggatctgctgtgacaccgtcagcccgacagtctctccatatgcagcctttcctctgtacttttctccatggttgaaataaaacagggtgactgggagttacttagaattcatgaagattttaaaatggctttggagattttgcttttaaaccagtagattcaaaacttaaacagcgtctgcagcacaatttcttgaggaaccttgaaaaacacaacttcccaggccccattcagtaatcccaggatttctttaagctccccaaataattttgaaactcatcatcagccgagtttctgccctcatgaggtaattccatcgttctccccagcctgcccctggcagctgtaacacaggagctggcctgagagcagattcaccctggaatgttctctccacagaacaatcaagtccctgtcgcctgcctagtgcttaccactgaagatttttctgattccagaccaactttttgccaacattctgcttccagctctctgagcccctgccgtgtctccccaacactgccagccccagcacgcaatcaacctactttgtgcatgccacccgctttccacactgtgagaacaatctgcccaactggaccctctggaggcgcacgatctcagccactcaccaggcctgagtgtttgtgaaatgatcatgtcctacttattacaaaaccgtaaccccaaaacattccttttatttctgtgaaaccggccaaagtgaggtccacccaccttcacacagctctggcggtgcacctgctcaccttctcttggttctcagaactgagctgggcttgagaacacagctttggctttgccatttttttcctacttggctgctgaggtggagggtgtgctgcacttatcaccccatttcaaaaccaaaccaaacctgaggccaccccaaacaaattcagccagcaaaaagggtaggtatcgatggtcacctgaagcctcaagggagtccactctgacttctgacag

SEQ ID NO: 56845 - DNA, 2745 bp, Artificial Sequence
  derived and/or modified sequence
cacccaccccagcccagagaggcgacccagctccctggaggcccaggcacctcatgtctgccctcaacccagagtggagcagaccttccctggagcttctcaggagccacttcaaaaggagaagaagacacatgaattagagacagcacgggggagcaggctgtggagctgggagtgacggggtgagtccaggaaggctgcctggaggagatgcccaggagagaagtttgctgggaggcagctcatttccggcaggaggagcagagcctgccaaggcctcgagttcgtgccctcgtgaggctggcatgcaggatggcaggacagcccggccacatgccccatggagggagttccaacaacctctgccacaccctggggcctgtgcatcctcctgacccacagaggcatcccaacacgctgtcttttcgctgctcgctggcggacttccagatcgaaaagaagataggccgaggacagttcagcgaggtgtacaaggccacctgcctgctggacaggaagacagtggctctgaagaaggtgcagatctttgagatgatggacgccaaggcgaggcaggactgtgtcaaggagatcggcctcttgaagcaactgaaccacccaaatatcatcaagtatttggactcgtttatcgaagacaacgagctgaacattgtgctggagttggctgacgcaggggacctctcgcagatgatcaagtactttaagaagcagaagcggctcatcccggagaggacagtatggaagtactttgtgcagctgtgcagcgccgtggagcacatgcattcacgccgggtgatgcaccgagacatcaagcctgccaacgtgttcatcacagccacgggcgtcgtgaagctcggtgaccttggtctgggccgcttcttcagctctgagaccaccgcagcccactccctagtggggacgccctactacatgtcaccggagaggatccatgagaacggctacaacttcaagtccgacatctggtccctgggctgtctgctgtacgagatggcagccctccagagccccttctatggagataagatgaatctcttctccctgtgccagaagatcgagcagtgtgactaccccccactccccggggagcactactccgagaagttacgagaactggtcagcatgtgcatctgccctgacccccaccagagacctgacatcggatacgtgcaccaggtggccaagcagatgcacatctggatgtccagcacctgagcgtggatgcaccgtgccttatcaaagccagcaccactttgccttacttgagtcgtcttctcttcgagtggccacctggtagcctagaacagctaagaccacagggttcagcaggttccccaaaaggctgcccagccttacagcagatgctgaaggcagagcagctgagggaggggcgctggccacatgtcactgatggtcagattccaaagtcctttctttatactgttgtggacaatctcagctgggtcaataagggcaggtggttcagcgagccacggcagccccctgtatctggattgtaatgtgaatctttagggtaattcctccagtgacctgtcaaggcttatgctaacaggagacttgcaggagaccgtgtgatttgtgtagtgagcctttgaaaatggttagtaccgggttcagtttagttcttagtatcttttcaatcaagctgtgtgcttaatttactctgttgtaaagggataaagtggaaatcatttttttccgtggagtggtgattctgctaacatttttatctacgttttataacttggtgagtgacgatgagagccctgcacctggccagagtgtcacaggcaaaaggcatcgggaagcaggagcatcttcttggcagccaggctgggccatcttctcctggacacctgctgtgtaccaggaacttcgtcacctccttgaatgctggcggttcatttcatgatcagtgttaagcattttcctccatgggaaggaagcatgggatatagaaaagcgaagggctgtcctttacaaattctggttctgcaacttcctagcgtgactttgggcttgggcaagtttcttagccgttctgagccttcatttcctcatctgtacaatgagattaatagtacctatcatctaccttcaggattgctgacagacagaatttgaaataaaatatgcaagttagctaatacaaaaagtagatgatccaaaaatggtagccactcacccttcacaaactgaagtccatggaccacggaagtcgagaattaatgtacacctgtatcatgtgtaggaaaccagaaatgtgttccttatttcttgttcccaaacaggattaactgtgaagactaatttataaatgtgaacctaagaaaactccacctctgaaggaaatcatttgaattttgtttttgtacgtaaagttaaccttccaattgtctgagctgtcgtcactgacttcatgacagtctggccctccagacaagagcagcgctggcatcgggcaggtgattcctgacacctgctgcctgcaggcattcactgaccaggcctttcctggaggaaacacccagggccgggcggctgctgtttccacacgtggactcggatctgctgtgacaccgtcagcccgacagtctctccatatgcagcctttcctctgtacttttctccatggttgaaataaaacagggtgactgggagttacttagaattcatgaagatttt

SEQ ID NO: 56846 - DNA, 726 bp, Artificial Sequence
  derived and/or modified sequence
attgccacagagacaagccagccaagaagtgccaccctggacgaaggtcgggagaagaagacacatgaattagagacagcacgggggagcaggctgtggagctgggagtgacggggtgagtccaggaaggctgcctggaggagatgcccaggagagaagtttgctgggaggcagctcatttccggcaggaggagcagagcctgccaaggcctcgagttcgtgccctcgtgaggctggcatgcaggatggcaggacagcccggccacatgccccatggagggagttccaacaacctctgccacaccctggggcctgtgcatcctcctgacccacagaggcatcccaacacgctgtcttttcgctgctcgctggcggacttccagatcgaaaagaagataggccgaggacagttcagcgaggtgtacaaggccacctgcctgctggacaggaagacagtggctctgaagaaggtgcagatctttgagatgatggacgccaaggcgaggcaggactgtgtcaaggagatcggcctcttgaagcaactgaaccacccaaatatcatcaagtatttggactcgtttatcgaagacaacgagctgaacattgtgctggagttggctgacgcaggggacctctcgcagatgatcaagtactttaagaagcagaagcggctcatcccggagaggacagtatggaagtactttgtgcagctgtgcagcgccgtgg

SEQ ID NO: 56847 - DNA, 1044 bp, Artificial Sequence
  derived and/or modified sequence
atgcctcgcagagaggtctgctgggaagccgcacatttcagacaagaggagcagtcgctgcctcggccaagggttagggctttagtgcggctcgcttgtaggatggcgggtcagcccggacacatgcctcacgggggttcttcaaataacctctgccatacactcggcccagtacacccacctgacccacagcgccatcccaacacattatcctttcggtgcagtctggcagattttcagattgaaaaaaaaatcggtcggggacagttctctgaagtatataaagccacatgtctacttgaccgtaagacggtcgccctcaaaaaagtccaaatcttcgaaatgatggacgccaaagcgcgacaagattgtgttaaagaaatcggactgctgaaacagctaaaccatccgaatatcatcaaatacctcgactcatttatcgaagacaatgagctaaatatagtcttagagctcgcagatgccggtgacctgagccagatgattaaatattttaagaagcagaagcggctgataccggagcgcacagtgtggaagtattttgttcagctctgttccgcagtggagcacatgcacagtcggagggtgatgcaccgggacattaaacccgcaaacgtgttcattacggctacaggcgtcgtgaaactcggtgacctgggcctcggcaggttcttctctagcgaaaccactgctgcccattctttagttgggacaccgtattatatgtctcccgagagaatccacgaaaatggatacaactttaagtcagacatctggtctctgggctgtctgctctatgaaatggctgccctgcagagccccttttatggggataaaatgaacttatttagtttatgccagaagatagaacagtgcgactaccccccacttcctggtgagcattattcagaaaagttgcgcgaactggtaagcatgtgtatctgtcccgatccgcaccagcgccctgatattgggtacgtccaccaagtggccaaacagatgcacatctggatgtcatctacgtag

SEQ ID NO: 56848 - DNA, 1044 bp, Artificial Sequence
  derived and/or modified sequence
atgcctcgtcgcgaagtatgctgggaggctgcccattttcgacaggaggagcaaagtttgccccgaccgagggtgcgggctctggtgaggctggcttgccgtatggctgggcagcccggacacatgccccatggaggctcctccaacaacctgtgtcacacacttggtcccgtccaccccccagacccacaaaggcaccccaacacactgtcctttcggtgcagtctcgccgacttccagatagagaagaagatcggacgcggacaatttagcgaggtgtataaagcgacctgcctgctggatagaaagactgtggcactgaagaaggtccaaatcttcgagatgatggatgcaaaggcgagacaggattgcgtgaaggagattgggctgctgaagcagctgaaccatcccaatattatcaaatatctggactctttcatagaggataatgaattgaatattgtcctagagctggccgatgcaggggacctgtcccagatgatcaagtattttaaaaaacaaaagcgactgatccccgagagaaccgtctggaaatactttgtgcagttgtgttccgccgttgaacacatgcattctagacgagtgatgcatagggatatcaagcctgctaacgtgtttatcaccgctacaggtgttgtgaaactgggtgatctgggcttgggtagatttttctcctctgaaaccacggctgctcacagtctagtaggcacaccatactacatgtccccagagaggatccatgaaaacgggtataactttaagtcggacatttggagcctggggtgtttgttgtacgaaatggcagcactgcaatctccattctacggagacaagatgaatctcttctcgctgtgccagaagatcgaacagtgcgattatccccctttacctggagaacattacagtgagaagctgagagagctggtttctatgtgcatttgccccgaccctcaccagcgacccgacatcggctatgtacatcaggtggcaaagcagatgcatatctggatgtcctccacatag

SEQ ID NO: 56849 - DNA, 585 bp, Artificial Sequence
  derived and/or modified sequence
atgccaaggagagaggtttgttgggaggccgcacatttccgacaggaagaacagagtttgcctcgccctcgggttcgggctctagtgaggttagcctgcaggatggccggtcagcctggccatatgccccacggcggatcatctaacaatttatgccacacattgggccctgtgcatccccctgacccacaacgccatccaaacactctttcgtttcgctgctctctggcagacttccagatcgaaaagaaaatcggccgtggccaattctccgaagtgtacaaggccacctgcctcctggacaggaagaccgtggctttgaagaaggtgcagatctttgagatgatggatgcaaaggcgaggcaggactgcgtgaaagagatcggactattaaagcaattgaaccacccaaacattatcaagtacttggattcattcatagaggacaacgaattaaatatcgtgctagagttagcagacgcaggcgatctctctcagatgattaaatatttcaaaaaacagaagcggctgatcccagaacgcactgtgtggaaatatttcgtgcagctgtgtagtgcggtgtag

SEQ ID NO: 56850 - DNA, 1044 bp, Artificial Sequence
  derived and/or modified sequence
atgcccagaagagaggtgtgctgggaggccgcccacttcagacaggaggagcagagcctgcccagacccagagtgagagccctggtgagactggcctgcagaatggccggccagcccggccacatgccccacggcggcagcagcaacaacctgtgccacaccctgggccccgtgcacccccccgacccccagagacaccccaacaccctgagcttcagatgcagcctggccgacttccagatcgagaagaagatcggcagaggccagttcagcgaggtgtacaaggccacctgcctgctggacagaaagaccgtggccctgaagaaggtgcagatcttcgagatgatggacgccaaggccagacaggactgcgtgaaggagatcggcctgctgaagcagctgaaccaccccaacatcatcaagtacctggacagcttcatcgaggacaacgagctgaacatcgtgctggagctggccgacgccggcgacctgagccagatgatcaagtacttcaagaagcagaagagactgatccccgagagaaccgtgtggaagtacttcgtgcagctgtgcagcgccgtggagcacatgcacagcagaagagtgatgcacagagacatcaagcccgccaacgtgttcatcaccgccaccggcgtggtgaagctgggcgacctgggcctgggcagattcttcagcagcgagaccaccgccgcccacagcctggtgggcaccccctactacatgagccccgagagaatccacgagaacggctacaacttcaagagcgacatctggagcctgggctgcctgctgtacgagatggccgccctgcagagccccttctacggcgacaagatgaacctgttcagcctgtgccagaagatcgagcagtgcgactacccccccctgcccggcgagcactacagcgagaagctgagagagctggtgagcatgtgcatctgccccgacccccaccagagacccgacatcggctacgtgcaccaggtggccaagcagatgcacatctggatgagcagcacctag

SEQ ID NO: 56851 - DNA, 585 bp, Artificial Sequence
  derived and/or modified sequence
atgcccagaagagaggtgtgctgggaggccgcccacttcagacaggaggagcagagcctgcccagacccagagtgagagccctggtgagactggcctgcagaatggccggccagcccggccacatgccccacggcggcagcagcaacaacctgtgccacaccctgggccccgtgcacccccccgacccccagagacaccccaacaccctgagcttcagatgcagcctggccgacttccagatcgagaagaagatcggcagaggccagttcagcgaggtgtacaaggccacctgcctgctggacagaaagaccgtggccctgaagaaggtgcagatcttcgagatgatggacgccaaggccagacaggactgcgtgaaggagatcggcctgctgaagcagctgaaccaccccaacatcatcaagtacctggacagcttcatcgaggacaacgagctgaacatcgtgctggagctggccgacgccggcgacctgagccagatgatcaagtacttcaagaagcagaagagactgatccccgagagaaccgtgtggaagtacttcgtgcagctgtgcagcgccgtgtag

SEQ ID NO: 56852 - protein, 51 aa, Artificial Sequence
  derived and/or modified sequence
EGRERDHELRHRRHHHQSPKSHFELPHYPGLLAHQKPFIRKSYKCLHKRCR

SEQ ID NO: 56853 - protein, 15 aa, Artificial Sequence
  derived and/or modified sequence
RERDHELRHRRHHHQ

SEQ ID NO: 56854 - protein, 34 aa, Artificial Sequence
  derived and/or modified sequence
SPKSHFELPHYPGLLAHQKPFIRKSYKCLHKRCR

SEQ ID NO: 56855 - protein, 20 aa, Artificial Sequence
  derived and/or modified sequence
LAHQKPFIRKSYKCLHKRCR

SEQ ID NO: 56856 - protein, 16 aa, Artificial Sequence
  derived and/or modified sequence
KPFIRKSYKCLHKRCR

SEQ ID NO: 56857 - protein, 12 aa, Artificial Sequence
  derived and/or modified sequence
RKSYKCLHKRCR

SEQ ID NO: 56858 - protein, 11 aa, Artificial Sequence
  derived and/or modified sequence
KSYKCLHKRCR

SEQ ID NO: 56859 - protein, 377 aa, Artificial Sequence
  derived and/or modified sequence
MKTLPLFVCICALSACFSFSEGRERDHELRHRRHHHQSPKSHFELPHYPGLLAHQKPFIRKSYKCLHKRCRPKLPPSPNNPPKFPNPHQPPKHPDKNSSVVNPTLVATTQIPSVTFPSASTKITTLPNVTFLPQNATTISSRENVNTSSSVATLAPVNSPAPQDTTAAPPTPSATTPAPPSSSAPPETTAAPPTPSATTQAPPSSSAPPETTAAPPTPPATTPAPPSSSAPPETTAAPPTPSATTPAPLSSSAPPETTAVPPTPSATTLDPSSASAPPETTAAPPTPSATTPAPPSSPAPQETTAAPITTPNSSPTTLAPDTSETSAAPTHQTTTSVTTQTTTTKQPTSAPGQNKISRFLLYMKNLLNRIIDDMVEQ

SEQ ID NO: 56860 - protein, 136 aa, Artificial Sequence
  derived and/or modified sequence
MKTLPLFVCICALSACFSFSEGRERDHELRHRRHHHQSPKSHFELPHYPGLLAHQKPFIRKSYKCLHKRCRPKLPPSPNNPPKFPNPHQPPKHPDKNSSVVNPTLVATTQIPSVTFPSASTKITTLPNVTFLPQNA

SEQ ID NO: 56861 - DNA, 720 bp, Artificial Sequence
  derived and/or modified sequence
ccccagatgagcgccgtgtacaccccccccagcgtgagcacccaccaaatgcctcgcaacccaaaccctcaacagaggccccaaatgtccgccgtatatactcctaggtctgcacctacaaggtgcccacagatgagcgccgtttacacccctccctccgcgccaaccgaccagatgccacgtaatccaaacgctcagcagagacctcaaatgtcggccgtgtatacacccccgtccgccccgacagatcaaatgccccgtaacccaaacccacagcagcgtccccagatgagcgcagtgtacacacctccttcggctccaaccgaccagatgccaagaaaccccaatcctcagcagagaccccaaatgagcgcagtttacactcccccttccgcacctactgatcagatgccaaggaacccaaatcctcagcagagaccccagatgtctgccgtgtacgcacccccgtctgcgcctactgatcaaatgccacgaaaccccaatccccagcaacgcccccagatgtccgctgtgtacgcacccccatccgctcccaccgaccagatgcctagaaacccgaacccccaacaacggctgcagatgagtgctgtgtatgctccgccttctgcccccactgaccaaatgcccaggaatccaaaccctcagcagcgtccccagatttcggccccccggtgccaattgagtattagacatcggtag

SEQ ID NO: 56862 - DNA, 1134 bp, Artificial Sequence
  derived and/or modified sequence
atgaaaaccctacccctcttcgtctgcatctgcgcgttaagtgcttgtttttctttttccgaggggcgggagagagaccatgagctgagacaccgcaggcaccatcatcagtcccccaagtcacattttgaattgccacactatccgggattgctggcgcaccagaaaccatttatccgcaagtcctataagtgtttgcacaagcggtgccgccctaaattgcctccgagtcctaataaccctcctaagttccccaatccgcatcagccccctaagcaccccgacaagaacagctccgtggttaatcccactctggtcgccactactcagatcccctcagtaacattcccttctgcctctacaaagataactacactgcccaacgtgaccttcttgccccagaacgccaccactatctcatccagggagaacgtgaacactagctcttcagtcgcgaccctcgctcccgtcaattctccggcgcctcaggataccacggcagccccacccactccctcagctacgacccccgctcccccgtccagcagtgctccccctgagactacggcggccccgcctaccccttccgccacgacacaggcgccaccctctagtagcgccccccccgaaaccacagctgcaccgccaactccacctgctacgacgccagcccctccctcttcttcagcaccaccggagacaacagctgccccaccaacccccagcgcaaccacgcctgcccccctatcctccagcgctcctcctgagacaaccgcagtgcctccaaccccttcagccactacactagacccatcaagtgcatccgcaccaccagagacaaccgcagcccctccaaccccctccgctaccaccccagctccacccagctctccagctcctcaggaaaccaccgcagctccaataactacaccgaacagctctcccaccacacttgctccagacacttctgaaacaagcgccgctcctacccatcagactacaaccagcgtgacaacacagaccactactaccaagcaacccacgagcgccccagggcaaaacaaaatcagtcggtttctgctatatatgaagaatctgttgaaccgcatcattgatgatatggtcgagcagtag

SEQ ID NO: 56863 - DNA, 1134 bp, Artificial Sequence
  derived and/or modified sequence
atgaagaccttgccgctgttcgtgtgtatttgtgccttgtccgcgtgcttttctttttctgaaggtcgtgaacgagatcacgaattgcggcaccggcgccatcatcatcagagtcccaaaagccacttcgaacttcctcactatccaggtctacttgcccaccaaaagcccttcattcgtaagagctacaagtgtctgcacaagaggtgtcgcccaaagctcccaccctcaccgaataatcctcccaaatttccaaatccacaccagccccctaaacacccggataagaattcctcggtggtgaatccaacactcgttgcaaccacacaaataccatctgttacattcccctccgcctctacaaaaatcaccactctaccaaatgttacgtttcttccacagaacgccacaaccatctcttctagagagaatgtgaatactagtagctctgtagcaacgctggcccctgtcaactctcccgccccccaagacactacagcagccccgcctaccccatctgcgaccacgcctgccccgcccagctcctcggctcccccagaaactactgctgcgccaccaaccccaagtgcgaccacgcaggcaccccctagtagttcagctccaccggagaccacagccgccccacctacgcctccagctaccacaccagcgccgccgtcttcttcagccccaccggagactaccgctgcaccccccacaccatccgccacgacacctgcccccctcagctcgtccgccccgcccgaaaccacagctgtcccaccaactccttcagccactaccctcgacccaagcagcgccagcgctccacctgagaccacagctgcccccccaacaccatctgctacaacccccgcaccacctagttcacctgccccacaggaaacaaccgcagcacccatcacaacgcccaattcatcccccactactctggccccggatacaagcgaaacttctgccgccccaacccatcagacaaccacgtctgtcacaacccagacgacaaccactaagcaacccacatctgctccagggcaaaacaagatatctcgattcctgctttacatgaagaacctactcaatcgcatcatagacgatatggtggagcaatag

SEQ ID NO: 56864 - DNA, 1134 bp, Artificial Sequence
  derived and/or modified sequence
atgaagacattacctctctttgtttgtatctgtgccttgtcagcctgcttttccttctccgagggccgcgagagagatcacgaattgcggcatcgcaggcatcaccaccagagccccaagagccacttcgaactgccccactaccccggcctactggcgcaccaaaaacctttcatccgcaaatcatacaaatgcctccacaaaagatgtaggccaaaactgccccccagccctaacaatccccccaaatttcccaatccacaccagccacccaagcacccggacaaaaatagttctgttgtcaaccccacgctggtggcgacaacccaaatcccaagcgtgactttcccaagtgcctcgactaaaataactactctccctaatgtgacttttctgccccagaacgctacaacgatcagctccagggaaaatgtgaacaccagcagctcagtcgccactctcgctccagtgaacagtcccgcacctcaagacaccacggccgcccctcctacaccctcagcaacaacccccgcccctccttcctccagcgcgcctccagaaacaacagcggcacctcctacgccgagcgccaccactcaagctcctccatctagttccgccccccctgagacgactgcagcccccccgactccccctgccaccactcccgcgcctccctctagctctgccccccccgaaaccacagccgcacctccgactcctagcgccaccacgcctgcaccactctcatcaagcgcgccacccgaaaccacagcagtaccccccacaccatccgcgaccacccttgatcccagttctgcatcggcccctcctgaaaccactgcagctcctcctacgccatcagccacgactccagctcctcccagcagcccagccccccaggagaccacagctgctcccatcacaaccccaaacagtagcccaactacactggctcccgatacatccgagacctctgcggctcctacgcatcagactaccaccagtgtgacaacgcagaccaccacaactaaacagccaacaagcgccccaggtcagaacaagataagtcgctttttgctctatatgaaaaaccttctcaatcggattatcgatgatatggttgagcagtag

SEQ ID NO: 56865 - DNA, 411 bp, Artificial Sequence
  derived and/or modified sequence
atgaaaactttgccactgtttgtgtgcatctgcgcattgtctgcctgcttttctttcagtgaggggagagagcgggatcatgagctgaggcatcgaaggcatcaccaccagtctccaaaaagccatttcgagctgccccattatcccgggctcctcgcgcaccagaaaccgtttatcaggaaaagttataaatgcctacacaaacgttgtaggccaaaactgcctccaagccctaacaacccgcctaagtttccaaacccccaccaaccccccaaacatccagacaaaaacagcagcgtggttaacccgacgctggtggcaactacccagatcccatccgttactttccctagcgcgagcaccaagattaccaccctcccgaatgtgacattcctcccacagaatgcctag

SEQ ID NO: 56866 - DNA, 1134 bp, Artificial Sequence
  derived and/or modified sequence
atgaagaccctgcccctgtttgtgtgcatctgtgccctgagcgcctgcttctccttcagcgagggccgggagcgggaccacgagctgcggcaccggcggcaccaccaccagagccccaagagccactttgagctgccccactacccaggcctgctggcccaccagaagcccttcatcaggaagagctacaagtgcctgcacaagcgctgccggcccaagctgccccccagccccaacaacccccccaagttccccaacccccaccagccccccaagcacccagacaagaacagctctgtggtgaaccccaccctggtggccaccacccagatccccagcgtgaccttccccagcgccagcaccaagatcaccaccctgcccaacgtgaccttcctgccccagaatgccaccaccatcagcagcagagaaaatgtgaacaccagcagctctgtggccaccctggcccctgtgaacagccctgccccccaggacaccacagctgccccacccaccccatctgccaccaccccagccccacccagcagcagcgcccctcctgagaccacagctgccccacccacccccagcgccaccacccaggccccacccagcagcagcgcccctcctgagaccacagctgccccacccaccccaccagccaccaccccagccccacccagcagcagcgcccctcctgagaccacagctgccccacccacccccagcgccaccaccccagcccccctgagcagcagcgcccctcctgagaccacagctgtgccccccaccccatctgccaccaccctggaccccagcagcgccagcgcccctcctgagaccacagctgccccacccacccccagcgccaccaccccagccccacccagcagccctgccccccaggagaccacagctgcccccatcaccacccccaacagcagccccaccaccctggccccagacaccagcgagaccagcgctgcccccacccaccagaccaccacctctgtgaccacccagaccaccaccaccaagcagcccaccagcgcccctggccagaacaagatcagccgcttcctgctgtacatgaagaacctgctgaaccgcatcattgatgacatggtggagcagtag

SEQ ID NO: 56867 - DNA, 411 bp, Artificial Sequence
  derived and/or modified sequence
atgaagaccctgcccctgtttgtgtgcatctgtgccctgagcgcctgcttctccttcagcgagggccgggagcgggaccacgagctgcggcaccggcggcaccaccaccagagccccaagagccactttgagctgccccactacccaggcctgctggcccaccagaagcccttcatcaggaagagctacaagtgcctgcacaagcgctgccggcccaagctgccccccagccccaacaacccccccaagttccccaacccccaccagccccccaagcacccagacaagaacagctctgtggtgaaccccaccctggtggccaccacccagatccccagcgtgaccttccccagcgccagcaccaagatcaccaccctgcccaacgtgaccttcctgccccagaatgcctag

SEQ ID NO: 56868 - DNA, 2443 bp, Artificial Sequence
  derived and/or modified sequence
ttatcttaaatctaatagatttcctatttccaaaaagctcgactggagtgttataaaacctgaaaattctcttgtgctttctcttcttttgcttctagttaccatcctcaaaggattggctaaaagcaagcaactggattgaacaccctaagaagaaagattcacactgcaccaggagacatcagaaagaatgaaaactctgccgctgtttgtgtgcatctgtgcactgagtgcttgcttctcgttcagtgaaggtcgagaaagggatcatgaactacgtcacagaaggcatcatcaccaatcacccaaatctcactttgaattaccacattatcctggactgctagctcaccagaagccgttcattagaaagtcctataaatgtctgcacaaacgctgtaggcctaagcttccaccttcacctaataacccccccaaattcccaaatcctcaccagccacctaaacatccagataaaaatagcagtgtggtcaaccctaccttagtggctacaacccaaattccatctgtgactttcccatcagcttccaccaaaattactacccttccaaatgtgacttttcttccccagaatgccaccaccatatcttcaagagaaaatgttaacacaagctcttctgtagctacattagcaccagtgaattccccagctccacaagacaccacagctgccccacccacaccttctgcaactacaccagctccaccatcttcctcagctccaccagagaccacagctgccccacccacaccttctgcaactacacaagctccaccatcttcctcagctccaccagagaccacagctgccccacccacacctcctgcaactacaccagctccaccatcttcctcagctccaccagagaccacagctgccccacccacaccttctgcaactacaccagctccactatcttcctcagctccaccagagaccacagctgtcccacccacaccttctgcaactaccctagacccatcatccgcctcagctccaccagagaccacagctgccccacccacaccttctgcaactacaccagctccaccgtcttccccagctccacaagagaccacagctgccccaattaccacacctaattcttccccaactactcttgcacctgacacttctgaaacttcagctgcacccacacaccagactactacttcggtcactactcaaactactactactaaacaaccaacttcagctcctggccaaaataaaatttctcgatttcttttatatatgaagaatctactaaacagaattattgacgacatggtggagcaatagtatattgtatgttgtaaagtgttctgtcatttacaagatgtgattcatgagtgcagaactaccacctttcttttagcaccaatcccaacatgaaattatattactcagatttaaagcactatcattaatctttcaatctaattattcaccaccacaagacctattaacaagacaaaatgcctctatcccacaagccagatgcaggtctggggttcaaaataactctttggatcctacagagatagcctactgagggcaaagaaagtccttagataaagagagaatattgtatgggccatcaaccatttacttttccctgaatgttagaaactacaaaaccactaccttgtacccccatcaaaatcccacctgaaccatctaatcctataaacataaaggggtaaaattggaactctccagatgaacaaagacatctaaatatctgtagatagaaacatttatctatctaaatatattgatagacctgtcattgtattgattaatgacaaaaccctttagataattatcttccattttaaataaaattttatttcacaaatatgagccaagaaagaggaaagttgatttgaagtgaggattagaagtgaatgacaataaagtctgtcagccaagcacgaaccaagactggcactatttttcttagtgtatataattgtttaaactgcaaggttgacatttattgtgttgtgtctaagttaatttcgatctaatgtacctgattctagcctctgtgaacaacaagaatatgtttgtgtatgttcacatggtgcttataatatttcactatcaattcaattaattcacataaattccatgtgaaatgtattcaacaatggaatattttctaaaacatttagtatacatttgaatgtattttaaaccatgccaaactactgctttaatgtcaagtttgcagaattgtctctgaaaataaaaaccctgactttagttgtaaaacaataaaagttagctacttggtatacggagatgttaatttgggatatggaggcatttttatcttctgtcactactacttaaaactctgatgattatgttagatttttttgctaactaataaagatttcaaatggcaattta

SEQ ID NO: 56869 - DNA, 2540 bp, Artificial Sequence
  derived and/or modified sequence
actcaattacagtatttcctattcctaaaagaatctagtaggaaggctataagaaatgttctcttactgatccttcttatttgccaccttagattttaagttgcttcttggctaccaaaatgcctagacacagtaactaacaagaattcaactgacaagtagtttgaccagacttggaggaaggattccttcaaagttaccatcctcaaaggattggctaaaagcaagcaactggattgaacaccctaagaagaaagattcacactgcaccaggagacatcagaaagaatgaaaactctgccgctgtttgtgtgcatctgtgcactgagtgcttgcttctcgttcagtgaaggtcgagaaagggatcatgaactacgtcacagaaggcatcatcaccaatcacccaaatctcactttgaattaccacattatcctggactgctagctcaccagaagccgttcattagaaagtcctataaatgtctgcacaaacgctgtaggcctaagcttccaccttcacctaataacccccccaaattcccaaatcctcaccagccacctaaacatccagataaaaatagcagtgtggtcaaccctaccttagtggctacaacccaaattccatctgtgactttcccatcagcttccaccaaaattactacccttccaaatgtgacttttcttccccagaatgccaccaccatatcttcaagagaaaatgttaacacaagctcttctgtagctacattagcaccagtgaattccccagctccacaagacaccacagctgccccacccacaccttctgcaactacaccagctccaccatcttcctcagctccaccagagaccacagctgccccacccacaccttctgcaactacacaagctccaccatcttcctcagctccaccagagaccacagctgccccacccacacctcctgcaactacaccagctccaccatcttcctcagctccaccagagaccacagctgccccacccacaccttctgcaactacaccagctccactatcttcctcagctccaccagagaccacagctgtcccacccacaccttctgcaactaccctagacccatcatccgcctcagctccaccagagaccacagctgccccacccacaccttctgcaactacaccagctccaccgtcttccccagctccacaagagaccacagctgccccaattaccacacctaattcttccccaactactcttgcacctgacacttctgaaacttcagctgcacccacacaccagactactacttcggtcactactcaaactactactactaaacaaccaacttcagctcctggccaaaataaaatttctcgatttcttttatatatgaagaatctactaaacagaattattgacgacatggtggagcaatagtatattgtatgttgtaaagtgttctgtcatttacaagatgtgattcatgagtgcagaactaccacctttcttttagcaccaatcccaacatgaaattatattactcagatttaaagcactatcattaatctttcaatctaattattcaccaccacaagacctattaacaagacaaaatgcctctatcccacaagccagatgcaggtctggggttcaaaataactctttggatcctacagagatagcctactgagggcaaagaaagtccttagataaagagagaatattgtatgggccatcaaccatttacttttccctgaatgttagaaactacaaaaccactaccttgtacccccatcaaaatcccacctgaaccatctaatcctataaacataaaggggtaaaattggaactctccagatgaacaaagacatctaaatatctgtagatagaaacatttatctatctaaatatattgatagacctgtcattgtattgattaatgacaaaaccctttagataattatcttccattttaaataaaattttatttcacaaatatgagccaagaaagaggaaagttgatttgaagtgaggattagaagtgaatgacaataaagtctgtcagccaagcacgaaccaagactggcactatttttcttagtgtatataattgtttaaactgcaaggttgacatttattgtgttgtgtctaagttaatttcgatctaatgtacctgattctagcctctgtgaacaacaagaatatgtttgtgtatgttcacatggtgcttataatatttcactatcaattcaattaattcacataaattccatgtgaaatgtattcaacaatggaatattttctaaaacatttagtatacatttgaatgtattttaaaccatgccaaactactgctttaatgtcaagtttgcagaattgtctctgaaaataaaaaccctgactttagttgtaaaacaataaaagttagctacttggtatacggagatgttaatttgggatatggaggcatttttatcttctgtcactactacttaaaactctgatgattatgttagatttttttgctaactaataaagatttcaaatggcaattt

SEQ ID NO: 56870 - DNA, 2479 bp, Artificial Sequence
  derived and/or modified sequence
actgttccactactcatcaagcacataagttactcattgagaacctctgatcgtcactgtgctcatcaggaagaaattgatgcacaaagaactactgtcaatctcagcaaaccacaactattcttttctttaaaattaccatcctcaaaggattggctaaaagcaagcaactggattgaacaccctaagaagaaagattcacactgcaccaggagacatcagaaagaatgaaaactctgccgctgtttgtgtgcatctgtgcactgagtgcttgcttctcgttcagtgaaggtcgagaaagggatcatgaactacgtcacagaaggcatcatcaccaatcacccaaatctcactttgaattaccacattatcctggactgctagctcaccagaagccgttcattagaaagtcctataaatgtctgcacaaacgctgtaggcctaagcttccaccttcacctaataacccccccaaattcccaaatcctcaccagccacctaaacatccagataaaaatagcagtgtggtcaaccctaccttagtggctacaacccaaattccatctgtgactttcccatcagcttccaccaaaattactacccttccaaatgtgacttttcttccccagaatgccaccaccatatcttcaagagaaaatgttaacacaagctcttctgtagctacattagcaccagtgaattccccagctccacaagacaccacagctgccccacccacaccttctgcaactacaccagctccaccatcttcctcagctccaccagagaccacagctgccccacccacaccttctgcaactacacaagctccaccatcttcctcagctccaccagagaccacagctgccccacccacacctcctgcaactacaccagctccaccatcttcctcagctccaccagagaccacagctgccccacccacaccttctgcaactacaccagctccactatcttcctcagctccaccagagaccacagctgtcccacccacaccttctgcaactaccctagacccatcatccgcctcagctccaccagagaccacagctgccccacccacaccttctgcaactacaccagctccaccgtcttccccagctccacaagagaccacagctgccccaattaccacacctaattcttccccaactactcttgcacctgacacttctgaaacttcagctgcacccacacaccagactactacttcggtcactactcaaactactactactaaacaaccaacttcagctcctggccaaaataaaatttctcgatttcttttatatatgaagaatctactaaacagaattattgacgacatggtggagcaatagtatattgtatgttgtaaagtgttctgtcatttacaagatgtgattcatgagtgcagaactaccacctttcttttagcaccaatcccaacatgaaattatattactcagatttaaagcactatcattaatctttcaatctaattattcaccaccacaagacctattaacaagacaaaatgcctctatcccacaagccagatgcaggtctggggttcaaaataactctttggatcctacagagatagcctactgagggcaaagaaagtccttagataaagagagaatattgtatgggccatcaaccatttacttttccctgaatgttagaaactacaaaaccactaccttgtacccccatcaaaatcccacctgaaccatctaatcctataaacataaaggggtaaaattggaactctccagatgaacaaagacatctaaatatctgtagatagaaacatttatctatctaaatatattgatagacctgtcattgtattgattaatgacaaaaccctttagataattatcttccattttaaataaaattttatttcacaaatatgagccaagaaagaggaaagttgatttgaagtgaggattagaagtgaatgacaataaagtctgtcagccaagcacgaaccaagactggcactatttttcttagtgtatataattgtttaaactgcaaggttgacatttattgtgttgtgtctaagttaatttcgatctaatgtacctgattctagcctctgtgaacaacaagaatatgtttgtgtatgttcacatggtgcttataatatttcactatcaattcaattaattcacataaattccatgtgaaatgtattcaacaatggaatattttctaaaacatttagtatacatttgaatgtattttaaaccatgccaaactactgctttaatgtcaagtttgcagaattgtctctgaaaataaaaaccctgactttagttgtaaaacaataaaagttagctacttggtatacggagatgttaatttgggatatggaggcatttttatcttctgtcactactacttaaaactctgatgattatgttagatttttttgctaactaataaagatttcaaatggcaattt

SEQ ID NO: 56871 - DNA, 635 bp, Artificial Sequence
  derived and/or modified sequence
actgttccactactcatcaagcacataagttactcattgagaacctctgatcgtcactgtgctcatcaggaagaaattgatgcacaaagaactactgtcaatctcagcaaaccacaactattcttttctttaaaattaccatcctcaaaggattggctaaaagcaagcaactggattgaacaccctaagaagaaagattcacactgcaccaggagacatcagaaagaatgaaaactctgccgctgtttgtgtgcatctgtgcactgagtgcttgcttctcgttcagtgaaggtcgagaaagggatcatgaactacgtcacagaaggcatcatcaccaatcacccaaatctcactttgaattaccacattatcctggactgctagctcaccagaagccgttcattagaaagtcctataaatgtctgcacaaacgctgtaggcctaagcttccaccttcacctaataacccccccaaattcccaaatcctcaccagccacctaaacatccagataaaaatagcagtgtggtcaaccctaccttagtggctacaacccaaattccatctgtgactttcccatcagcttccaccaaaattactacccttccaaatgtgacttttcttccccagaatgcc

SEQ ID NO: 56872 - DNA, 1134 bp, Artificial Sequence
  derived and/or modified sequence
atgaagaccctgcccctgttcgtgtgcatctgcgccctgagcgcctgcttcagcttttctgaaggcagagagagggatcacgagctgaggcatcgaagacaccaccatcaatctcctaaatctcacttcgaactgcctcattatccaggcctgcttgctcaccagaaacccttcattcgcaaatcttataaatgcctccataaaaggtgcaggcctaagctcccaccatcaccaaataatccaccaaagttccctaatcctcatcagccgccaaagcacccggacaaaaattccagcgtggtgaatccgaccctcgtggccacaacccagatccccagcgtaacctttccttctgcaagcacaaagattacgacactccccaacgttacatttctgccccagaacgcgaccaccatctcctcaagggaaaatgtgaacacaagctcaagcgtcgcaactttagctcccgtgaatagcccagccccacaagatacaacagcggcccctcccacgccttccgcgactacccctgccccgccatcttcgtcagcccccccagagaccaccgcagcccctcccaccccctcagccactactcaagcgccacctagctcttcagcccccccagaaactactgctgctcctccaactccgccagctaccactccagcccctccaagttcttcggctcccccagaaacaaccgcagcccctcccacccctagtgccactactccagccccccttagctcttcagccccaccagaaacaacggccgtgcctcccactccatctgcaacaacattggatcccagctctgcaagcgctcctcctgagacgacagccgcacccccaactccatccgccaccacaccggctccacccagcagtccagctccccaggagacaaccgcagcaccaattaccacacccaattcctctccaaccacactggctccagacaccagtgaaaccagtgcagctccaacacaccaaacgacgacctctgtgactacccagaccacaactactaaacagcccacatccgcaccaggccagaacaagatttcccggtttttactgtatatgaaaaacctcctcaatcgcatcatcgatgacatggtggaacagtag

SEQ ID NO: 56873 - DNA, 1134 bp, Artificial Sequence
  derived and/or modified sequence
atgaagaccctgcccctgttcgtgtgcatctgcgccctgagcgcctgctttagtttctcggagggcagagaaagagatcatgagctccgccacagacgtcaccaccaccaaagccccaagtcacatttcgagcttccacattatcccggacttctggcacaccagaagcctttcatcaggaaatcatacaagtgtttgcacaagagatgcagacccaagcttcctccgtcccccaataacccacctaagttccctaatcctcatcagcccccaaaacaccccgataagaatagtagtgttgttaacccaacgctggtcgctaccacccagattcccagcgtgacctttccatcggctagcacaaaaataactactttacccaatgttacatttctaccccagaacgccaccactatctctagcagggagaacgtgaatacctctagttctgtggccaccctcgctccagttaacagtcctgcccctcaagatactactgctgctcctcccacaccctccgccacaacacccgctccgccgtcgtcatctgccccccccgaaaccacggcagcaccaccgacgccttctgcgaccacacaggccccaccctcctcctccgcccctcctgagactacagcagcccctcccacgccgcccgccaccactcccgctcctccatcgagttcggctccaccagagaccaccgctgcaccccccacgcctagcgccaccactccagcccctttgtcatctagtgcacctccagagaccacagctgtcccaccaacaccaagtgctactacactagacccatcctcggcctcagccccaccagaaacaaccgctgcccctcctaccccgagcgcgactacaccagctccgccttcgtccccggccccacaggaaactacggcagcacccattacaactcccaacagcagccccacaacactggcacccgacactagtgaaacatccgccgcgcctacacatcagaccactacttcagtgacaacgcagacaaccactactaagcagccaacctccgcccctgggcagaataaaattagcagattcctgctgtatatgaaaaatctgttgaatagaatcatagatgatatggtggaacagtag

SEQ ID NO: 56874 - DNA, 1134 bp, Artificial Sequence
  derived and/or modified sequence
atgaagaccctgcccctgttcgtgtgcatctgcgccctgagcgcctgcttttccttttccgagggccgggagagagatcacgagctgcggcatcgccggcaccatcaccagtctcctaagtcccatttcgaactgccccactatcctggtcttttggcccaccaaaagccgtttattcgcaaatcatataagtgtctgcacaaaagatgtcggccgaagcttccgccatccccaaataacccacccaagttcccaaacccacaccagccacctaagcatcctgacaagaatagcagtgtggtcaacccaaccctggtagcaaccacccagatcccctccgtgaccttcccctctgctagtaccaagatcaccacactgcccaacgtcacgttcctccctcagaatgcaaccaccatttcaagccgcgaaaacgtaaacaccagcagctcagtagccacgctggcaccggtaaattccccggctcctcaggacaccaccgcagccccgcccaccccatcagcgacaacccctgcccctcccagttcttcagccccccccgagacaacagcagcgccccctacgccctctgcaaccactcaggcgcccccttccagtagcgccccacccgagactacagctgccccgcccacacctcccgctaccacacctgcaccgccttcctcatccgccccaccggaaactaccgccgcgccccccaccccctccgcgactactcctgctcccctcagttccagcgccccacccgagaccactgcggttcctcctacaccctccgctactacccttgatccgagtagcgcgagcgcacctccagagacgaccgccgcccccccgaccccatcagccaccactcccgccccaccttcgtctccggcccctcaggagactactgctgcacccatcactaccccgaattcgtctccaacaactttggctccagataccagcgagacctctgcggcccctactcatcagaccacgacgtctgtaaccacacagactacgacgacaaaacagccaacgagcgctcccggtcaaaacaagatcagcagatttctcctctatatgaaaaacctcttgaatcgaatcattgatgacatggtggaacagtag

SEQ ID NO: 56875 - DNA, 411 bp, Artificial Sequence
  derived and/or modified sequence
atgaagaccctgcccctgttcgtgtgcatctgcgccctgagcgcctgtttctcgttcagtgaaggaagagagcgggaccatgagctgagacaccgcaggcatcaccatcagtctcccaaatcacatttcgaactgcctcactaccccggcctcttggcccaccagaaaccgttcatcaggaaatcatataagtgtctgcacaagcggtgtcgcccgaagctgcccccgtctcccaataacccgcccaaattccctaatcctcaccagcctccaaagcacccggataagaacagctccgtcgtcaatccaacgttagtcgccacgacacagataccgtctgtgacgttccccagcgccagcacaaagatcaccacattacccaacgtgacatttctcccacagaatgcttag

SEQ ID NO: 56876 - DNA, 1134 bp, Artificial Sequence
  derived and/or modified sequence
atgaagacactgcccctgttcgtttgcatctgcgccctctccgcctgtttcagtttttctgagggtagagagcgagaccatgagcttcgccatcggcgacaccaccaccagagtccaaagagccacttcgagttgccacactacccaggcctcctcgctcaccagaaaccattcattcgaaagagttacaagtgcctccacaagagatgccgccctaagctgcctccctccccgaataatcctccgaaattcccaaacccccaccaacctccaaaacaccccgataagaactccagcgtggtaaatccgactctggtcgctaccacgcagatcccatcagttacctttccatcagctagcaccaagatcaccacactgccgaatgttaccttcttgccacagaacgcgacaactatctcgagcagagagaacgtcaacacaagctcatccgtggcgacattagcacctgtgaactctcccgctccacaggacaccaccgccgcaccacctacacccagcgctacgacacctgcacctccaagctccagcgcacctcccgagacgacagctgcgccacccacaccttcagccaccactcaagcacccccatccagctctgctcccccagaaactactgccgcacctcccaccccgccagccacgacccctgctcctcctagctccagcgcacctcccgagacgactgcagccccacctaccccatctgcaaccactccagctcccttgtcgtctagcgctccaccagagaccactgcggtgcctccaacgccttctgccaccacgctggacccatctagtgcctcagcgcctccggagactaccgcagcccctcctacaccatcagctaccacgcccgctcctccttcttccccagcacctcaagaaacgacagctgccccaatcaccacacccaattcaagtcccactaccctggcaccagacacctcagagacttcagccgctcctactcaccagacgactacaagcgtcaccacacagacaaccaccacaaagcagccaacttctgcacctggccagaacaagatttccaggtttctcctgtacatgaaaaatctcctgaatagaattatcgatgacatggtcgagcagtag

SEQ ID NO: 56877 - DNA, 1134 bp, Artificial Sequence
  derived and/or modified sequence
atgaagactttgccactcttcgtctgcatttgtgccctgagtgcatgcttctccttctcagagggccgtgagcgcgatcacgaactccgacaccgcagacatcaccaccagagccccaagtcccactttgaactccctcactaccccggactactggcacaccagaagccatttatccgcaagtcctacaaatgtctacacaagagatgcaggcccaaactgccaccatccccaaataatccccctaaatttcccaatccccatcagccgccaaaacatcccgacaagaattcgtccgtggtcaatcccactctggttgcaactacgcagatccctagtgtgacatttcccagcgcaagcactaaaatcacaaccctgcctaatgtgacttttttaccacagaatgccacgaccatctcctccagggagaatgtgaatacatcctcaagcgtggctaccctggctccggtcaattcccctgcccctcaagataccacagcagcccctcctacgccttctgcaacgacaccggctccgccatccagcagtgctcccccagaaacaacggcggctcctcctactccatcggccaccacccaggcgccacccagcagctctgcgccacccgagactaccgccgcacctcctaccccacccgctacaacccccgcacctccctctagttctgctcctccagaaacaaccgccgctccccctactccctctgccactacacccgcacccctatcatcatctgcacccccagagaccaccgccgtgcctcccactccttcagccactacactggaccccagtagtgcaagcgcgcctccagaaaccactgcggctcctccaactccatccgctaccactcccgcacctccctcttcccctgccccacaggagacgacggctgccccaatcaccacacccaacagttctccgaccacactggcccctgatacctctgagacctccgcagccccaacacatcagacaactacttccgttaccactcagacgacaaccacaaaacagccaactagtgccccagggcaaaacaaaatcagtcggttcttgttatacatgaagaatttgctaaacaggatcattgacgacatggtagaacaatag

SEQ ID NO: 56878 - DNA, 1134 bp, Artificial Sequence
  derived and/or modified sequence
atgaaaaccctgcccctttttgtatgtatttgtgctctgtccgcgtgcttcagcttttccgagggaagggagcgggatcatgaactccggcacagacggcatcatcatcaatcgcccaagtcccatttcgagctaccacactacccgggacttttggcccatcagaagccattcatccgaaagtcatataaatgtctgcacaaacggtgccgcccaaaactgcctccttccccaaacaacccacctaagttccccaatccacatcagcccccaaaacaccctgacaaaaactcctccgtggtcaatccaacacttgtggctaccactcaaatcccctcggtcaccttccccagcgctagcaccaagatcacgacactcccgaacgtgaccttcctccctcagaacgcaaccactataagtagcagggagaacgtcaataccagcagctccgtggccaccctggcccctgttaattctcccgcacctcaggacaccactgctgcccctcccaccccaagtgccactactcccgcaccaccatcgagcagtgctcccccagagacaaccgcagctccccctacgccctctgccacgacccaagcccctccaagtagctctgccccacccgagaccacggcagccccacctacacctcccgctactacacccgctcccccatcatcctcagctccaccagagaccacagctgctcccccaactccaagtgccacaactcccgcacctttgagtagctctgccccacctgagactaccgcagtccctcctacacctagcgccaccaccttagacccttcaagcgcctccgctccaccggaaaccaccgcagcgccaccaaccccctctgctacaacccctgctcctccctcaagtcccgcacctcaggagacgacggcagccccaattaccaccccaaactctagccccaccacacttgcgcctgacacttctgagacatccgcggctccaacacaccagaccacaacctccgtcactacacaaacaaccacgacaaagcagcctacctccgctcctgggcagaacaaaataagccggttcctcctctacatgaagaacttattaaatagaataatagatgacatggtcgagcaatag

SEQ ID NO: 56879 - DNA, 411 bp, Artificial Sequence
  derived and/or modified sequence
atgaagacactgcccctttttgtgtgtatctgcgccttgagcgcttgcttcagcttttctgaagggagagagagagatcacgagttacgacatcgtcggcatcaccaccaaagccctaagtcgcacttcgaactgccgcactatcccggtttactggctcatcagaaaccttttatccgtaaatcatacaagtgcttgcacaaaagatgtcgacccaagttgcccccatctcctaacaatccacccaaatttcctaacccgcaccagcctccaaaacatcctgataaaaattcaagcgttgtgaatccaacactggtggccacaacccagatcccctcagtgacatttccttccgcttcaactaaaatcacaacacttccgaacgtgacgtttctcccacagaatgcctag

SEQ ID NO: 56880 - DNA, 1134 bp, Artificial Sequence
  derived and/or modified sequence
atgaagaccctgcccctgttcgtgtgcatctgcgccctgagcgcctgcttcagcttcagcgagggcagagagagagaccacgagctgagacacagaagacaccaccaccagagccccaagagccacttcgagctgccccactaccccggcctgctggcccaccagaagcccttcatcagaaagagctacaagtgcctgcacaagagatgcagacccaagctgccccccagccccaacaacccccccaagttccccaacccccaccagccccccaagcaccccgacaagaacagcagcgtggtgaaccccaccctggtggccaccacccagatccccagcgtgaccttccccagcgccagcaccaagatcaccaccctgcccaacgtgaccttcctgccccagaacgccaccaccatcagcagcagagagaacgtgaacaccagcagcagcgtggccaccctggcccccgtgaacagccccgccccccaggacaccaccgccgccccccccacccccagcgccaccacccccgccccccccagcagcagcgccccccccgagaccaccgccgccccccccacccccagcgccaccacccaggccccccccagcagcagcgccccccccgagaccaccgccgccccccccaccccccccgccaccacccccgccccccccagcagcagcgccccccccgagaccaccgccgccccccccacccccagcgccaccacccccgcccccctgagcagcagcgccccccccgagaccaccgccgtgccccccacccccagcgccaccaccctggaccccagcagcgccagcgccccccccgagaccaccgccgccccccccacccccagcgccaccacccccgccccccccagcagccccgccccccaggagaccaccgccgcccccatcaccacccccaacagcagccccaccaccctggcccccgacaccagcgagaccagcgccgcccccacccaccagaccaccaccagcgtgaccacccagaccaccaccaccaagcagcccaccagcgcccccggccagaacaagatcagcagattcctgctgtacatgaagaacctgctgaacagaatcatcgacgacatggtggagcagtag

SEQ ID NO: 56881 - DNA, 411 bp, Artificial Sequence
  derived and/or modified sequence
atgaagaccctgcccctgttcgtgtgcatctgcgccctgagcgcctgcttcagcttcagcgagggcagagagagagaccacgagctgagacacagaagacaccaccaccagagccccaagagccacttcgagctgccccactaccccggcctgctggcccaccagaagcccttcatcagaaagagctacaagtgcctgcacaagagatgcagacccaagctgccccccagccccaacaacccccccaagttccccaacccccaccagccccccaagcaccccgacaagaacagcagcgtggtgaaccccaccctggtggccaccacccagatccccagcgtgaccttccccagcgccagcaccaagatcaccaccctgcccaacgtgaccttcctgccccagaacgcctag

SEQ ID NO: 56882 - protein, 461 aa, Artificial Sequence
  derived and/or modified sequence
MKMASFLAFLLLNFRVCLLLLQLLMPHSAQFSVLGPSGPILAMVGEDADLPCHLFPTMSAETMELKWVSSSLRQVVNVYADGKEVEDRQSAPYRGRTSILRDGITAGKAALRIHNVTASDSGKYLCYFQDGDFYEKALVELKVADGVGLYAVAASVIMRGSSGEGVSCTIRSSLLGLEKTASISIADPFFRSAQRWIAALAGTLPVLLLLLGGAGYFLWQQQEEKKTQFRKKKREQELREMAWSTMKQEQSTRVKLLEELRWRSIQYASRGERHSAYNEWKKALFKPADVILDPKTANPILLVSEDQRSVQRAKEPQDLPDNPERFNWHYCVLGCESFISGRHYWEVEVGDRKEWHIGVCSKNVQRKGWVKMTPENGFWTMGLTDGNKYRTLTEPRTNLKLPKPPKKVGVFLDYETGDISFYNAVDGSHIHTFLDVSFSEALYPVFRILTLEPTALTICPA

SEQ ID NO: 56883 - DNA, 1386 bp, Artificial Sequence
  derived and/or modified sequence
atgaagatggcatcgtttcttgctttccttttgctcaatttcagggtgtgtttgttactcctgcagctgctgatgccccacagtgcgcagttttctgttcttggaccgtctggccccattcttgccatggtgggggaggacgccgatctcccttgccatttattcccaactatgagcgccgagaccatggaactgaaatgggtctccagcagcttacggcaggtcgttaacgtttacgccgacgggaaggaggtggaggacagacagagtgccccatatcgcggtagaaccagtatcctgagagatgggattacagcagggaaggcggctcttcgaatccacaacgtgactgcttccgatagcggcaaatacctgtgctatttccaggacggagacttttacgaaaaggcgctggtggagctgaaagtggctgacggggttgggctttacgcagtagcagctagcgtgatcatgaggggaagtagcggggagggtgtgtcatgcacaatcaggagctctttgttaggccttgaaaagaccgcctctatctccatcgccgacccattctttcgcagcgcccagcgctggatagcagctcttgcaggcactctgcccgtgctattactgctgctcggcggtgctggatatttcctatggcagcaacaggaagagaagaaaacgcagtttcgtaagaagaagagggagcaggaactaagggagatggcttggagtacgatgaagcaggaacagtcaacacgcgtgaaactcctggaagagctgaggtggagatcaatccagtacgcgtccaggggcgaacggcatagcgcttacaatgagtggaaaaaggctctgtttaagccagccgatgtcatactcgaccccaaaactgccaaccctatcctgttagtgtccgaggaccagcgctccgtgcaacgggcaaaagaaccccaagatttgcctgacaaccccgagcgttttaattggcactattgtgtgttgggctgtgagtcctttatttccggcaggcattactgggaggtcgaggtcggcgaccggaaagaatggcacatcggggtttgcagtaaaaacgttcaacggaaaggatgggtgaagatgactcccgaaaacggattctggaccatgggcctgacagacggcaataaataccgcacgcttactgagccaaggactaatctgaagctgcctaagcctccgaagaaggtgggtgtcttcctcgattacgagaccggagatatttccttttacaatgctgtagacggcagccatatccacacctttcttgatgtcagtttcagtgaggccctctacccggtttttcgcatacttaccctggagcccacagctctgactatatgcccagcatag

SEQ ID NO: 56884 - DNA, 1386 bp, Artificial Sequence
  derived and/or modified sequence
atgaagatggccagcttcctggccttcctgctgctgaacttccgggtgtgcctgctgctgctgcagctgctgatgccccacagcgcccagttctctgtgctgggccccagcggccccatcctggccatggtgggggaggatgctgacctgccctgccacctgttccccaccatgtctgctgagaccatggagctgaagtgggtgagcagcagcctgcggcaggtggtgaatgtgtatgcagatggcaaggaggtggaggaccggcagagcgccccctaccggggccgcaccagcatcctgagagatggcatcacagctgggaaggccgccctgcgcatccacaacgtgacagccagtgacagcggcaagtacctgtgctacttccaggatggagacttctatgagaaggccctggtggagctgaaggtggctgatggagtgggcctgtatgctgtggccgccagcgtcatcatgaggggcagcagcggggagggcgtgtcctgcaccatccgcagcagcctgctgggcctggagaagacagccagcatcagcattgctgaccccttcttccgcagcgcccagcgctggattgctgccctggccggcaccctgcctgtgctgctgctgctgctgggcggggccggctacttcctgtggcagcagcaggaggagaagaagacccagttcaggaagaagaagcgggagcaggagctgcgggagatggcctggagcaccatgaagcaggagcagagcaccagggtgaagctgctggaggagctgcgctggaggagcatccagtatgccagcagaggagagcggcacagcgcctacaatgagtggaagaaggccctcttcaagccagcagatgtgatcctggaccccaagacagccaaccccatcctgctggtgtctgaggaccagaggtctgtgcagagggccaaggagccccaggacctgcctgacaaccctgagcgcttcaactggcactactgtgtgctgggctgtgagagcttcatcagcggccgccactactgggaggtggaggtgggggacaggaaggagtggcacatcggcgtgtgcagcaagaatgtgcagaggaagggctgggtgaagatgaccccagaaaatggcttctggaccatgggcctgacagatggcaacaagtaccgcaccctgacagagcccaggaccaacctgaagctgcccaagccacccaagaaggtgggcgtcttcctggactatgagaccggggacatctccttctacaatgctgtggatggcagccacatccacaccttcctggatgtgtccttcagcgaggccctgtaccctgtgttccgcatcctgaccctggagcccacagccctgaccatctgcccagcctag

SEQ ID NO: 56885 - DNA, 1386 bp, Artificial Sequence
  derived and/or modified sequence
atgaagatggccagcttcctggccttcctgctgctgaacttccgggtttgcctcctgctgctgcagcttctcatgccccattcagcacagttctcggtcttaggtccaagcggaccaatcctcgctatggtgggagaggatgcggacctaccttgccatctgtttccaaccatgtccgccgagacgatggagctgaagtgggtgtcctcttccctgaggcaggtggtgaatgtctatgctgacggaaaggaagtggaggaccggcagtccgccccttatagggggagaacatctattttgcgcgacggaatcaccgcgggcaaggccgctctccggatccacaatgtcactgcatctgattccgggaaatacctgtgctacttccaggatggagacttttatgagaaagcgctagtggaactgaaagttgccgacggggtaggcctctatgctgtcgcagcctctgtgatcatgcgcggaagttcaggagagggtgttagttgcaccataaggtcttctcttcttggactggagaagacagctagtatctctatagccgatcccttcttccggtctgcccagcggtggattgccgcgctagcaggcacactgcccgtcttgctgctgttactcggaggagcaggatattttctgtggcagcagcaggaagagaagaaaacacaattcagaaaaaaaaagagagagcaggagctgcgggagatggcttggagtacaatgaagcaagaacagagcacccgggtcaaacttctggaagagctgaggtggcgaagcatccagtatgcatcccgtggcgagcgacacagtgcatacaatgagtggaaaaaggccctctttaagcccgccgatgtcatcctggaccccaaaactgcaaatcctattttactggtatccgaggatcagcgttctgtgcaacgggcaaaagaacctcaggacctccccgacaatcccgagaggttcaattggcactactgtgtgctgggttgtgagtcctttatcagcggacgccattactgggaagtggaggtgggtgatcgtaaagagtggcatattggggtttgcagtaaaaacgtacaaaggaaggggtgggtgaaaatgacccccgagaacggtttctggactatgggtctgacggatggcaacaaataccgcacattgacagaaccacggaccaatctgaagttgccaaaacccccaaaaaaggtgggggtcttcctggactatgaaacaggggacatttccttttataacgccgttgatggatcccacatccatacgttcctggacgtttctttttcagaggccctgtacccggtattcaggatactcaccttggagcccacagctctaacaatatgtccagcttag

SEQ ID NO: 56886 - DNA, 1386 bp, Artificial Sequence
  derived and/or modified sequence
atgaaaatggcatcattcctcgctttcctactgctgaactttagggtatgcctgctgttgctgcagctgcttatgccccactccgcccagttttctgtcctggggccatcgggacctattctggccatggtgggagaggatgcagacctcccctgtcacttatttcctacaatgagcgcagagaccatggaactgaaatgggtatcaagtagtctgcggcaggtcgttaacgtgtacgccgacggaaaggaagtggaggacaggcagtccgccccataccggggaagaacctcaatcctgagagatggtattacagctggtaaggccgcattacgaatccataatgtgaccgcctccgactctggtaagtacctgtgctatttccaggacggagatttttatgagaaggcccttgtggaacttaaagtagccgatggggtgggactctacgctgtggctgctagtgtcatcatgcggggatcttccggcgagggagtgagttgcacaattagaagctctttgctcggtctggagaaaacagcgtccattagcatcgcagatcccttcttcaggagcgctcaacgctggattgctgctttggccggaactctgccggtgctgctgttgctacttgggggtgctggctacttcctgtggcagcagcaggaggaaaagaaaacacagtttagaaagaagaagcgggaacaggaactgcgggagatggcatggagtactatgaagcaagagcaatccactcgcgttaagcttctcgaagaactgaggtggaggagcatccaatatgctagcagaggggaaaggcatagtgcatataacgagtggaagaaggccctattcaagcccgctgacgtgatcttagaccctaagactgccaacccaatcctcctggtttctgaagatcagaggtccgttcagagggccaaagagccgcaagatctccctgacaacccagagcgatttaactggcactactgtgtccttggatgtgaatcttttatctccggcaggcattactgggaggtggaagtgggggatcggaaagaatggcatattggcgtatgtagtaaaaacgtgcagaggaaaggatgggtaaagatgacaccagagaacggtttttggaccatgggattaacagatggcaacaagtaccgaactctgacagaacctaggacaaatctgaagctacctaaaccacctaagaaggtcggggtgtttttggactatgagaccggggacatttcattctacaacgcagtcgacggatcgcacattcatacctttctggatgtttccttttcagaggctctttaccccgtcttccgcatactaacacttgagccaacagcactgactatttgtcccgcttag

SEQ ID NO: 56887 - DNA, 2077 bp, Artificial Sequence
  derived and/or modified sequence
agtctctgctttctttttcctttcttccagaaggagatttaaccatagtagaaagaatggagaactattaactgcctttcttctgtgggctgtgattttcagaggggaatgctaagaggtgattttcaatgttgggactcaaaggtgaagacactgaaggacagaatttttggcagaggaaagatcttcttcggtcaccatacttgagttagctctagggaagtggaggtttccatttggaattctatagcttcttccaggtcatagtgtctgccccccaccttccagtatctcctgatatgcagcatgaatgaaaatggcaagtttcctggccttccttctgctcaactttcgtgtctgcctccttttgcttcagctgctcatgcctcactcagctcagttttctgtgcttggaccctctgggcccatcctggccatggtgggtgaagacgctgatctgccctgtcacctgttcccgaccatgagtgcagagaccatggagctgaagtgggtgagttccagcctaaggcaggtggtgaacgtgtatgcagatggaaaggaagtggaagacaggcagagtgcaccgtatcgagggagaacttcgattctgcgggatggcatcactgcagggaaggctgctctccgaatacacaacgtcacagcctctgacagtggaaagtacttgtgttatttccaagatggtgacttctatgaaaaagccctggtggagctgaaggttgcagacggagtgggcctgtatgcagtagcagcatctgtgatcatgagaggcagctctggggagggtgtatcctgtaccatcagaagttccctcctcggcctggaaaagacagccagcatttccatcgcagaccccttcttcaggagcgcccagaggtggatcgccgccctggcagggaccctgcctgtcttgctgctgcttcttgggggagccggttacttcctgtggcaacagcaggaggaaaaaaagactcagttcagaaagaaaaagagagagcaagagttgagagaaatggcatggagcacaatgaagcaagaacaaagcacaagagtgaagctcctggaggaactcagatggagaagtatccagtatgcatctcggggagagagacattcagcctataatgaatggaaaaaggccctcttcaagcctgcggatgtgattctggatccaaaaacagcaaaccccatcctccttgtttctgaggaccagaggagtgtgcagcgtgccaaggagccccaggatctgccagacaaccctgagagatttaattggcattattgtgttctcggctgtgagagcttcatatcagggagacattactgggaggtggaggtaggggacaggaaagagtggcatataggggtgtgcagtaagaatgtgcagagaaaaggctgggtcaaaatgacacctgagaatggattctggactatggggctgactgatgggaataagtatcggactctaactgagcccagaaccaacctgaaacttcctaagccccctaagaaagtgggggtcttcctggactatgagactggagatatctcattctacaatgctgtggatggatcgcatattcatactttcctggacgtctccttctctgaggctctatatcctgttttcagaattttgaccttggagcccacggccctgactatttgtccagcgtgaaaagaagaagagagttcctccaattctgaccgagtgctgatcattccctagagacaccagtaaccccgggcttagctaacgaaagtggggagcctcaggctgaagtaacttttctctgcttctccctgcccagctcagagctgagggcctccccctccacagcaaccaatcacaaccataaagctacaagcacgcactgaagcactttactgatactcattcaattattcatatgacagttgtttgagtttggtaccatcttattttccccttatacagataaggaaactggggtgcagaaaagtgaattgactacaaagtagacatgactagttaacaacacagctgggatctaaacagcaataactaacattaatggag

SEQ ID NO: 56888 - DNA, 1386 bp, Artificial Sequence
  derived and/or modified sequence
atgaagatggccagcttcctggccttcctgctgctgaacttcagagtgtgcctgctgctgctgcagctgctgatgccccacagcgcccagttcagcgtgctgggccccagcggccccatcctggccatggtgggcgaggacgccgacctgccctgccacctgttccccaccatgagcgccgagaccatggagctgaagtgggtgagcagcagcctgagacaggtggtgaacgtgtacgccgacggcaaggaggtggaggacagacagagcgccccctacagaggcagaaccagcatcctgagagacggcatcaccgccggcaaggccgccctgagaatccacaacgtgaccgccagcgacagcggcaagtacctgtgctacttccaggacggcgacttctacgagaaggccctggtggagctgaaggtggccgacggcgtgggcctgtacgccgtggccgccagcgtgatcatgagaggcagcagcggcgagggcgtgagctgcaccatcagaagcagcctgctgggcctggagaagaccgccagcatcagcatcgccgaccccttcttcagaagcgcccagagatggatcgccgccctggccggcaccctgcccgtgctgctgctgctgctgggcggcgccggctacttcctgtggcagcagcaggaggagaagaagacccagttcagaaagaagaagagagagcaggagctgagagagatggcctggagcaccatgaagcaggagcagagcaccagagtgaagctgctggaggagctgagatggagaagcatccagtacgccagcagaggcgagagacacagcgcctacaacgagtggaagaaggccctgttcaagcccgccgacgtgatcctggaccccaagaccgccaaccccatcctgctggtgagcgaggaccagagaagcgtgcagagagccaaggagccccaggacctgcccgacaaccccgagagattcaactggcactactgcgtgctgggctgcgagagcttcatcagcggcagacactactgggaggtggaggtgggcgacagaaaggagtggcacatcggcgtgtgcagcaagaacgtgcagagaaagggctgggtgaagatgacccccgagaacggcttctggaccatgggcctgaccgacggcaacaagtacagaaccctgaccgagcccagaaccaacctgaagctgcccaagccccccaagaaggtgggcgtgttcctggactacgagaccggcgacatcagcttctacaacgccgtggacggcagccacatccacaccttcctggacgtgagcttcagcgaggccctgtaccccgtgttcagaatcctgaccctggagcccaccgccctgaccatctgccccgcctag

SEQ ID NO: 56889 - protein, 378 aa, Artificial Sequence
  derived and/or modified sequence
MKMASFLAFLLLNFRVCLLLLQLLMPHSAQFSVLGPSGPILAMVGEDADLPCHLFPTMSAETMELKWVSSSLRQVVNVYADGKEVEDRQSAPYRGRTSILRDGITAGKAALRIHNVTASDSGKYLCYFQDGDFYEKALVELKVAALGSDLHVDVKGYKDGGIHLECRSTGWYPQPQIQWSNNKGENIPTVEAPVVADGVGLYAVAASVIMRGSSGEGVSCTIRSSLLGLEKTASISIADPFFRSAQRWIAALAGTLPVLLLLLGGAGYFLWQQQEEKKTQFRKKKREQELREMAWSTMKQEQSTRVKLLEELRWRSIQYASRGERHSAYNEWKKALFKPGPPIGQTQQQTRGQGSPVALSQESAQRTDSWGPEEGGES

SEQ ID NO: 56890 - protein, 119 aa, Artificial Sequence
  derived and/or modified sequence
MKMASFLAFLLLNFRVCLLLLQLLMPHSAQFSVLGPSGPILAMVGEDADLPCHLFPTMSAETMELKWVSSSLRQVVNVYADGKEVEDRQSAPYRGRTSILRDGITAGKAALRIHNVTAS

SEQ ID NO: 56891 - protein, 92 aa, Artificial Sequence
  derived and/or modified sequence
MKMASFLAFLLLNFRVCLLLLQLLMPHSAQFSVLGPSGPILAMVGEDADLPCHLFPTMSAETMELKWVSSSLRQVVNVYADGKEVEDRQSAP

SEQ ID NO: 56892 - DNA, 1137 bp, Artificial Sequence
  derived and/or modified sequence
atgaagatggcgtcctttctggcgttcctgctcctgaattttagggtatgtttgctgttgttgcaacttctgatgcctcactctgcccaattctccgttctcggccccagcggacccatcttagccatggtaggtgaggacgccgatctcccctgccatctctttcccacaatgtccgctgagaccatggaactgaaatgggtaagctcttccttgcggcaggtagttaacgtctacgccgacgggaaggaagtagaggaccggcaaagcgcaccttatagaggacggacaagcatcctcagggacggcatcacagcaggcaaggcagccttacgcatccataacgtaactgccagcgactctggtaagtacctatgttatttccaggacggagatttttatgaaaaggccctggtcgagctgaaggtcgcggctctaggaagcgacctgcatgtggacgtgaaggggtacaaggacgggggcattcatcttgaatgcagatctaccgggtggtacccgcagcctcaaatacagtggagcaataataagggcgagaatattccgaccgtggaagcaccggtggtggccgatggtgttgggttgtacgcggtggccgcatccgtcattatgcggggctcgagtggcgagggggtgtcctgcacaatccggagctcactgcttgggctggagaaaacggcctcgatttcgatcgcagatccatttttcagaagcgctcagcggtggatagctgccctggctgggacgcttccggttcttctactgttgctgggcggagcggggtatttcctttggcaacagcaggaggagaaaaagactcagttccgcaaaaaaaagcgtgaacaggaacttcgggagatggcttggagcaccatgaagcaggaacaatccacccgcgtgaagctgctcgaggaacttcgctggcgaagcatccaatatgcctcgcggggtgaacgccatagcgcctataacgagtggaagaaagcattgtttaagccggggcctcctataggccaaactcaacaacagacgcgcggccagggatcccccgtcgccctgagccaggagtctgcacaacgcaccgactcttggggcccggaggaaggtggggagtcttag

SEQ ID NO: 56893 - DNA, 1137 bp, Artificial Sequence
  derived and/or modified sequence
atgaagatggccagcttcctggccttcctgctgctgaacttccgggtgtgcctgctgctgctgcagctgctgatgccccacagcgcccagttctctgtgctgggccccagcggccccatcctggccatggtgggggaggatgctgacctgccctgccacctgttccccaccatgtctgctgagaccatggagctgaagtgggtgagcagcagcctgcggcaggtggtgaatgtgtatgcagatggcaaggaggtggaggaccggcagagcgccccctaccggggccgcaccagcatcctgagagatggcatcacagctgggaaggccgccctgcgcatccacaacgtgacagccagtgacagcggcaagtacctgtgctacttccaggatggagacttctatgagaaggccctggtggagctgaaggtggccgccctgggcagtgacctgcacgtggatgtgaagggctacaaggatggcggcatccacctggagtgccgcagcacaggctggtacccccagccccagatccagtggagcaacaacaagggggagaacatccccaccgtggaggcccctgtggtggctgatggagtgggcctgtatgctgtggccgccagcgtcatcatgaggggcagcagcggggagggcgtgtcctgcaccatccgcagcagcctgctgggcctggagaagacagccagcatcagcattgctgaccccttcttccgcagcgcccagcgctggattgctgccctggccggcaccctgcctgtgctgctgctgctgctgggcggggccggctacttcctgtggcagcagcaggaggagaagaagacccagttcaggaagaagaagcgggagcaggagctgcgggagatggcctggagcaccatgaagcaggagcagagcaccagggtgaagctgctggaggagctgcgctggaggagcatccagtatgccagcagaggagagcggcacagcgcctacaatgagtggaagaaggccctcttcaagccaggcccccccatcggccagacccagcagcagacccggggccagggcagccctgtggccctgagccaggagagcgcccagaggacagacagctggggccctgaggagggcggggagagctag

SEQ ID NO: 56894 - DNA, 1137 bp, Artificial Sequence
  derived and/or modified sequence
atgaagatggccagcttcctggccttcctgctgctgaacttccgggtttgtcttcttcttctgcagctccttatgcctcacagcgcccagttttcagtacttgggccgtccggacctatcctagccatggtgggggaggacgccgatctgccatgtcatctgttcccgactatgagcgccgaaaccatggagctgaagtgggtgagttcgagcctccggcaagtggtaaacgtgtacgccgatggaaaggaggtggaggaccggcaaagcgccccttaccgggggagaacctccatactgcgggacggtatcacagccggcaaggccgcactgcgaatccataacgttactgcatccgattcaggcaaatatctgtgttatttccaggatggcgacttctacgaaaaggccctcgtggagctcaaggtcgcagcgttaggtagtgatctccatgtggacgtgaagggctacaaagacggtggtatccatctggagtgcaggagcacaggatggtacccccagcctcagatccaatggtcgaataacaaaggcgagaacatccctacggttgaggctcccgtcgtggccgatggcgttggactgtacgccgtcgccgcaagcgtgattatgcgaggttccagtggtgagggcgtgtcttgcacaatcagatcctctctgctgggcctggaaaagacagcctcgatttcgattgcagacccttttttccgctccgctcagcggtggattgcggcactggctggaactctcccagtgcttttactcctgttggggggcgctggatactttctttggcagcaacaggaggagaagaagacgcagtttcgcaagaagaagagggagcaggagcttcgggagatggcctggtctaccatgaaacaggagcaaagcactagagttaaactgttagaagaactgcgttggcggtcaatacagtacgcatcccggggcgagcgtcactccgcgtacaacgagtggaagaaggccctctttaaacccggccccccaattggccagacacagcaacagacccggggtcaaggttcgccagtggccctcagtcaggagtcggctcagcgaacagactcttggggacccgaggagggaggtgagagttag

SEQ ID NO: 56895 - DNA, 1137 bp, Artificial Sequence
  derived and/or modified sequence
atgaagatggcctctttcttggcgtttctcttgctgaacttcagagtatgtctgttgctgctccagctgctgatgccgcactccgcccaattcagcgtgctggggccatcaggaccaatcttggccatggttggcgaggacgctgatctcccatgtcacctgttcccaactatgtccgctgagactatggaactgaagtgggtaagttccagcttgcgccaggttgtcaatgtgtacgccgatggcaaggaggtggaggatcggcagagtgcaccttatcgagggagaacctccatcttgcgggatggaatcactgccggaaaggcagcattgcggatccataatgtgacagcaagcgattccggcaaatatctgtgctatttccaggacggcgacttctacgagaaagcgctagttgagcttaaggtcgcggctttagggtcggacctgcatgtcgatgtgaagggctacaaagatgggggtatccatcttgagtgcaggagtacaggttggtacccccaaccccagattcaatggtctaacaacaaaggcgaaaacataccaactgtggaggctcctgtagtagccgacggtgttggactgtacgcggttgcagcttccgtgattatgcgcggttccagcggtgagggagttagctgcacaatcaggtcctcccttctaggtcttgagaaaaccgctagcattagcatcgccgaccctttctttcggagcgctcaaaggtggatcgcagcactggctgggacccttcccgtgttactgctcctcctgggcggtgctggttatttcctctggcagcaacaggaggagaaaaagacacagttcagaaagaaaaagcgcgagcaggagctgcgcgagatggcttggagcactatgaaacaggagcaaagtactcgggtgaagctgctcgaagagcttagatggcggagcatccaatacgctagtcgcggagaacggcactcagcctacaatgaatggaaaaaggccctctttaaaccgggtcccccaataggtcagacacagcagcagacccgtggccagggatctcctgttgccctttctcaggagtccgctcagcggaccgactcatggggaccagaggagggcggagaaagctag

SEQ ID NO: 56896 - DNA, 1882 bp, Artificial Sequence
  derived and/or modified sequence
attcttccaaagagagattgttattattcctcacgatgacccgacagtctctgctttctttttcctttcttccagaaggagatttaaccatagtagaaagaatggagaactattaactgcctttcttctgtgggctgtgattttcagaggggaatgctaagaggtgattttcaatgttgggactcaaaggtgaagacactgaaggacagaatttttggcagaggaaagatcttcttcggtcaccatacttgagttagctctagggaagtggaggtttccatttggaattctatagcttcttccaggtcatagtgtctgccccccaccttccagtatctcctgatatgcagcatgaatgaaaatggcaagtttcctggccttccttctgctcaactttcgtgtctgcctccttttgcttcagctgctcatgcctcactcagctcagttttctgtgcttggaccctctgggcccatcctggccatggtgggtgaagacgctgatctgccctgtcacctgttcccgaccatgagtgcagagaccatggagctgaagtgggtgagttccagcctaaggcaggtggtgaacgtgtatgcagatggaaaggaagtggaagacaggcagagtgcaccgtatcgagggagaacttcgattctgcgggatggcatcactgcagggaaggctgctctccgaatacacaacgtcacagcctctgacagtggaaagtacttgtgttatttccaagatggtgacttctatgaaaaagccctggtggagctgaaggttgcagcactgggttctgatcttcacgttgatgtgaagggttacaaggatggagggatccatctggagtgcaggtccactggctggtacccccaaccccaaatacagtggagcaacaacaagggagagaacatcccgactgtggaagcacctgtggttgcagacggagtgggcctgtatgcagtagcagcatctgtgatcatgagaggcagctctggggagggtgtatcctgtaccatcagaagttccctcctcggcctggaaaagacagccagcatttccatcgcagaccccttcttcaggagcgcccagaggtggatcgccgccctggcagggaccctgcctgtcttgctgctgcttcttgggggagccggttacttcctgtggcaacagcaggaggaaaaaaagactcagttcagaaagaaaaagagagagcaagagttgagagaaatggcatggagcacaatgaagcaagaacaaagcacaagagtgaagctcctggaggaactcagatggagaagtatccagtatgcatctcggggagagagacattcagcctataatgaatggaaaaaggccctcttcaagcctgggcctcccattggccaaacccaacagcaaaccagaggacaagggagcccagtggcactgtctcaggaatctgcccagaggacagattcctggggcccagaagagggtggagaaagctgaagggtggagagtgaatctagggcatataaggcaccacatagagcccagcacagagacggccttgcagctatcaggaagatgaggagcttccttcatggcctgctgtgggctgagtaaataacatgattgccttctacagcgctagagattcatttgtttatccccatttttcaggtgaggaaatgcttcagatgaggctccactttgttaaataaattggatgtatggaaaaatagactgcagaaaaggggaactcatttagctcatgagtggtcgaatgaaggttgaaaattaacctctgagtataaagcattagtgggcagagtgaatatggggagggaaacaagaaaaacgtagaaaggatccttgctgcttcctgaggccgcgtca

SEQ ID NO: 56897 - DNA, 1137 bp, Artificial Sequence
  derived and/or modified sequence
atgaagatggccagcttcctggccttcctgctgctgaacttcagagtgtgcctgctgctgctgcagctgctgatgccccacagcgcccagttcagcgtgctgggccccagcggccccatcctggccatggtgggcgaggacgccgacctgccctgccacctgttccccaccatgagcgccgagaccatggagctgaagtgggtgagcagcagcctgagacaggtggtgaacgtgtacgccgacggcaaggaggtggaggacagacagagcgccccctacagaggcagaaccagcatcctgagagacggcatcaccgccggcaaggccgccctgagaatccacaacgtgaccgccagcgacagcggcaagtacctgtgctacttccaggacggcgacttctacgagaaggccctggtggagctgaaggtggccgccctgggcagcgacctgcacgtggacgtgaagggctacaaggacggcggcatccacctggagtgcagaagcaccggctggtacccccagccccagatccagtggagcaacaacaagggcgagaacatccccaccgtggaggcccccgtggtggccgacggcgtgggcctgtacgccgtggccgccagcgtgatcatgagaggcagcagcggcgagggcgtgagctgcaccatcagaagcagcctgctgggcctggagaagaccgccagcatcagcatcgccgaccccttcttcagaagcgcccagagatggatcgccgccctggccggcaccctgcccgtgctgctgctgctgctgggcggcgccggctacttcctgtggcagcagcaggaggagaagaagacccagttcagaaagaagaagagagagcaggagctgagagagatggcctggagcaccatgaagcaggagcagagcaccagagtgaagctgctggaggagctgagatggagaagcatccagtacgccagcagaggcgagagacacagcgcctacaacgagtggaagaaggccctgttcaagcccggcccccccatcggccagacccagcagcagaccagaggccagggcagccccgtggccctgagccaggagagcgcccagagaaccgacagctggggccccgaggagggcggcgagagctag

SEQ ID NO: 56898 - protein, 2295 aa, Artificial Sequence
  derived and/or modified sequence
MDFLIIFLLLFIGTSETQVDVSNVVPGTRYDITISSISTTYTSPVTRIVTTNVTKPGPPVFLAGERVGSAGILLSWNTPPNPNGRIISYIVKYKEVCPWMQTVYTQVRSKPDSLEVLLTNLNPGTTYEIKVIILNATKVGCLLSPILLNTVLEGLARAINLTRECQTVDAGQCVQCAVREPKQGSTSGGRAQTNKKTAVTSADLNHTAGDLRTGRLPPQPLTAEQPNWEAPPSRGRLTPHKAGYSSATAAGTQANRVWSRPLAKIQTTIREYYKHLYAKKEGILPNSFYEASIILIPKPVPEGPPQNCVTGNITGKSFSILWDPPTIVTGKFSYRVELYGPSGRILDNSTKDLKFAFTNLTPFTMYDVYIAAETSAGTGPKSNISVFTPPDVPGAVFDLQLAEVESTQVRITWKKPRQPNGIINQYRVKVLVPETGIILENTLLTGNNEYINDPMAPEIVNIVEPMVGLYEGSAEMSSDLHSLATFIYNSHPDKNFPARNRAEDQTSPVVTTRNQYITDIAAEQLSYVIRRLVPFTEHMISVSAFTIMGEGPPTVLSVRTRQQVPSSIKIINYKNISSSSILLYWDPPEYPNGKITHYTIYAMELDTNRAFQITTIDNSFLITGLKKYTKYKMRVAASTHVGESSLSEENDIFVRTSEDEPESSPQDVEVIDVTADEIRLKWSPPEKPNGIIIAYEVLYKNIDTLYMKNTSTTDIILRNLRPHTLYNISVRSYTRFGHGNQVSSLLSVRTSETVPDSAPENITYKNISSGEIELSFLPPSSPNGIIQKYTIYLKRSNGNEERTINTTSLTQNIKVLKKYTQYIIEVSASTLKGEGVRSAPISILTEEDAPDSPPQDFSVKQLSGVTVKLSWQPPLEPNGIILYYTVYVWNRSSLKTINVTETSLELSDLDYNVEYSAYVTASTRFGDGKTRSNIISFQTPEGAPSDPPKDVYYANLSSSSIILFWTPPSKPNGIIQYYSVYYRNTSGTFMQNFTLHEVTNDFDNMTVSTIIDKLTIFSYYTFWLTASTSVGNGNKSSDIIEVYTDQDIPEGFVGNLTYESISSTAINVSWVPPAQPNGLVFYYVSLILQQTPRHVRPPLVTYERSIYFDNLEKYTDYILKITPSTEKGFSDTYTAQLYIKTEEDVPETSPIINTFKNLSSTSVLLSWDPPVKPNGAIISYDLTLQGPNENYSFITSDNYIILEELSPFTLYSFFAAARTRKGLGPSSILFFYTDESVPLAPPQNLTLINCTSDFVWLKWSPSPLPGGIVKVYSFKIHEHETDTIYYKNISGFKTEAKLVGLEPVSTYSIRVSAFTKVGNGNQFSNVVKFTTQESVPDVVQNMQCMATSWQSVLVKWDPPKKANGIITQYMVTVERNSTKVSPQDHMYTFIKLLANTSYVFKVRASTSAGEGDESTCHVSTLPETVPSVPTNIAFSDVQSTSATLTWIRPDTILGYFQNYKITTQLRAQKCKEWESEECVEYQKIQYLYEAHLTEETVYGLKKFRWYRFQVAASTNAGYGNASNWISTKTLPGPPDGPPENVHVVATSPFSISISWSEPAVITGPTCYLIDVKSVDNDEFNISFIKSNEENKTIEIKDLEIFTRYSVVITAFTGNISAAYVEGKSSAEMIVTTLESAPKDPPNNMTFQKIPDEVTKFQLTFLPPSQPNGNIQVYQALVYREDDPTAVQIHNLSIIQKTNTFVIAMLEGLKGGHTYNISVYAVNSAGAGPKVPMRITMDIKAPARPKTKPTPIYDATGKLLVTSTTITIRMPICYYSDDHGPIKNVQVLVTETGAQHDGNVTKWYDAYFNKARPYFTNEGFPNPPCTEGKTKFSGNEEIYIIGADNACMIPGNEDKICNGPLKPKKQYLFKFRATNIMGQFTDSDYSDPVKTLGEGLSERTVEIILSVTLCILSIILLGTAIFAFARIRQKQKEGGTYSPQDAEIIDTKLKLDQLITVADLELKDERLTRLLSYRKSIKPISKKSFLQHVEELCTNNNLKFQEEFSELPKFLQDLSSTDADLPWNRAKNRFPNIKPYNNNRVKLIADASVPGSDYINASYISGYLCPNEFIATQGPLPGTVGDFWRMVWETRAKTLVMLTQCFEKGRIRCHQYWPEDNKPVTVFGDIVITKLMEDVQIDWTIRDLKIERHGDCMTVRQCNFTAWPEHGVPENSAPLIHFVKLVRASRAHDTTPMIVHCSAGVGRTGVFIALDHLTQHINDHDFVDIYGLVAELRSERMCMVQNLAQYIFLHQCILDLLSNKGSNQPICFVNYSALQKMDSLDAMEGDVELEWEETTM

SEQ ID NO: 56899 - DNA, 6888 bp, Artificial Sequence
  derived and/or modified sequence
atggatttcctcatcatcttcctgctgctatttatcggcaccagtgaaacacaagtggatgtatccaatgtggtccctgggacccggtacgacattaccatatctagcatcagtaccacttacacaagtccagtgacaagaattgtgacaaccaacgtgacgaaacccggcccacccgtgttcctagccggggagcgggtggggagtgctgggatcttactgtcatggaatacgccgcctaatcctaacggccggatcatctcttacatagttaaatataaggaggtgtgcccatggatgcagaccgtgtacacacaggtgcgtagtaagcccgactccctggaagtactgctgaccaacttgaatcctggcaccacgtacgaaataaaggtcatcatcctcaacgcaaccaaggtgggatgcctgctatctccaatactactgaacactgtcctggagggacttgcgcgggccatcaatctcaccagagagtgccagactgtcgatgctggccagtgtgttcagtgtgcggttagggagccaaagcagggatcaactagcgggggaagagcccagactaataaaaagaccgccgttactagcgccgacctgaaccataccgccggcgacctccggaccggtaggctccccccgcagccgctgacagcagaacaaccaaattgggaagctcccccatcccggggcaggcttaccccacataaggctggctatagcagcgcaactgcggccggaacacaagctaatagggtgtggtcacggccactggccaagatacagacaacgattcgggagtactataagcatctttatgcaaagaaggaagggatcctgccaaactctttctatgaggcttcaatcatccttatccccaaaccagtacctgaaggaccacctcagaactgcgttacagggaacataacaggcaagagtttctctattttgtgggatccacctacaattgtgacaggaaagttctcataccgggtggaactatacggaccgtctggccgcattcttgataactccacaaaggacctcaagtttgcctttacaaaccttactccgttcaccatgtacgacgtctacatcgcagccgagaccagcgccgggacggggccaaagtctaacattagcgtttttacgccccccgacgtcccgggagccgtgttcgatttacaactcgctgaagtcgaatcaacacaggtacggattacctggaaaaagccaaggcagcccaatgggattatcaatcaatatagagtaaaagttttagtcccagagaccggcattatactggagaatacactgcttacaggaaataatgaatatattaacgaccccatggccccagaaattgtaaatatagtggaacctatggtgggactctatgagggctcagctgagatgagctcggaccttcattcattggcaaccttcatctataactcccaccctgacaaaaactttcctgcgcggaaccgggccgaggaccagacatcccccgtggtgactacgcgcaatcagtacatcaccgacatcgccgcagagcagctgagctacgtaatccgcagactggttcctttcacagagcatatgatctctgtgtccgccttcacaatcatgggagaaggaccgcctactgtgctgagcgtccgcacccgtcagcaggttccgagttccataaagatcatcaattataagaatatttcttccagctccatcctgctctactgggaccccccagagtatcctaacggaaaaattactcattataccatctacgcgatggaattagatactaacagggcatttcaaattacgactattgacaactcctttctgatcacagggctgaagaagtacacgaaatataaaatgagggtggcggcctcaacacatgttggcgagtcctctctctccgaggagaacgatatttttgtgagaacctcggaggatgaaccagagagctcgccccaggacgtcgaggtgatcgacgtaacagcagacgagatacgcctcaagtggtctcccccggagaagcctaacggaatcatcattgcctacgaggtactgtataaaaacattgataccctctatatgaaaaacacctccacaactgatataattcttaggaaccttcgaccccacacgctgtacaacatttcagtgcgttcctacacacgtttcggacatggaaaccaggtgagttctcttttatctgtaagaacgtcagaaaccgtcccagacagtgccccagagaatatcacctacaagaacatttctagcggcgaaattgaacttagctttctcccccccagctcccccaacggaatcatccagaaatataccatttaccttaaacgaagcaatggaaatgaggagcgcaccatcaacacaacaagcctgacacaaaatataaaagttctcaagaagtacacccagtacatcattgaagtgagcgcctcaaccttgaagggagagggagtacgttccgccccaatttctattcttactgaggaggatgccccagattcccccccccaggattttagcgttaaacagctgtctggagtcactgtgaagctgtcctggcaaccccctcttgaacctaatggcatcatcctctactacacggtttacgtgtggaacaggtcaagcctgaagactatcaatgttacagagacctctttggaactctctgatttagattacaatgtggagtattcagcctacgtgaccgcctctacaaggtttggagatggtaagacgcggagtaatatcatttcttttcagacaccagaaggagcaccatcagaccctcctaaagacgtgtactacgctaatctctcaagtagcagcataatactgttttggacccccccatccaagcccaatggaatcatacagtactatagtgtgtactatcgtaacacatcagggacatttatgcagaactttacgctccacgaagtgaccaacgatttcgacaacatgaccgtgtccactattatcgacaagctgaccatcttctcttactacacattctggttgactgcctccacgtccgtaggcaatgggaacaagagcagcgacatcatcgaggtgtacactgatcaggacattccagaaggtttcgtcggaaacctgacctatgagtcaatcagctcaaccgcaatcaacgtaagttgggttccacccgctcagccgaacggtctagttttttactacgtcagtctcatacttcagcagaccccacgacatgtgaggccacctctcgtgacttacgaacgcagcatttatttcgataacttagaaaaatatactgactatatcctcaagatcacacccagcacagaaaagggattttcagacacatataccgctcagctgtacatcaagactgaagaagacgtgcctgaaacttcacctatcatcaacacgttcaaaaacttgagctctacctcagtccttctgtcatgggatccgcccgtgaagcctaacggtgcgattatatcatacgatctgactctgcaggggcctaacgaaaattatagctttatcacgagcgataactatattatcttggaagagctatctccttttacactctactcattcttcgctgcggctagaacccgaaaggggctggggcccagttccatcctgtttttttacacggatgagagcgtcccactggcacccccccagaacctcacacttattaattgcactagcgacttcgtgtggctcaaatggtctcccagcccactccctggcggtatcgtgaaggtttattcttttaaaattcatgagcacgagaccgataccatctactataagaacatctccgggtttaagactgaagctaagctggtggggctggagcctgtaagcacctattcaattcgagtcagcgctttcacgaaggtgggcaatggcaaccagttttccaatgtggtgaagttcaccacgcaggaaagcgtacctgacgtggtccagaatatgcagtgcatggccacaagttggcagtctgtgctggtgaagtgggatcctcctaaaaaggccaacggcataattacccagtatatggtaaccgtcgagcgaaacagcaccaaggttagccctcaggaccatatgtacacattcatcaaactccttgccaacacctcttatgtcttcaaggtccgggcatccacctcagcgggcgagggcgatgagtccacatgccacgtatctacgcttccggagactgtgcctagcgtgccaaccaatatagcgttctctgacgtacagtccaccagcgccactctcacatggatcaggcctgatacaatactgggatattttcagaactacaagattacaacacagttacgggcccaaaagtgcaaagaatgggagtcagaagaatgcgtcgaataccagaagatccagtatttatacgaagcccatctgacggaagagacggtgtatggtctcaagaaattccggtggtaccggtttcaggtagctgcctctactaatgctggctatggcaacgcctcaaactggatatccactaaaacactgcccggtcccccagacggccctcccgagaacgtccacgtcgttgctactagcccatttagcattagcatatcttggagcgaacccgccgtgatcaccggccccacctgctatttgattgatgtgaaaagtgtagacaacgatgagttcaacatcagctttataaagagcaacgaggaaaacaagactatcgaaattaaggaccttgaaattttcacaaggtacagtgtggtgatcactgctttcacgggtaatatatccgcagcttatgtggagggtaaatcaagcgcagaaatgatcgtcacgactcttgagtccgctccgaaagacccacccaataatatgacgttccagaaaattcctgatgaagtaaccaagtttcagctgacctttctgccaccatcccaaccaaacggaaatatccaggtgtaccaggcgctagtttatagggaagacgacccaaccgccgtgcagattcacaatttgtccatcatacagaaaacgaataccttcgtaatcgcaatgttggagggtctcaaagggggacatacttacaatatttcggtttatgccgtgaactcagctggcgcaggtcccaaggtgcccatgagaatcaccatggacattaaggcccctgcgcgccccaaaaccaagccaactcccatctatgacgccacaggtaaacttcttgtaacatccaccacaataactattcgcatgccgatctgttattattctgatgatcacggaccgatcaagaatgtccaggtgctggtgacagagaccggcgcacaacatgatggcaacgttacaaagtggtacgacgcgtatttcaacaaggctcggccatattttacaaacgaaggcttcccgaacccgccctgtactgagggcaagaccaagtttagtggcaatgaagaaatctatatcatcggggctgataacgcctgcatgatcccaggcaatgaagataagatttgcaatgggccactgaagccaaagaagcagtacctgttcaagttcagggccacaaacatcatgggccagttcacagactcggattacagtgatcccgtaaagaccctgggcgagggcctttcggaacgcacagttgagattatcctgtccgttaccctttgtatcctgagtatcattctgctaggcaccgccatattcgcctttgctaggatcaggcagaagcagaaagagggcggaacatattcaccccaggatgccgagatcattgataccaagctgaaactggatcagcttataaccgtggcagacctcgaactaaaggacgagaggctcacaagactgctgtcctatcgcaagagcattaaacccatctccaagaaatcttttctccagcatgttgaggaattgtgcactaataacaatctcaaatttcaggaggagtttagtgaactcccaaaatttcttcaggatctctctagcacagatgccgatctgccttggaaccgcgctaagaacagatttcccaacatcaagccatataataataatagggttaaactgatcgcagacgcatctgtgccgggatctgactacatcaatgctagctacatcagcgggtacttatgccctaatgagtttattgccactcagggcccactcccaggcaccgttggtgacttctggagaatggtttgggagacacgggcaaaaactctggtaatgcttactcagtgttttgaaaaaggccggatccggtgtcaccagtactggcctgaagataacaaacctgtaacagtatttggggatatcgtaattacaaagcttatggaagacgttcaaatcgattggactatcagagacctcaaaatagaacggcatggcgattgtatgacagtgcgacagtgtaacttcacggcatggccagagcacggcgtacctgagaactctgcacctcttatccattttgtcaagcttgtccgcgcttccagggctcatgatacaactccaatgatagtccattgttcagctggcgtcgggcgtactggcgtatttatagcattggaccacctcacccagcatattaacgatcatgactttgttgatatttacggcctggttgcagagctgaggtcggagcgtatgtgcatggtccaaaatttagcacagtacatctttctgcaccagtgcatcctggatctcttgagcaataagggctcaaaccagccaatttgcttcgtcaattatagcgccctgcagaaaatggacagcctggatgccatggagggtgatgtggaactcgagtgggaggaaactacaatgtag

SEQ ID NO: 56900 - DNA, 6888 bp, Artificial Sequence
  derived and/or modified sequence
atggacttcctgatcatcttcctgctgctcttcatcggcaccagcgagacccaggtggatgtgtccaatgtggtgcccggcaccaggtatgacatcaccatcagcagcatcagcaccacctacaccagccctgtgacccgcatcgtgaccaccaacgtgaccaagccaggcccccctgtgttcctggccggggagcgggtgggcagcgctggcatcctgctgtcctggaacaccccacccaaccccaacggccgcatcatctcctacatcgtgaagtacaaggaggtgtgcccctggatgcagacagtgtacacccaggtgcgcagcaagccagacagcctggaggtgctgctgaccaacctgaaccctggcaccacctatgagatcaaggtgatcatcctgaatgccaccaaggtgggctgcctgctgagccccatcctgctgaacacagtgctggagggcctggcccgggccatcaacctgacccgggagtgccagacagtggatgctggccagtgtgtgcagtgtgctgtgcgggagcccaagcagggcagcaccagcggcggccgggcccagaccaacaagaagacagctgtgaccagcgctgacctgaaccacacagctggggacctgaggacaggccgcctgcccccccagcccctgacagctgagcagcccaactgggaggccccacccagccggggccgcctgaccccccacaaggccggctacagcagcgccacagctgctggcacccaggccaacagagtgtggagccggcccctggccaagatccagaccaccatccgggagtactacaagcacctgtatgccaagaaggagggcatcctgcccaacagcttctatgaggccagcatcatcctgatccccaagcctgtgcctgagggccccccccagaactgtgtgacaggcaacatcaccgggaagagcttcagcatcctgtgggacccccccaccatcgtgacaggcaagttctcctacagagtggagctgtatggccccagcggccgcatcctggacaacagcaccaaggacctgaagtttgccttcaccaacctgacccccttcaccatgtatgatgtgtacatcgctgctgagaccagcgctggcaccggccccaagagcaacatctctgtgttcaccccaccagatgtgcctggagctgtgtttgacctgcagctggccgaggtggagagcacccaggtgcgcatcacctggaagaagccccggcagcccaacggcatcatcaaccagtacagagtgaaggtgctggtgcctgagaccggcatcatcctggagaacaccctgctgactggaaataatgagtacatcaatgaccccatggcccctgagatcgtgaacatcgtggagcccatggtgggcctgtatgagggcagcgctgagatgagcagtgacctgcacagcctggccaccttcatctacaacagccacccagacaagaacttccctgccaggaacagagctgaggaccagaccagccctgtggtgaccaccaggaaccagtacatcacagacattgctgctgagcagctgtcctatgtgatccggcggctggtgcccttcacagagcacatgatctctgtgtctgccttcaccatcatgggagagggcccccccaccgtgctgtctgtgaggacccggcagcaggtgcccagcagcatcaagatcatcaactacaagaacatcagcagcagcagcatcctgctgtactgggaccccccagagtaccccaacgggaagatcacccactacaccatctatgccatggagctggacaccaacagagccttccagatcaccaccatcgacaacagcttcctgatcaccggcctgaagaagtacaccaagtacaagatgagggtggccgccagcacccacgtgggggagagcagcctgtctgaagaaaatgacatctttgtgaggaccagtgaagatgagcctgagagcagcccccaggatgtggaggtgattgatgtgacagcagatgagatccggctgaagtggagccccccagagaagcccaacggcatcatcatcgcctatgaggtgctgtacaagaacatcgacaccctgtacatgaagaacaccagcaccacagacatcatcctgaggaacctgcggccccacaccctgtacaacatctctgtgcgcagctacacccgcttcggccacggcaaccaggtgagcagcctgctgtctgtgaggaccagcgagaccgtgcctgattctgcccctgagaacatcacctacaagaacatcagcagtggagaaattgagctgtccttcctgccccccagcagccccaacggcatcatccagaagtacaccatctacctgaagaggagcaatggaaatgaggagaggaccatcaacaccaccagcctgacccagaacatcaaggtgctgaagaagtacacccagtacatcatcgaggtgtctgccagcaccctgaagggggagggcgtgcgcagcgcccccatcagcatcctgacagaagaagatgccccagacagccccccccaggacttctctgtgaagcagctgtctggagtgacagtgaagctgtcctggcagccccccctggagcccaacggcatcatcctgtactacacagtgtatgtgtggaacagaagcagcctgaagaccatcaacgtgacagagaccagcctggagctgagtgacctggactacaacgtggagtacagcgcctacgtgacagccagcaccaggtttggagatggcaagaccaggagcaacatcatctccttccagaccccagagggcgcccccagcgacccccccaaggatgtgtactatgccaacctgagcagcagcagcatcatcctcttctggaccccacccagcaagcccaacggcatcatccagtactacagcgtgtactacagaaacaccagcggcaccttcatgcagaacttcaccctgcacgaggtgaccaatgactttgacaacatgacagtgtccaccatcatcgacaagctgaccatcttctcctactacaccttctggctgacagccagcacctctgtgggcaatggaaacaagagcagtgacatcatcgaggtgtacacagaccaggacatccctgagggctttgtgggcaacctgacctatgagagcatcagcagcacagccatcaacgtgtcctgggtgcccccagcccagcccaacggcctggtgttctactacgtgtccctcatcctgcagcagacccccaggcatgtgcggccccccctggtgacctatgaaagaagcatctactttgacaacctggagaagtacacagactacatcctgaagatcacccccagcacagagaagggcttcagtgacacctacacagcccagctgtacatcaagacagaagaagatgtgcctgagaccagccccatcatcaacaccttcaagaacctgagcagcacctctgtgctgctgtcctgggacccccctgtgaagcccaacggggccatcatctcctatgacctgaccctgcagggccccaatgaaaactacagcttcatcaccagtgacaactacatcatcctggaggagctgagccccttcaccctgtacagcttctttgctgctgcccggaccaggaagggcctgggccccagcagcatcctcttcttctacacagatgagagcgtgcccctggccccaccccagaacctgaccctcatcaactgcaccagtgactttgtgtggctgaagtggagccccagccccctgcccggcggcatcgtgaaggtgtacagcttcaagatccatgaacatgaaacagacaccatctactacaagaacatcagcggcttcaagacagaggccaagctggtgggcctggagcctgtgtccacctacagcatccgggtgtctgccttcaccaaggtgggcaatggaaaccagttcagcaatgtggtgaagttcaccacccaggagagcgtgcctgatgtggtgcagaacatgcagtgcatggccacctcctggcagagcgtgctggtgaagtgggacccccccaagaaggccaacggcatcatcacccagtacatggtgacagtggagaggaacagcaccaaggtgagcccccaggaccacatgtacaccttcatcaagctgctggccaacaccagctatgtgttcaaggtgcgggccagcaccagcgctggggagggagatgagagcacctgccacgtgtccaccctgcctgagaccgtgcccagcgtgcccaccaacatcgccttcagtgatgtgcagagcaccagcgccaccctgacctggatccggccagacaccatcctgggctacttccagaactacaagatcaccacccagctgcgggcccagaagtgcaaggagtgggagagtgaagaatgtgtggagtaccagaagatccagtacctgtatgaggcccacctgacagaggagaccgtgtatggcctgaagaagttccgctggtaccgcttccaggtggccgccagcaccaatgccggctatggaaatgccagcaactggatcagcaccaagaccctgcccggccccccagatggccccccagaaaatgtgcacgtggtggccaccagccccttcagcatcagcatctcctggagcgagcctgctgtgatcaccggccccacctgctacctgattgatgtgaagtctgtggacaatgatgagttcaacatctccttcatcaagagcaatgaggagaacaagaccatcgagatcaaggacctggagatcttcacccgctacagcgtggtgatcacagccttcaccggcaacatctctgctgcctacgtggagggcaagagcagcgctgagatgattgtgaccaccctggagagcgcccccaaggacccccccaacaacatgaccttccagaagatcccagatgaggtgaccaagttccagctgaccttcctgccccccagccagcccaatggaaacatccaggtgtaccaggccctggtgtaccgggaggatgaccccacagctgtgcagatccacaacctgagcatcatccagaagaccaacaccttcgtcatcgccatgctggagggcctgaagggcggccacacctacaacatctctgtgtatgctgtgaacagcgctggggccggccccaaggtgcccatgaggatcaccatggacatcaaggccccagcccggcccaagaccaagcccacccccatctatgatgccaccgggaagctgctggtgaccagcaccaccatcaccatccgcatgcccatctgctactacagtgatgaccacggccccatcaagaatgtgcaggtgctggtgacagaaacaggagcccagcatgatggaaatgtgaccaagtggtatgatgcctacttcaacaaggcccggccctacttcaccaatgaaggcttccccaaccccccctgcacagagggcaagaccaagttctctggaaatgaggagatctacatcatcggggctgacaatgcctgcatgatccctggaaatgaagacaagatctgcaatggccccctgaagcccaagaagcagtacctgttcaagttccgggccaccaacatcatgggccagttcacagacagcgactacagcgaccctgtgaagaccctgggggagggcctgtctgagaggacagtggagatcatcctgtctgtgaccctgtgcatcctgagcatcatcctgctgggcacagccatctttgcctttgcccgcatccggcagaagcagaaggagggcggcacctacagcccccaggatgctgagatcatcgacaccaagctgaagctggaccagctgatcaccgtggccgacctggagctgaaggatgagcggctgacccggctgctgagctacaggaagagcatcaagcccatcagcaagaagagcttcctgcagcacgtggaggagctgtgcaccaacaacaacctgaagttccaggaggagttcagcgagctgcccaagttcctgcaggacctgagcagcacagatgctgacctgccctggaacagagccaagaaccgcttccccaacatcaagccctacaacaacaacagagtgaagctgattgctgatgcctctgtgcccggcagtgactacatcaatgccagctacatcagcggctacctgtgccccaatgagttcatcgccacccagggccccctgcccggcaccgtgggggacttctggaggatggtgtgggagacccgggccaagaccctggtgatgctgacccagtgctttgagaagggccgcatccgctgccaccagtactggccagaggacaacaagcctgtgacagtgtttggagacatcgtcatcaccaagctgatggaggatgtgcagattgactggaccatccgggacctgaagattgagcggcacggggactgcatgacagtgcggcagtgcaacttcaccgcctggccagagcacggcgtgcctgaaaattctgcccccctcatccactttgtgaagctggtgcgggccagccgggcccatgacaccacccccatgattgtgcactgcagcgctggggtgggccgcactggagtcttcatcgccctggaccacctgacccagcacatcaatgaccatgactttgtggacatctacggcctggtggccgagctgcggtctgagaggatgtgcatggtgcagaacctggcccagtacatcttcctgcaccagtgcatcctggacctgctgagcaacaagggcagcaaccagcccatctgctttgtgaactacagcgccctgcagaagatggacagcctggatgccatggagggagatgtggagctggagtgggaggagaccaccatgtag

SEQ ID NO: 56901 - DNA, 6888 bp, Artificial Sequence
  derived and/or modified sequence
atggacttcctgatcatcttcctgctgctgttcatcggcaccagcgagacccaggtcgatgtgtccaacgtggtgccgggaaccagatatgacatcaccatcagcagcattagcaccacgtatacatctcccgtgacccggatcgtaactacaaacgtgacaaagcctggaccccccgtttttcttgccggggagcgcgtaggctctgcggggatcctgctcagctggaataccccccctaacccaaatggaaggattatctcatacattgtgaagtataaagaggtgtgcccttggatgcagactgtatacacacaagtgaggtctaaaccagattctctcgaagttctgttaacaaatctgaatccaggtactacttatgagattaaagtcatcattttaaacgccactaaggtaggatgtctgctgagcccaattcttctgaataccgttttagagggcctcgctcgcgctattaacctgacaagagagtgtcagaccgtggacgcaggccagtgcgtgcaatgtgcggttcgggaacccaaacaggggtctacttctggcggtagggcacagactaacaaaaaaacggcagtgacatcggccgatctaaatcatactgcaggcgatcttcgtacgggacgtcttccccctcaacctctaacggccgagcagcccaattgggaggctcctcctagccgaggccggctcacgccacataaagcggggtatagctccgctacggccgccggcacgcaggctaaccgggtgtggtctcggccactggctaagatccagactacgattagagaatattataaacatctctacgcaaagaaggaagggatcctgccaaatagtttttacgaagcttctataattttgattccgaagccggttcctgaaggccccccacagaactgcgtgacaggaaacattactgggaagtctttctccattctgtgggacccacctactatcgttaccggtaagttttcatatagagtggaactttatggccccagtggtaggatcttggacaattccaccaaggaccttaagttcgcattcacaaacctcaccccttttacaatgtatgatgtctacatagctgccgagaccagcgccggaactgggccaaagagcaatatttcagtcttcacccctccagatgtgccgggagctgtcttcgatctccagttagcagaggtggagtccacccaagtgaggataacttggaaaaagccacgccagcccaatggcatcattaatcagtatcgcgtcaaagtgctagttcctgagactggcatcattttagaaaataccctattgacggggaataacgagtatattaatgatcctatggcaccagagatcgtgaacatagtggaacctatggtcggactctacgagggttccgctgagatgtcttctgatctacactcgctggcaaccttcatttacaatagccaccccgataaaaatttcccagcaaggaaccgggccgaggatcagacaagcccagttgttacgactagaaatcagtatataacagacatcgccgcagagcagctgagttacgtgatccgtaggcttgttccgttcaccgagcacatgatctctgtatctgcgttcacaattatgggcgaaggacctccaactgttttgagcgtgagaaccaggcagcaggtccccagcagtataaagatcatcaattataagaacatcagttccagcagtatcttgctgtactgggacccgcccgagtatcccaacggaaaaattacccactacacgatatacgctatggagctggacactaacagagccttccaaattacaaccattgacaacagtttcttaattactgggctgaaaaagtacacgaaatataagatgcgcgttgccgcctctactcacgttggtgaatcctcgctctcagaagagaacgacattttcgtacgtacctccgaggacgagccagaaagcagcccacaggacgtggaggtgatcgatgtgacagcagatgagatacgtctgaagtggtctccgccggaaaagccgaacggaatcatcattgcgtatgaagtcctctacaaaaacatcgatacattgtacatgaaaaacactagcacaaccgatatcatccttagaaacttgcgccctcacacactatacaacattagtgtgcgctcctatactagattcggtcacggaaatcaggtaagcagtctgctgtcagtaagaacttctgagacagtgccggattctgcgcccgaaaacattacctacaaaaatatctcttctggagagatagaactgagtttcctccctccatccagtccaaatggtatcatccagaagtacactatctatctgaaacgcagtaacggaaacgaagagaggacaatcaatacaacatcactgacccaaaatattaaagtgctcaaaaagtacacacagtacattattgaggtgagtgccagtacgttgaaaggggagggtgtcaggagcgcccccatcagcattctgacagaagaggatgcacctgacagtccaccacaggacttttctgtgaaacagttgtccggcgtgaccgtgaagctcagttggcagcccccgctggagccgaatggcattatcctgtactacacggtgtacgtctggaaccgctctagccttaagacaattaacgtgacggagacaagcctagaattgagtgatttagactataatgtggaatattcggcatacgtgactgcctctactaggttcggcgatgggaagacgagatccaatatcatctcttttcagacaccagaaggagctccctccgacccgcctaaggatgtctactatgccaacctgtccagcagttctatcattctgttctggacaccccctagtaagcccaatggcatcattcagtattacagcgtgtattaccggaatactagcggcaccttcatgcaaaacttcactctgcatgaggtcacaaacgactttgacaacatgacagtatctacgattatcgataagctcacaattttttcctattataccttctggctcacagcttccacttcagtggggaatgggaacaagtctagcgatattattgaagtgtacactgaccaggacataccagagggctttgtaggcaacttaacatatgaatccatcagcagcaccgcaatcaatgtgtcttgggttcctcccgcccagccaaatggcctggtcttttactacgtaagcctgatcttgcagcagaccccccgtcatgtaagaccccctctggtcacctacgagcgctccatctattttgacaacctggaaaagtatactgattacatcctcaaaatcaccccttcaactgaaaagggcttctccgatacttatactgcacaactatacattaaaactgaagaagatgtccccgagaccagccctattattaacactttcaagaatctgagttcaacctccgtgctacttagctgggaccccccagtgaagcctaacggggccattatcagctatgatctgaccctgcaaggccctaatgagaattacagttttattacatccgataattatatcattctagaagagcttagtccgttcacattgtacagctttttcgcggctgccagaacccggaaaggactgggaccttctagcatcttattcttttacactgatgaatccgtacctctagcccctccccagaatttaacattaatcaattgcacctctgatttcgtgtggctcaaatggtccccttcccctttgccaggcgggattgttaaagtgtatagtttcaagatacatgagcatgaaaccgacaccatctactacaaaaatatatcagggttcaaaaccgaggccaaattagtgggactggagcccgttagtacatactccataagggtatctgcctttacaaaggtcggcaatggaaatcagttttctaacgtggtcaaattcacgactcaagaatccgtgcctgacgtggtgcagaacatgcagtgcatggccacatcttggcagagcgtactggttaaatgggacccacccaaaaaagctaatggaattataacacagtacatggtgaccgtggagcgcaatagcaccaaagtttcacctcaggatcacatgtacacgttcataaaactgctggcaaatactagctacgtctttaaggtacgagcctctactagcgctggcgaaggagatgaatcaacctgccacgtgtctacattgccagagaccgtgccatcggtccctaccaatattgctttttcggacgtgcaatctacctcggcaactcttacctggatccggcccgacactatcttgggatattttcaaaattataaaataactacccagctaagagcccagaagtgcaaagaatgggagtctgaagagtgtgtcgaataccagaagattcagtacctctatgaagcacacctcacagaggaaactgtgtacggacttaagaagttcaggtggtaccggttccaggttgctgccagtaccaacgctggctatggaaacgcaagtaattggatctctaccaagaccctgcccgggcctcctgacggcccgcctgaaaatgtgcatgttgtggctacctcacccttcagtatatccatatcatggagcgaacctgccgtgatcactggacctacctgttatctgatcgatgtcaaaagtgtggataatgatgaatttaatataagtttcatcaaatcaaatgaggaaaataagacgatcgaaatcaaagatctcgaaatatttacacgttacagtgtggtcattactgcattcacgggcaatatcagcgcggcttatgtggaggggaaaagtagcgccgagatgatcgtcaccacgctggagagcgctcctaaagatccccctaataatatgaccttccagaagattccagacgaggtcaccaaatttcaattgaccttcctcccacccagtcaacccaacggcaatatccaggtgtaccaggccctggtctaccgggaggacgatcctaccgccgtacagattcacaatctcagtattattcaaaagaccaatacttttgtcatcgcaatgctcgagggtctaaagggcgggcatacctacaatattagcgtgtatgccgtgaactccgctggtgccgggcctaaggtcccaatgcgtatcacaatggacatcaaagccccggcaaggccgaagacaaaaccgaccccaatctatgatgcaacagggaagctgttagtcacaagcaccaccattacaatcagaatgcctatttgctactatagcgatgaccatggcccaatcaagaatgtgcaagtgttggtgacagagaccggcgcccaacacgatggtaacgtgaccaagtggtacgatgcctacttcaataaggctcgaccatactttaccaatgagggtttccctaatccgccctgcacagaagggaagacaaagttctcagggaacgaggaaatctatatcataggcgcggacaacgcctgcatgattcccgggaatgaggataagatctgcaatggccccctcaagcccaagaaacagtaccttttcaaattccgcgcaaccaacattatgggacagttcacagattccgattattctgacccggttaaaacccttggtgagggattgagcgaacgaaccgtggagattatcctatcagtgactttatgcatcctctctattatcctgcttggcacagcaatcttcgctttcgctcggatccggcagaagcagaaagaaggcggaacatattcccctcaagacgccgaaatcattgacacaaagctcaaactcgatcaacttattactgtggctgatctcgagctaaaagatgagcgcctgacaaggttgctgtcatacagaaaatccattaagccgatcagtaagaagagtttcttacagcacgtggaggaattgtgtaccaataacaacctgaagttccaggaggaattctccgaacttccaaagttcctgcaggacctgtcctccacagacgctgatctgccttggaaccgagccaaaaaccggttccctaatataaagccttataacaataatcgggttaagctgattgctgacgcttctgtccccggcagcgactatattaacgcatcatacatcagcgggtacttatgccccaatgagtttatcgccacacagggaccgctacccggcacagtaggcgatttctggagaatggtgtgggagacaagagccaagacactggtgatgctgacacagtgtttcgagaaaggaagaatacgctgtcaccagtactggccagaggacaataagcccgtgacagtgttcggagatatcgtaatcaccaaactgatggaagacgtgcagattgattggactattagagacttgaaaattgaaaggcacggggactgcatgactgtcagacaatgtaatttcacggcctggccagaacacggagtgcctgaaaattccgctcctctcattcacttcgttaaactggtccgagccagcagagcccacgatacgacccccatgattgtacattgctcggctggagtaggacggacaggtgtcttcattgcactcgaccatctcacccaacatatcaatgatcatgactttgtagatatttacggcttagtggccgaactaagatcagaaaggatgtgcatggttcaaaatctggcacagtatatctttcttcatcagtgcatcctggatctgttatcaaacaagggctctaaccagccaatttgctttgtaaattatagcgcactacagaaaatggactcgctggatgcgatggagggagatgtggaactcgaatgggaagaaactacgatgtag

SEQ ID NO: 56902 - DNA, 6888 bp, Artificial Sequence
  derived and/or modified sequence
atggactttctgataatttttctgttactcttcatcgggaccagcgaaacccaagtcgacgtgtctaatgtcgtccctgggacccggtatgacatcacaatcagctccatctctactacctatacatcccctgtgacccgcattgtgaccactaatgtgactaagcctggcccacctgttttcctggccggagaacgcgtgggctcagccggaattttgctctcttggaatacccctccaaatccaaacggcagaatcatttcttatatcgtgaagtacaaggaggtgtgtccctggatgcaaacagtgtacactcaggtaagaagcaagcccgactcattggaagtgttgctgacaaatctcaacccgggtacaacctacgagatcaaggttataatccttaatgcaactaaagtgggctgcctgctctctcccattctgttgaacacagtcctcgaaggactggcgcgtgccataaatctcactagagaatgccagaccgtagatgcgggacagtgcgtgcagtgcgccgtgcgagaacccaaacaaggtagcacttccgggggacgggctcaaacaaataagaaaactgcagttacatcagcagacctcaaccacaccgccggagacttaaggacgggtaggctgcctccacagccattgactgcggagcagccgaactgggaagctccaccatcgcgtggaaggctgaccccccacaaagccggttactcttctgcgacagcagcaggaacacaggctaatcgggtgtggtccagacctttagctaagatccaaactactatccgggaatattataaacacctgtacgctaagaaggagggaattcttcccaactccttttacgaggcctctattattctgatccccaagccagttcccgaagggccacctcagaattgtgttacagggaacataaccggtaaatcgttctctatcctttgggacccgccaactattgtgacaggcaaattctcctacagagtcgagctctatggaccttcagggcgtatattggataacagtactaaggacttaaagtttgccttcaccaatcttactcccttcactatgtacgatgtttacattgccgcagagacttcagcagggaccggcccaaagtccaatatttccgtctttacgcccccagatgtccctggagccgtgttcgatctgcaactggctgaggtcgaatctacccaggtccggatcacctggaaaaaacccagacagcccaacggcatcatcaaccagtacagggtcaaggtactggtgcccgagaccggcatcatcctcgagaacaccctcttgaccggtaataatgaatacatcaacgaccctatggcccctgagatagtgaatatcgttgaaccgatggtcgggctctacgagggatccgctgaaatgtccagtgatctgcactcactcgctactttcatttacaatagtcaccccgataaaaacttccctgctcgcaatcgtgccgaggaccagacaagccctgtagtcacaacacggaaccagtacatcaccgacatcgccgcagagcagctcagctatgtaattcgtcgactggtgccattcactgagcacatgatctcagtctccgcctttacaattatgggagaaggccctcccaccgttttgagtgtgagaacacgccaacaggtgccttccagcattaaaattataaattacaaaaatatctcttcctcttccatcctgctgtattgggatcctcctgaataccctaatggcaaaattactcattacacaatctacgcgatggagctggacacaaatcgggcatttcaaatcacaaccatagataacagcttccttatcacagggcttaaaaagtacactaaatacaaaatgcgcgtggccgctagtacccatgtgggcgagtcaagcctgtccgaggagaatgatatattcgtaaggacatcagaggacgaaccagagtctagtccgcaggatgttgaagtgatcgacgtgacggccgacgaaattcgcctcaagtggagccctccagagaagccaaacggcataataattgcctatgaagtgctctacaagaatatcgacaccctatatatgaagaacacaagcaccaccgacatcatcctgagaaacctcagaccacataccctctataacattagtgtgcgctcctacaccagatttggtcacggaaaccaagtgagctccctcctgtcagtgcgcaccagcgagacggtaccagactccgctccagaaaacatcacatacaagaatatctcatcgggcgagatcgaactgagcttcctacccccatcaagccctaatggaattattcagaagtacacgatctaccttaaacgatcaaatggcaacgaggagcgaacaattaacaccacatcgcttactcaaaatattaaggttctgaagaaatatacacagtacatcatcgaagtgtcagcatcaactcttaagggtgaaggagtgaggtccgccccaatcagcatcctgaccgaagaggacgcccctgacagccccccacaggacttttctgttaaacagctgagcggggtgacagtcaagctaagttggcagccacccctggagcccaacgggattattctctattacactgtttatgtctggaatagatctagcctcaaaacaattaacgtgactgaaacatctttagagctgtctgacttggactacaatgtggagtattcagcctacgtgaccgctagcacgcgattcggtgacgggaagacgcggagtaacataatctcgttccaaacacctgagggagcaccgtctgacccacccaaagacgtgtattatgcaaacttgagctcaagctctattatcctgttttggactcctccttccaaacccaacggaattattcagtactactccgtatactaccgaaataccagcgggacatttatgcagaattttaccttgcatgaagtgactaatgatttcgataacatgaccgtctccactattattgataagttaaccatatttagctattataccttttggttgacagcaagcacctcggtcggtaacgggaataagtcaagcgacatcattgaagtatacacggaccaagacattcccgagggttttgtcggaaacctcacatacgagtcaatcagtagcacggccattaatgtgtcctgggtccctcctgcgcagcctaacgggctggtcttttattatgtcagcctcattctccagcagacgcccaggcatgtacggcctccacttgttacctacgagagatctatctacttcgacaatctggaaaaatacactgattacatcctgaaaatcacaccgtccacagagaagggtttcagtgacacttatacagcccagttatatatcaaaactgaggaagatgtgcccgagactagcccaatcatcaatacttttaagaatctaagctccacctccgtgctccttagttgggatccccctgttaaacccaacggcgcaatcatctcctatgacctcacactccaaggacctaatgaaaactactcatttatcacttctgataattatatcattctcgaagagctaagtcccttcaccctttactcattctttgccgcagcgcgaacacgcaaaggcttaggcccttcctccatcctgttcttttacaccgacgagtccgtaccactggctccaccccaaaacttgactctgatcaattgcacgtctgatttcgtctggctcaagtggtcaccaagccctctcccaggtggtatcgtgaaggtatatagctttaagatccacgaacatgaaacagacactatttactacaaaaacatttcaggcttcaaaacagaggctaagctggtcggcctggagcctgtttctacctatagcatcagggtcagtgcctttactaaggttgggaacggcaaccagttttctaacgttgtgaagttcaccacgcaggagtctgtgccagatgttgtgcaaaacatgcagtgcatggccacttcctggcagtcagtgctggtgaaatgggacccccctaaaaaagctaacggtattattactcagtacatggtgacagtcgagagaaatagcacaaaggtgagcccacaggaccatatgtatacctttattaaactgcttgccaacacaagttatgtcttcaaagttagagctagcacaagcgctggcgagggcgacgagtcaacatgccacgtgtccactctgcccgagacagtgccttcagtgcccaccaacatagcattctctgacgtccaatctactagtgctactttgacttggatacggcctgatactattttaggatacttccagaactataagattactacccagctgcgggcacagaagtgcaaagaatgggagtccgaagagtgcgtggaatatcagaagattcagtacctctacgaggcccatctgacggaggagacggtatacggtcttaaaaagttccgctggtaccggtttcaagtagctgcatctacgaatgccggatatggtaatgcttccaattggatatcaactaagacgttgccaggcccaccggacgggccacctgaaaatgtgcacgttgtggcaaccagccctttcagtataagcatttcctggagcgagcctgccgtgattaccggaccaacctgttatctgattgacgtaaagagcgtggataacgacgaatttaatataagcttcattaaatcaaacgaggaaaacaaaacaatcgagatcaaggatttggagatatttacccgttactctgtcgtaatcactgccttcactggcaacatatctgccgcttacgtggaaggcaagagtagcgccgaaatgattgtcaccacacttgaatctgctcctaaagacccaccgaataacatgaccttccagaagattcctgacgaagtcacaaaattccagctgacctttttgcctcccagccagcccaacggcaatattcaagtctaccaggccttggtgtaccgggaggacgatcccaccgcggtgcagatccataatctctccattatccaaaagacgaataccttcgtgatagccatgctggagggactgaaaggcggtcacacatacaatattagcgtgtacgctgtaaattctgcaggcgcaggacctaaagtgcctatgcgcatcactatggacattaaagccccagcgaggccaaaaacaaagcccactcccatttatgacgccacaggaaaacttctggtgacctccaccactattacgattaggatgccgatttgctactactcagacgaccatggcccaataaagaatgttcaagtgttagtgaccgagacaggagctcagcacgacggaaacgtaacaaaatggtatgatgcctatttcaacaaggccagaccctacttcaccaacgaggggtttccaaatcccccatgcaccgagggcaagaccaagttctcagggaatgaagaaatttatattatcggagccgataatgcttgcatgatccccggtaacgaggacaaaatctgcaatggtcctttaaagccaaaaaagcagtacctctttaagttcagagccaccaatataatgggacagttcacagactctgattactcggatccagtgaagacattgggggaaggtttatcagaaaggactgtggaaatcatactcagtgtgaccctgtgcattctgagcatcatactgttgggcacggcaatctttgcgtttgcccgaatcaggcagaaacagaaagagggaggcacatattctccccaagatgcagagattatagatactaaactgaagctggatcagctgatcactgtagccgatctcgagttgaaggatgaacgcctgactcgactgctgtcatatagaaaaagcattaaaccaatcagtaagaagtccttccttcagcatgtggaagagctatgtacgaacaacaacctgaaattccaggaagaattctccgagctccccaagttcttacaggatctctcctcaacagacgccgatctcccttggaaccgcgctaaaaacaggttccctaacatcaaaccttacaacaataaccgagtaaagctcatcgctgatgcctctgttccaggctctgattacatcaatgcctcttacatttctggctatttgtgccctaatgagtttatcgctacccaggggccattaccgggtaccgtcggagatttttggcgtatggtgtgggaaaccagagctaagaccctggtgatgctgacacagtgttttgagaagggcaggattaggtgccaccagtattggcccgaagacaataagcctgtaaccgtcttcggcgatattgtcattacaaagctaatggaggacgttcaaatcgattggactattcgggatctgaaaatagaacgacatggcgattgcatgacggttcgtcaatgtaactttaccgcatggccggagcatggggtccccgagaattctgcccctctaatccactttgtcaaactggtcagggcctctcgcgctcatgatacaactcctatgatcgtccactgcagcgctggagtgggtaggaccggcgtgttcattgcacttgaccacttgacacagcatatcaacgatcatgacttcgttgacatttatgggctcgtagcggagctccgcagtgagcgaatgtgtatggttcagaatttggctcagtatatcttcctgcatcagtgcattctcgacttattatcgaacaaaggaagtaaccagcctatttgtttcgtgaattactcagctctccaaaagatggattcccttgatgccatggagggcgacgtggagctcgagtgggaggagaccactatgtat

SEQ ID NO: 56903 - DNA, 6888 bp, Artificial Sequence
  derived and/or modified sequence
atggattttcttatcatttttcttttactttttattgggacttcagagacacaggttgatgtttccaatgtcgttcctggtactaggtacgatataaccatctcttcaatttctacaacatacacctcacctgttactagaatagtgacaacaaatgtaacaaaaccagggcctccagtcttcctagccggggaaagagtcggatctgctgggattcttctgtcttggaatacaccacctaatccaaatggaaggattatatcttacattgtcaaatataaggaagtttgtccgtggatgcaaacagtatatacacaagtcagatcaaagccagacagtctggaagttcttcttactaatcttaatcctggaacaacatatgaaattaaggtaattattttaaatgcaacaaaagtaggatgtctactctcaccaatcctattgaacacagtactggaaggcctagccagagcgatcaatctcactagggagtgccagacagtggatgcaggtcagtgcgtgcagtgcgccgtgagagagccgaagcagggctccacctctgggggcagggcacagacaaacaaaaagacagcagtaacctctgcagacttaaatcacacagctggagatctgagaacgggcagactgcctcctcaacccctgaccgccgagcagcctaactgggaggcaccccccagtagaggcagactgacacctcacaaggccgggtactcctctgccaccgctgctggtacccaggctaacagggtctggagtagacctctagcaaaaatacaaactaccatcagagaatactacaaacacctctatgcaaaaaaagagggaatcctccctaactcattttatgaggccagcatcatcctgataccaaagccggtgcctgaaggaccaccacaaaactgcgtaacaggcaacatcacaggaaagtccttttcaattttatgggacccaccaactatagtaacagggaaatttagttatagagttgaattatatggaccatcaggtcgcattttggataacagcacaaaagacctcaagtttgcattcactaacctaacaccatttacaatgtatgatgtctatattgcggctgaaaccagtgcagggactgggcccaagtcaaatatttcagtattcactccaccagatgttccaggggcagtgtttgatttacaacttgcagaggtagaatccacgcaagtaagaattacttggaagaaaccacgacaaccaaatggaattattaaccaataccgagtgaaagtgctagttccagagacaggaataattttggaaaatactttgctcactggaaataatgagtatataaatgaccccatggctccagaaattgtgaacatagtagagccaatggtaggattatatgagggttcagcagagatgtcgtctgaccttcactcacttgctacatttatatataacagccatccagataaaaactttcctgcaaggaatagagctgaagaccagacttcaccagttgtaactacaaggaatcagtatattactgacattgcagctgaacagctgtcttatgttatcaggagacttgtacctttcactgagcacatgattagtgtatctgctttcaccatcatgggagaaggaccaccaacagttctcagtgttaggacacgtcagcaagtgccaagctccattaaaattataaactataaaaatattagttcttcatctattttgttatattgggatcctccagaatatcccaatggaaaaataactcactatacgatttatgcaatggaattggatacaaacagagcattccagataactaccatagataacagctttctcataacagggttaaagaaatacacaaaatacaaaatgagagtggcagcctcaacccacgttggagaaagttctttgtctgaagaaaatgacatctttgtgagaacttcagaagatgaaccggaatcatcacctcaagatgtcgaagtaattgatgttaccgcagatgaaataaggttgaagtggtcaccacccgaaaagcccaatgggatcattattgcttatgaagtgctatataaaaatatagatactttatatatgaagaacacatcaacaacagacataatattaaggaacttaagacctcacaccctctataacatttctgtaaggtcttacaccagatttggtcatggcaatcaggtatcttctttactctctgtaaggacttcggagactgtgcctgatagtgcaccagaaaatatcacttacaaaaatatttcttctggagagattgagctatcattccttcccccaagtagtcccaatggaatcatacaaaaatatacaatttatctcaagagaagtaatggaaatgaggaaagaactataaatacaacctctttaacccaaaacattaaagtactgaagaaatatacccaatatatcattgaggtgtctgctagtacactcaaaggtgaaggagttcggagtgctcccataagtatactgacggaggaagatgctcctgattctccccctcaagacttctctgtaaaacagttgtctggtgtcacggtgaagttgtcatggcaaccacccctggagccaaatggaattatcctttattacacagtttatgtctggaatagatcatcattaaaaactattaatgtcactgaaacatcattggagttatcagatttggattataatgttgaatacagtgcttatgtaacagctagcaccagatttggtgatgggaaaacaagaagcaatatcattagctttcaaacaccagagggagcaccaagcgatcctcccaaagatgtttattatgcaaacctcagttcttcatcaataattcttttctggacacctccttcaaaacctaatgggattatacaatattactctgtttattacagaaatacttcaggtacttttatgcagaattttacactccatgaagtaaccaatgactttgacaatatgactgtatccacaattatagataaactgacaatattcagctactatacattttggttaacagcaagtacttcagttggaaatgggaataaaagcagtgacatcattgaagtatacacagatcaagacatacctgaagggtttgttggaaacctgacttacgaatccatttcgtcaactgcaataaatgtaagctgggtcccaccggctcaaccaaacggtctagtcttctactatgtttcactgatcttacagcagactcctcgccatgtgagaccacctcttgttacatatgagagaagcatatattttgataatctggaaaaatacactgattatatattaaaaattactccatcaacagaaaagggattctctgatacctatactgcccagctatacatcaagactgaagaagatgtcccagaaacttcaccaataatcaacacttttaaaaacctttcctctacctcagttctcttatcatgggatcccccagtaaagccaaatggtgcaataataagttatgatttaactttacaaggaccaaatgaaaattattctttcattacttctgataattacataatattggaagagctttcaccatttacattatatagcttttttgctgccgcaagaactagaaaaggacttggtccttccagtattcttttcttttacacagatgagtcagtgccgttagcacctccacaaaatttgactttaatcaactgtacttcagactttgtatggctgaaatggagcccaagtcctcttccaggtggtattgttaaagtatatagttttaaaattcatgaacatgaaactgacactatatattataagaatatatcaggatttaaaactgaagccaaacttgttggactggaaccagtcagcacctactctatccgtgtatctgcgttcaccaaagttggaaatggcaatcaatttagtaatgtagtaaaattcacaacccaagaatcagttccagatgtcgtgcagaatatgcagtgcatggcaactagctggcagtcagttttagtgaaatgggatccacccaaaaaggcaaatggaataataacgcagtatatggtaacagttgaaaggaattctacaaaagtttctccccaagatcacatgtacactttcataaagcttcttgccaatacctcatatgtctttaaagtaagagcttcaacctcagctggtgaaggtgatgaaagcacatgccatgtcagcacactacctgaaacagttcccagtgttcccacaaatattgctttttctgatgttcagtcaactagtgcaacattgacatggataagacctgacactatccttggctactttcaaaattacaaaattaccactcaacttcgtgctcaaaaatgcaaagaatgggaatccgaagaatgtgttgaatatcaaaaaattcaatacctctatgaagctcacttaactgaagagacagtatatggattaaagaaatttagatggtatagattccaagtggctgccagcaccaatgctggctatggcaatgcttcaaactggatttctacaaaaactctgcctggccctccagatggtcctcctgaaaatgttcatgtagtagcaacatcaccttttagcatcagcataagctggagtgaacctgctgtcattactggaccaacatgttatctgattgatgtcaaatcggtagataatgatgaatttaatatatccttcatcaagtcaaatgaagaaaataaaaccatagaaattaaagatttagaaatattcacaaggtattctgtagtgatcactgcatttactgggaacattagtgctgcatatgtagaagggaagtcaagtgctgaaatgattgttactactttagaatcagccccaaaggacccacctaacaacatgacatttcagaagataccagatgaagttacaaaatttcaattaacgttccttcctccttctcaacctaatggaaatatccaagtatatcaagctctggtttaccgagaagatgatcctactgctgtccagattcacaacctcagtattatacagaaaaccaacacattcgtcattgcaatgctagaaggactaaaaggtggacatacatacaatatcagtgtttacgcagtcaatagtgctggtgcaggtccaaaggttccgatgagaataaccatggatatcaaagctccagcacgaccaaaaaccaaaccaacccctatttatgatgccacaggaaaactgcttgtgacttcaacaacaattacaatcagaatgccaatatgttactacagtgatgatcatggaccaataaaaaatgtacaagtgcttgtgacagaaacaggagctcagcatgatggaaatgtaacaaagtggtatgatgcatattttaataaagcaaggccatattttacaaatgaaggctttcctaaccctccatgtacagaaggaaagacaaagtttagtggcaatgaagaaatctacatcataggtgctgataatgcatgcatgattcctggcaatgaagacaaaatttgcaatggaccactgaaaccaaaaaagcaatacttatttaaatttagagctacaaatattatgggacaatttactgactctgattattctgaccctgttaagactttaggggaaggactttcagaaagaaccgtagagatcattctttccgtcactttgtgtatcctttcaataattctccttggaacagctatttttgcatttgcaagaattcgacagaagcagaaagaaggtggcacatactctcctcaggatgcagaaattattgacactaaattgaagctggatcagctcatcacagtggcagacctggaactgaaggacgagagattaacgcggttacttagttatagaaaatccatcaagccaataagcaagaaatccttcctgcaacatgttgaagagctttgcacaaacaacaacctaaagtttcaagaagaattttcggaattaccaaaatttcttcaggatctttcttcaactgatgctgatctgccttggaatagagcaaaaaaccgcttcccaaacataaaaccatataataataacagagtaaagctgatagctgacgctagtgttccaggttcggattatattaatgccagctatatttctggttatttatgtccaaatgaatttattgctactcaaggtccactaccaggaacagttggagatttttggagaatggtgtgggaaaccagagcaaaaacattagtaatgctaacacagtgttttgaaaaaggacggatcagatgccatcagtattggccagaggacaacaagccagttactgtctttggagatatagtgattacaaagctaatggaggatgttcaaatagattggactatcagggatctgaaaattgaaaggcatggggattgcatgactgttcgacagtgtaactttactgcctggccagagcatggggttcctgagaacagcgcccctctaattcactttgtgaagttggttcgagcaagcagggcacatgacaccacacctatgattgttcactgcagtgctggagttggaagaactggagtttttattgctctggaccatttaacacaacatataaatgaccatgattttgtggatatatatggactagtagctgaactgagaagtgaaagaatgtgcatggtgcagaatctggcacagtatatctttttacaccagtgcattctggatctcttatcaaataagggaagtaatcagcccatctgttttgttaactattcagcacttcagaagatggactctttggacgccatggaaggtgatgttgagcttgaatgggaagaaaccactatgtaa

SEQ ID NO: 56904 - DNA, 6888 bp, Artificial Sequence
  derived and/or modified sequence
atggacttcctgatcatcttcctgctgctgttcatcggcaccagcgagacccaggtggacgtgagcaacgtggtgcccggcaccagatacgacatcaccatcagcagcatcagcaccacctacaccagccccgtgaccagaatcgtgaccaccaacgtgaccaagcccggcccccccgtgttcctggccggcgagagagtgggcagcgccggcatcctgctgagctggaacaccccccccaaccccaacggcagaatcatcagctacatcgtgaagtacaaggaggtgtgcccctggatgcagaccgtgtacacccaggtgagaagcaagcccgacagcctggaggtgctgctgaccaacctgaaccccggcaccacctacgagatcaaggtgatcatcctgaacgccaccaaggtgggctgcctgctgagccccatcctgctgaacaccgtgctggagggcctggccagagccatcaacctgaccagagagtgccagaccgtggacgccggccagtgcgtgcagtgcgccgtgagagagcccaagcagggcagcaccagcggcggcagagcccagaccaacaagaagaccgccgtgaccagcgccgacctgaaccacaccgccggcgacctgagaaccggcagactgcccccccagcccctgaccgccgagcagcccaactgggaggccccccccagcagaggcagactgaccccccacaaggccggctacagcagcgccaccgccgccggcacccaggccaacagagtgtggagcagacccctggccaagatccagaccaccatcagagagtactacaagcacctgtacgccaagaaggagggcatcctgcccaacagcttctacgaggccagcatcatcctgatccccaagcccgtgcccgagggccccccccagaactgcgtgaccggcaacatcaccggcaagagcttcagcatcctgtgggacccccccaccatcgtgaccggcaagttcagctacagagtggagctgtacggccccagcggcagaatcctggacaacagcaccaaggacctgaagttcgccttcaccaacctgacccccttcaccatgtacgacgtgtacatcgccgccgagaccagcgccggcaccggccccaagagcaacatcagcgtgttcaccccccccgacgtgcccggcgccgtgttcgacctgcagctggccgaggtggagagcacccaggtgagaatcacctggaagaagcccagacagcccaacggcatcatcaaccagtacagagtgaaggtgctggtgcccgagaccggcatcatcctggagaacaccctgctgaccggcaacaacgagtacatcaacgaccccatggcccccgagatcgtgaacatcgtggagcccatggtgggcctgtacgagggcagcgccgagatgagcagcgacctgcacagcctggccaccttcatctacaacagccaccccgacaagaacttccccgccagaaacagagccgaggaccagaccagccccgtggtgaccaccagaaaccagtacatcaccgacatcgccgccgagcagctgagctacgtgatcagaagactggtgcccttcaccgagcacatgatcagcgtgagcgccttcaccatcatgggcgagggcccccccaccgtgctgagcgtgagaaccagacagcaggtgcccagcagcatcaagatcatcaactacaagaacatcagcagcagcagcatcctgctgtactgggacccccccgagtaccccaacggcaagatcacccactacaccatctacgccatggagctggacaccaacagagccttccagatcaccaccatcgacaacagcttcctgatcaccggcctgaagaagtacaccaagtacaagatgagagtggccgccagcacccacgtgggcgagagcagcctgagcgaggagaacgacatcttcgtgagaaccagcgaggacgagcccgagagcagcccccaggacgtggaggtgatcgacgtgaccgccgacgagatcagactgaagtggagcccccccgagaagcccaacggcatcatcatcgcctacgaggtgctgtacaagaacatcgacaccctgtacatgaagaacaccagcaccaccgacatcatcctgagaaacctgagaccccacaccctgtacaacatcagcgtgagaagctacaccagattcggccacggcaaccaggtgagcagcctgctgagcgtgagaaccagcgagaccgtgcccgacagcgcccccgagaacatcacctacaagaacatcagcagcggcgagatcgagctgagcttcctgccccccagcagccccaacggcatcatccagaagtacaccatctacctgaagagaagcaacggcaacgaggagagaaccatcaacaccaccagcctgacccagaacatcaaggtgctgaagaagtacacccagtacatcatcgaggtgagcgccagcaccctgaagggcgagggcgtgagaagcgcccccatcagcatcctgaccgaggaggacgcccccgacagccccccccaggacttcagcgtgaagcagctgagcggcgtgaccgtgaagctgagctggcagccccccctggagcccaacggcatcatcctgtactacaccgtgtacgtgtggaacagaagcagcctgaagaccatcaacgtgaccgagaccagcctggagctgagcgacctggactacaacgtggagtacagcgcctacgtgaccgccagcaccagattcggcgacggcaagaccagaagcaacatcatcagcttccagacccccgagggcgcccccagcgacccccccaaggacgtgtactacgccaacctgagcagcagcagcatcatcctgttctggaccccccccagcaagcccaacggcatcatccagtactacagcgtgtactacagaaacaccagcggcaccttcatgcagaacttcaccctgcacgaggtgaccaacgacttcgacaacatgaccgtgagcaccatcatcgacaagctgaccatcttcagctactacaccttctggctgaccgccagcaccagcgtgggcaacggcaacaagagcagcgacatcatcgaggtgtacaccgaccaggacatccccgagggcttcgtgggcaacctgacctacgagagcatcagcagcaccgccatcaacgtgagctgggtgccccccgcccagcccaacggcctggtgttctactacgtgagcctgatcctgcagcagacccccagacacgtgagaccccccctggtgacctacgagagaagcatctacttcgacaacctggagaagtacaccgactacatcctgaagatcacccccagcaccgagaagggcttcagcgacacctacaccgcccagctgtacatcaagaccgaggaggacgtgcccgagaccagccccatcatcaacaccttcaagaacctgagcagcaccagcgtgctgctgagctgggacccccccgtgaagcccaacggcgccatcatcagctacgacctgaccctgcagggccccaacgagaactacagcttcatcaccagcgacaactacatcatcctggaggagctgagccccttcaccctgtacagcttcttcgccgccgccagaaccagaaagggcctgggccccagcagcatcctgttcttctacaccgacgagagcgtgcccctggcccccccccagaacctgaccctgatcaactgcaccagcgacttcgtgtggctgaagtggagccccagccccctgcccggcggcatcgtgaaggtgtacagcttcaagatccacgagcacgagaccgacaccatctactacaagaacatcagcggcttcaagaccgaggccaagctggtgggcctggagcccgtgagcacctacagcatcagagtgagcgccttcaccaaggtgggcaacggcaaccagttcagcaacgtggtgaagttcaccacccaggagagcgtgcccgacgtggtgcagaacatgcagtgcatggccaccagctggcagagcgtgctggtgaagtgggacccccccaagaaggccaacggcatcatcacccagtacatggtgaccgtggagagaaacagcaccaaggtgagcccccaggaccacatgtacaccttcatcaagctgctggccaacaccagctacgtgttcaaggtgagagccagcaccagcgccggcgagggcgacgagagcacctgccacgtgagcaccctgcccgagaccgtgcccagcgtgcccaccaacatcgccttcagcgacgtgcagagcaccagcgccaccctgacctggatcagacccgacaccatcctgggctacttccagaactacaagatcaccacccagctgagagcccagaagtgcaaggagtgggagagcgaggagtgcgtggagtaccagaagatccagtacctgtacgaggcccacctgaccgaggagaccgtgtacggcctgaagaagttcagatggtacagattccaggtggccgccagcaccaacgccggctacggcaacgccagcaactggatcagcaccaagaccctgcccggcccccccgacggcccccccgagaacgtgcacgtggtggccaccagccccttcagcatcagcatcagctggagcgagcccgccgtgatcaccggccccacctgctacctgatcgacgtgaagagcgtggacaacgacgagttcaacatcagcttcatcaagagcaacgaggagaacaagaccatcgagatcaaggacctggagatcttcaccagatacagcgtggtgatcaccgccttcaccggcaacatcagcgccgcctacgtggagggcaagagcagcgccgagatgatcgtgaccaccctggagagcgcccccaaggacccccccaacaacatgaccttccagaagatccccgacgaggtgaccaagttccagctgaccttcctgccccccagccagcccaacggcaacatccaggtgtaccaggccctggtgtacagagaggacgaccccaccgccgtgcagatccacaacctgagcatcatccagaagaccaacaccttcgtgatcgccatgctggagggcctgaagggcggccacacctacaacatcagcgtgtacgccgtgaacagcgccggcgccggccccaaggtgcccatgagaatcaccatggacatcaaggcccccgccagacccaagaccaagcccacccccatctacgacgccaccggcaagctgctggtgaccagcaccaccatcaccatcagaatgcccatctgctactacagcgacgaccacggccccatcaagaacgtgcaggtgctggtgaccgagaccggcgcccagcacgacggcaacgtgaccaagtggtacgacgcctacttcaacaaggccagaccctacttcaccaacgagggcttccccaaccccccctgcaccgagggcaagaccaagttcagcggcaacgaggagatctacatcatcggcgccgacaacgcctgcatgatccccggcaacgaggacaagatctgcaacggccccctgaagcccaagaagcagtacctgttcaagttcagagccaccaacatcatgggccagttcaccgacagcgactacagcgaccccgtgaagaccctgggcgagggcctgagcgagagaaccgtggagatcatcctgagcgtgaccctgtgcatcctgagcatcatcctgctgggcaccgccatcttcgccttcgccagaatcagacagaagcagaaggagggcggcacctacagcccccaggacgccgagatcatcgacaccaagctgaagctggaccagctgatcaccgtggccgacctggagctgaaggacgagagactgaccagactgctgagctacagaaagagcatcaagcccatcagcaagaagagcttcctgcagcacgtggaggagctgtgcaccaacaacaacctgaagttccaggaggagttcagcgagctgcccaagttcctgcaggacctgagcagcaccgacgccgacctgccctggaacagagccaagaacagattccccaacatcaagccctacaacaacaacagagtgaagctgatcgccgacgccagcgtgcccggcagcgactacatcaacgccagctacatcagcggctacctgtgccccaacgagttcatcgccacccagggccccctgcccggcaccgtgggcgacttctggagaatggtgtgggagaccagagccaagaccctggtgatgctgacccagtgcttcgagaagggcagaatcagatgccaccagtactggcccgaggacaacaagcccgtgaccgtgttcggcgacatcgtgatcaccaagctgatggaggacgtgcagatcgactggaccatcagagacctgaagatcgagagacacggcgactgcatgaccgtgagacagtgcaacttcaccgcctggcccgagcacggcgtgcccgagaacagcgcccccctgatccacttcgtgaagctggtgagagccagcagagcccacgacaccacccccatgatcgtgcactgcagcgccggcgtgggcagaaccggcgtgttcatcgccctggaccacctgacccagcacatcaacgaccacgacttcgtggacatctacggcctggtggccgagctgagaagcgagagaatgtgcatggtgcagaacctggcccagtacatcttcctgcaccagtgcatcctggacctgctgagcaacaagggcagcaaccagcccatctgcttcgtgaactacagcgccctgcagaagatggacagcctggacgccatggagggcgacgtggagctggagtgggaggagaccaccatgtag

SEQ ID NO: 56905 - protein, 414 aa, Artificial Sequence
  derived and/or modified sequence
MVFHLRTRYEQANCDCLNGGTCVSNKYFSNIHWCNCPKKFGGQHCEIDKSKTCYEGNGHFYRGKASTDTMGRPCLPWNSATVLQQTYHAHRSDALQLGLGKHNYCRNPDNRRRPWCYVQVGLKLLVQECMVHDCADGKKPSSPPEELKFQCGQKTLRPRFKIIGGEFTTIENQPWFAAIYRRHRGGSVTYVCGGSLISPCWVISATHCFIDYPKKEDYIVYLGRSRLNSNTQGEMKFEVENLILHKDYSADTLAHHNDIALLKIRSKEGRCAQPSRTIQTICLPSMYNDPQFGTSCEITGFGKENSTDYLYPEQLKMTVVKLISHRECQQPHYYGSEVTTKMLCAADPQWKTDSCQGDSGGPLVCSLQGRMTLTGIVSWGRGCALKDKPGVYTRVSHFLPWIRSHTKEENGLAL

SEQ ID NO: 56906 - DNA, 1245 bp, Artificial Sequence
  derived and/or modified sequence
atggtgttccacctgagaaccagatacgagcaggccaactgcgactgcctgaacggcggcacctgcgtgagcaacaagtacttcagcaacatccactggtgcaactgccccaagaagttcggcggccagcactgcgagatcgacaagagcaagacctgctacgagggcaacggccacttctacagaggcaaggccagcaccgacaccatgggcagaccctgcctgccctggaacagcgccaccgtgctgcagcagacctaccacgcccacagaagcgacgccctgcagctgggcctgggcaagcacaactactgcagaaaccccgacaacagaagaagaccctggtgctacgtgcaggtgggcctgaagctgctggtgcaggagtgcatggtgcacgactgcgccgacggcaagaagcccagcagcccccccgaggagctgaagttccagtgcggccagaagaccctgagacccagattcaagatcatcggcggcgagttcaccaccatcgagaaccagccctggttcgccgccatctacagaagacacagaggcggcagcgtgacctacgtgtgcggcggcagcctgatcagcccctgctgggtgatcagcgccacccactgcttcatcgactaccccaagaaggaggactacatcgtgtacctgggcagaagcagactgaacagcaacacccagggcgagatgaagttcgaggtggagaacctgatcctgcacaaggactacagcgccgacaccctggcccaccacaacgacatcgccctgctgaagatcagaagcaaggagggcagatgcgcccagcccagcagaaccatccagaccatctgcctgcccagcatgtacaacgacccccagttcggcaccagctgcgagatcaccggcttcggcaaggagaacagcaccgactacctgtaccccgagcagctgaagatgaccgtggtgaagctgatcagccacagagagtgccagcagccccactactacggcagcgaggtgaccaccaagatgctgtgcgccgccgacccccagtggaagaccgacagctgccagggcgacagcggcggccccctggtgtgcagcctgcagggcagaatgaccctgaccggcatcgtgagctggggcagaggctgcgccctgaaggacaagcccggcgtgtacaccagagtgagccacttcctgccctggatcagaagccacaccaaggaggagaacggcctggccctgtag

SEQ ID NO: 56907 - DNA, 1245 bp, Artificial Sequence
  derived and/or modified sequence
atggttttccatctgcggacccggtacgagcaagctaactgcgactgcctgaacgggggcacctgcgttagtaacaagtacttctcaaatattcattggtgcaactgccctaagaagttcgggggacagcactgcgagatcgacaagagtaaaacatgctacgagggtaacgggcatttttaccgaggtaaggccagtacagacaccatgggacgcccgtgcttaccatggaatagtgccaccgtcctgcagcaaacgtatcacgcacatagatctgatgctttacaactcggactcggcaagcacaactattgtagaaaccccgataacagacgcagaccgtggtgctacgttcaggtcggtctgaaacttcttgtgcaggagtgtatggtccatgactgtgcagatgggaagaagccttcctcacctccggaagagctaaaattccaatgcggacagaagaccctccgcccccggttcaaaataatcggcggggaatttaccactattgaaaatcagccttggtttgccgctatttatagacggcaccggggaggaagtgtcacatacgtttgcggcggcagcctcatcagcccgtgttgggttatctcggccactcactgcttcatagattatcccaaaaaagaggactacattgtctacctcggccggtcaaggctcaattccaacacacagggtgagatgaagtttgaggtggagaatctgattctccacaaggactactccgccgacaccctagcgcaccataatgacatagcactgttgaaaatccgttcgaaggagggcaggtgtgctcagccttctcgtaccattcaaacaatatgtctgccttccatgtacaatgaccctcaattcggtacctcttgtgaaataaccggatttggcaaggagaactcaaccgattacctgtacccagagcagctgaagatgacagtggtaaaactcatctcccatcgggagtgtcagcagccccactattatggaagcgaggtcaccactaaaatgctatgcgcagccgatccacagtggaagacggattcttgtcagggggactccggagggccactggtttgcagcctccagggacggatgacccttacaggcatagtgagctggggccgaggctgcgccctgaaggataagcccggcgtgtacacccgggtatctcactttctgccctggatcagaagccacacaaaagaggagaacggcctggcattgtag

SEQ ID NO: 56908 - DNA, 1245 bp, Artificial Sequence
  derived and/or modified sequence
atggtgttccacctgcggaccaggtatgagcaggccaactgtgactgcctgaatggaggcacctgtgtgagcaacaagtacttcagcaacatccactggtgcaactgccccaagaagtttggaggccagcactgtgaaattgacaagagcaagacctgctatgagggcaatggccacttctaccggggcaaggccagcacagacaccatgggccggccctgcctgccctggaacagcgccaccgtgctgcagcagacctaccacgcccacagaagtgatgccctgcagctgggcctgggcaagcacaactactgcaggaacccagacaacagaagaagaccctggtgctacgtgcaggtgggcctgaagctgctggtgcaggagtgcatggtgcatgactgtgctgatggcaagaagcccagcagccccccagaggagctgaagttccagtgtggccagaagaccctgcggccccgcttcaagatcattggaggagagttcaccaccatcgagaaccagccctggtttgctgccatctacagaagacacagaggaggctctgtgacctacgtgtgtggcggcagcctcatcagcccctgctgggtgatcagcgccacccactgcttcatcgactaccccaagaaggaggactacatcgtgtacctgggccgcagccggctgaacagcaacacccagggcgagatgaagtttgaggtggagaacctgatcctgcacaaggactacagcgctgacaccctggcccaccacaatgacatcgccctgctgaagatccgcagcaaggagggccgctgtgcccagcccagcaggaccatccagaccatctgcctgcccagcatgtacaatgacccccagtttggcaccagctgtgagatcactggatttgggaaggagaacagcacagactacctgtacccagagcagctgaagatgacagtggtgaagctgatcagccaccgggagtgccagcagccccactactacggcagcgaggtgaccaccaagatgctgtgtgccgctgacccccagtggaagacagacagctgccagggcgacagcggcggccccctggtgtgcagcctgcagggccgcatgaccctgaccggcatcgtgtcctggggccggggctgtgccctgaaggacaagccaggagtgtacaccagggtgagccacttcctgccctggatccgcagccacaccaaggaggagaatggcctggccctgtag

SEQ ID NO: 56909 - DNA, 1245 bp, Artificial Sequence
  derived and/or modified sequence
atggtgttccacctgcggacccggtacgagcaggccaactgcgactgtctgaatggagggacatgcgtgtctaacaagtatttttcaaacatccactggtgcaattgccccaagaaatttgggggccagcactgtgagattgataagtctaaaacctgttatgaaggaaatgggcacttctatcgaggcaaggcctcgaccgatactatggggcggccgtgcttgccctggaacagcgccacggttctgcagcagacctatcacgcccaccgaagtgacgctctccagttgggactggggaaacacaattattgccggaatcctgataaccgaagaagaccttggtgctatgtgcaggttggacttaaactcctggtccaggagtgcatggtacacgactgcgctgatggaaagaaaccgagctccccgcctgaggaactgaaatttcagtgtggacaaaaaaccctgaggccacgctttaaaattatcgggggtgagttcacgaccattgagaaccagccgtggtttgccgctatttaccgccggcatagaggagggtccgtgacctatgtttgtgggggtagtctgatttccccgtgttgggttattagtgccactcactgcttcattgattaccccaagaaagaggattatatcgtgtacctgggccgatcccgccttaactccaacacacaaggggaaatgaagttcgaggtcgaaaacttgatcctacacaaagactactctgccgataccttagctcaccacaacgatattgcgcttcttaaaatccggtccaaagaaggtcggtgtgcccagccttctcgcactatccaaactatttgcctccccagtatgtacaacgatccccagttcgggacgagctgcgagattacgggtttcggaaaagaaaatagcaccgattatctgtacccagaacagttaaaaatgaccgtggttaagctcatttcgcacagagagtgtcagcagccccactattatgggagcgaggtcactactaagatgctgtgtgcagccgatccacagtggaaaacagattcatgccagggcgattccggaggaccacttgtctgtagcttgcaaggtcgaatgactctcacaggtatcgtcagttggggccggggttgcgcccttaaagataaacccggggtatacacccgtgtgtcacacttcctgccttggatccgctctcatacaaaagaagagaacgggctggctttatag

SEQ ID NO: 56910 - DNA, 1245 bp, Artificial Sequence
  derived and/or modified sequence
atggtttttcatttaagaactaggtacgaacaggcaaattgcgactgcctaaatggtggcacctgcgtctctaataaatatttttccaacatccactggtgtaactgtcccaaaaaatttggcggacagcactgcgagatcgacaagagcaagacctgttatgaaggcaacggtcatttctaccgaggaaaagcttctaccgacactatgggccgaccttgtttaccctggaacagcgcaactgtactgcagcagacctatcacgcacataggagtgatgcactgcagctcggcctgggaaagcacaactattgcagaaaccctgacaacaggaggagaccatggtgttatgtgcaggtcggactcaagcttttggtgcaggagtgtatggtacatgactgtgccgacgggaagaagccgagctcccctccagaggaactgaagttccagtgtggccagaaaacattgcgaccgagattcaagatcatcggcggagagttcaccacaatagagaatcaaccctggtttgcggctatctataggcgacataggggagggagcgtgacctacgtatgcggcggatccttgatcagcccttgctgggtaattagtgctacacactgttttattgattatcccaaaaaggaggactatatagtgtatctgggtcgaagccgactgaacagcaacacccagggggagatgaagtttgaggtggagaacttgatcttacataaggattacagcgctgatacgcttgcacaccataacgatattgctctgctgaagatccgaagtaaagaaggcagatgtgcccagccttcccggaccattcagaccatttgtcttccgagcatgtataacgatccccagtttggcaccagctgtgagatcacaggtttcggaaaggaaaatagcactgactacctgtatccagagcaacttaaaatgacagtggttaagttgatctctcaccgtgagtgtcagcagccgcattattacggatccgaggttacaaccaagatgctttgtgctgcagacccccagtggaaaactgacagctgtcagggcgactctggaggcccactcgtctgttcgctgcaaggcaggatgactctgacaggaatcgtgtcgtgggggagagggtgtgcgttgaaggacaaacccggtgtctacacgagagtcagccatttcctcccttggatccgatcccacaccaaggaagaaaacggactggcgttgtag

SEQ ID NO: 56911 - DNA, 2658 bp, Artificial Sequence
  derived and/or modified sequence
atatagagcaggcgccgcgggtcgcagcacagtgcggagaccgcagccccggagcccgggccagggtccacctgtccccgcagcgccggctcgcgccctcctgccgcagccaccgagccgccgtctagcgccccgacctcgccaccatgagagccctgctggcgcgcctgcttctctgcgtcctggtcgtgagcgactccaaagtgagtgcgctcttgctttgactgatgctgcccaaggacctctgatcagcaccaggggagaggaggggctgctcagggagctggggtcctccggattccatccacagcagggccagactctccccaggaaatgggacagggtggcagcggaggcttgagaaccacgggggttggcactggctggcaagggaggaagaggccgccgggactgccccagcctgcgggcatctggtagatgaagcttgcttgggtcaatccatttctcctggctggaaacccatggtcttccatttgagaactagatacgaacaggcgaactgtgactgtctaaatggaggaacatgtgtgtccaacaagtacttctccaacattcactggtgcaactgcccaaagaaattcggagggcagcactgtgaaatagataagtcaaaaacctgctatgaggggaatggtcacttttaccgaggaaaggccagcactgacaccatgggccggccctgcctgccctggaactctgccactgtccttcagcaaacgtaccatgcccacagatctgatgctcttcagctgggcctggggaaacataattactgcaggaacccagacaaccggaggcgaccctggtgctatgtgcaggtgggcctaaagctgcttgtccaagagtgcatggtgcatgactgcgcagatggaaaaaagccctcctctcctccagaagaattaaaatttcagtgtggccaaaagactctgaggccccgctttaagattattgggggagaattcaccaccatcgagaaccagccctggtttgcggccatctacaggaggcaccgggggggctctgtcacctacgtgtgtggaggcagcctcatcagcccttgctgggtgatcagcgccacacactgcttcattgattacccaaagaaggaggactacatcgtctacctgggtcgctcaaggcttaactccaacacgcaaggggagatgaagtttgaggtggaaaacctcatcctacacaaggactacagcgctgacacgcttgctcaccacaacgacattgccttgctgaagatccgttccaaggagggcaggtgtgcgcagccatcccggactatacagaccatctgcctgccctcgatgtataacgatccccagtttggcacaagctgtgagatcactggctttggaaaagagaattctaccgactatctctatccggagcagctgaaaatgactgttgtgaagctgatttcccaccgggagtgtcagcagccccactactacggctctgaagtcaccaccaaaatgctgtgtgctgctgacccacagtggaaaacagattcctgccagggagactcagggggacccctcgtctgttccctccaaggccgcatgactttgactggaattgtgagctggggccgtggatgtgccctgaaggacaagccaggcgtctacacgagagtctcacacttcttaccctggatccgcagtcacaccaaggaagagaatggcctggccctctgagggtccccagggaggaaacgggcaccacccgctttcttgctggttgtcatttttgcagtagagtcatctccatcagctgtaagaagagactgggaagataggctctgcacagatggatttgcctgtgccacccaccagggcgaacgacaatagctttaccctcaggcataggcctgggtgctggctgcccagacccctctggccaggatggaggggtggtcctgactcaacatgttactgaccagcaacttgtctttttctggactgaagcctgcaggagttaaaaagggcagggcatctcctgtgcatgggtgaagggagagccagctcccccgacggtgggcatttgtgaggcccatggttgagaaatgaataatttcccaattaggaagtgtaacagctgaggtctcttgagggagcttagccaatgtgggagcagcggtttggggagcagagacactaacgacttcagggcagggctctgatattccatgaatgtatcaggaaatatatatgtgtgtgtatgtttgcacacttgtgtgtgggctgtgagtgtaagtgtgagtaagagctggtgtctgattgttaagtctaaatatttccttaaactgtgtggactgtgatgccacacagagtggtctttctggagaggttataggtcactcctggggcctcttgggtcccccacgtgacagtgcctgggaatgtattattctgcagcatgacctgtgaccagcactgtctcagtttcactttcacatagatgtccctttcttggccagttatcccttccttttagcctagttcatccaatcctcactgggtggggtgaggaccactcctgtacactgaatatttatatttcactatttttatttatatttttgtaattttaaataaaagtgatcaataaaatgtgatttttctgatg

SEQ ID NO: 56912 - protein, 737 aa, Artificial Sequence
  derived and/or modified sequence
MEKSRMNLPKGPDTLCFDKDEFMKEDFDVDHFVSDCRKRVQLEELRDDLELYYKLLKTAMVELINKDYADFVNLSTNLVGMDKALNQLSVPLGQLREEVLSLRSSVSEGIRAVDERMSKQEDIRKKKMCVLRLIQVIRSVEKIEKILNSQSSKETSALEASSPLLTGQILERIATEFNQLQFHAVQSKGMPLLDKVRPRIAGITAMLQQSLEGLLLEGLQTSDVDIIRHCLRTYATIDKTRDAEALVGQVLVKPYIDEVIIEQFVESHPNGLQVMYNKLLEFVPHHCRLLREVTGGAISSEKGNTVPGYDFLVNSVWPQIVQGLEEKLPSLFNPGNPDAFHEKYTISMDFVRRLERQCGSQASVKRLRAHPAYHSFNKKWNLPVYFQIRFREIAGSLEAALTDVLEDAPAESPYCLLASHRTWSSLRRCWSDEMFLPLLVHRLWRLTLQILARYSVFVNELSLRPISNESPKEIKKPLVTGSKEPSITQGNTEDQGSGPSETKPVVSISRTQLVYVVADLDKLQEQLPELLEIIKPKLEMIGFKNFSSISALEDSQSSFSACVPSLSSKIIQDLSDSCFGFLKSALEVPRLYRRTNKEVPTTASSYVDSALKPLFQLQSGHKDKLKQAIIQQWLEGTLSESTHKYYETVSDVLNSVKKMEESLKRLKQARKTTPANPVGPSGGMSDDDKIRLQLALDVEYLGEQIQKLGLQASDIKSFSALAELVAAAKDQATAEQP

SEQ ID NO: 56913 - DNA, 2214 bp, Artificial Sequence
  derived and/or modified sequence
atggagaagagtaggatgaatctacctaagggccccgatactctgtgttttgacaaggacgaatttatgaaagaagatttcgatgtggaccattttgtctctgactgccgtaaacgcgtgcagctggaagaactgcgcgacgatttagagctgtattacaagttgctgaaaactgcgatggtagaactgattaacaaagactacgcagattttgtgaatctctccaccaatctcgtgggaatggacaaagccctcaatcagttgtctgtgccactggggcagctccgggaagaagtgctctcactgcggagctccgtaagcgaggggatccgcgcagtagatgagcgcatgtccaaacaagaggacattaggaagaaaaagatgtgtgtgctacgcctcatccaagtgatccgttcagtggaaaaaattgagaaaatactgaacagccaaagttccaaggagaccagtgctctggaggccagctctcctttactgaccgggcagattctggagcggatagcaaccgagttcaaccagctgcaattccacgccgtgcaatctaagggaatgcctttactcgacaaagtgaggcctagaatcgcaggcataactgccatgctgcagcagagccttgagggtctgcttctggaaggtctccaaacgagtgatgttgacattatacgccattgcctccggacatacgcaacgatcgataagactagggatgcggaggcccttgttgggcaggtccttgtcaagccctacatagatgaagtaatcattgagcagttcgtggaatcccacccaaatggactgcaagtgatgtacaacaaactgctggagtttgtcccgcaccactgccgcctgctgcgggaggttaccggaggagctatcagctccgagaaaggcaatacagtgcctggatatgactttctagttaattccgtgtggccccagatagtgcagggattggaggagaaactgccgtccctgtttaatcccggcaacccggatgcctttcacgaaaaatacactattagcatggacttcgtgcgtagacttgaaaggcagtgtggtagccaggcatctgtcaagaggctgcgggctcatcccgcctaccattctttcaacaaaaaatggaatctacctgtgtacttccaaatcagattccgggagatagccggtagcctggaggctgccctgaccgacgtattggaagatgcgccagcagagtcgccctactgcctcctcgccagtcatcggacctggagctctctcagacggtgctggagcgacgaaatgtttctccccctacttgtccacaggctctggcgccttacactccaaatcctggctaggtattccgtgttcgtcaatgagctctcacttcgaccaatctcaaacgaatcacccaaggagattaaaaaacccctggtcacagggtctaaagagccttcaatcactcagggaaatacggaggatcaagggtcgggtcctagcgaaaccaaaccagttgtgagtatctctcggacccagctggtttacgtggtggccgaccttgataaattgcaagaacagctgccggaattactggagatcattaagcctaagcttgaaatgatcgggttcaaaaacttcagcagtatctctgccctagaagattctcaaagcagcttctccgcctgtgtccctagtctgagcagcaaaataatacaggatctgagcgatagttgcttcgggttccttaagagcgctctggaagtgccacgcctgtaccgccgcacaaacaaagaggtgcctactacggcatcttcctacgtggacagcgctttaaagcccctgttccagttgcagagtggccataaagataagctcaaacaggcaatcatacaacagtggcttgaaggcaccctcagcgagagtacccacaaatattatgagaccgtttctgatgttttgaactcagttaaaaagatggaggagtctttgaagagactgaaacaggccaggaagaccacacctgctaatccagtagggccatccggcggcatgagtgatgacgataaaataagactacaactcgctctggacgtggagtacctgggagaacagatccagaaactaggtctgcaggcatcggacatcaaaagcttctctgctctagcggaactggtggcggcggccaaggatcaggcgaccgccgaacagccttag

SEQ ID NO: 56914 - DNA, 2214 bp, Artificial Sequence
  derived and/or modified sequence
atggagaagagcaggatgaacctgcccaagggccctgacaccctgtgctttgacaaggatgagttcatgaaggaggactttgatgtggaccactttgtgtctgactgcaggaagagggtgcagctggaggagctgagagatgacctggagctgtactacaagctgctgaagacagccatggtggagctgatcaacaaggactatgctgactttgtgaacctgagcaccaacctggtgggcatggacaaggccctgaaccagctgtctgtgcccctgggccagctgcgggaggaggtgctgagcctgcggagctctgtgtctgagggcatccgggctgtggatgagaggatgagcaagcaggaggacatcaggaagaagaagatgtgtgtgctgcggctcatccaggtgatccgctctgtggagaagattgagaagatcctgaacagccagagcagcaaggagaccagcgccctggaggccagcagccccctgctgaccggccagatcctggagagaattgccacagagttcaaccagctgcagttccacgctgtgcagagcaagggcatgcccctgctggacaaggtgcggcccagaattgctggcatcacagccatgctgcagcagagcctggagggcctgctgctggagggcctgcagaccagtgatgtggacatcatccgccactgcctgcggacctacgccaccatcgacaagaccagagatgctgaggccctggtgggccaggtgctggtgaagccctacattgatgaagtcatcatcgagcagtttgtggagagccaccccaacggcctgcaggtgatgtacaacaagctgctggagtttgtgccccaccactgccgcctgctgcgggaggtgactggaggagccatcagcagcgagaagggcaacacagtgcccggctatgacttcctggtgaacagcgtgtggccccagatcgtgcagggcctggaggagaagctgcccagcctcttcaaccctggcaacccagatgccttccacgagaagtacaccatctccatggactttgtgcggcggctggagcggcagtgtggcagccaggcctctgtgaagaggctgcgggcccacccagcctaccacagcttcaacaagaagtggaacctgcctgtgtacttccagatccgcttccgggagattgctggcagcctggaggccgccctgacagatgtgctggaggatgccccagctgagagcccctactgcctgctggccagccacaggacctggagcagcctgcggcgctgctggagcgatgagatgttcctgcccctgctggtgcaccggctgtggaggctgaccctgcagatcctggcccgctacagcgtgtttgtgaatgagctgagcctgcggcccatcagcaatgaaagccccaaggagatcaagaagcccctggtgacaggcagcaaggagcccagcatcacccagggcaacacagaggaccagggcagcggccccagcgagaccaagcctgtggtgtccatcagcaggacccagctggtgtatgtggtggccgacctggacaagctgcaggagcagctgcctgagctgctggagatcatcaagcccaagctggagatgattggcttcaagaacttcagcagcatcagcgccctggaggacagccagagcagcttcagcgcctgtgtgcccagcctgagcagcaagatcatccaggacctgagtgacagctgcttcggcttcctgaagagcgccctggaggtgccccggctgtacagaaggaccaacaaggaggtgcccaccacagccagcagctatgtggacagcgccctgaagcccctcttccagctgcagagcggccacaaggacaagctgaagcaggccatcatccagcagtggctggagggcaccctgtctgagagcacccacaagtactatgagaccgtgtctgatgtgctgaacagcgtgaagaagatggaggagagcctgaagaggctgaagcaggccaggaagaccaccccagccaaccctgtgggccccagcggcggcatgtctgatgatgacaagatccggctgcagctggccctggatgtggagtacctgggggagcagatccagaagctgggcctgcaggccagtgacatcaagagcttcagcgccctggccgagctggtggccgccgccaaggaccaggccacagctgagcagccctag

SEQ ID NO: 56915 - DNA, 2214 bp, Artificial Sequence
  derived and/or modified sequence
atggagaagagccggatgaacctgcccaagggccccgacaccctgtgcttcgataaggacgaatttatgaaggaggactttgatgtcgaccatttcgtgtccgattgtcgcaagcgagtgcagctggaggagttgcgcgatgatctcgagctctactacaagctgctcaagactgcaatggtggagctcatcaacaaggattatgccgatttcgtaaatctaagcactaatctcgtgggaatggataaggccttaaatcagttgtctgttcctctgggtcagcttagggaagaagtgctcagtttgcgaagtagcgtcagcgaggggattcgcgctgtggatgagagaatgtccaagcaagaggatatacggaagaagaagatgtgcgtgctacgccttattcaggttattaggtccgtggaaaaaattgaaaagatactgaactctcagagctctaaagagactagtgcccttgaagcctcttctccattgttgaccggacagattctggagagaattgccaccgagttcaatcagctccaatttcatgccgttcaaagcaaaggcatgcccctgctcgataaggtcagaccaagaattgcaggtattacggctatgctgcagcagtccctagagggtctgctgctggaggggctccagacatctgacgtagacataatccgacattgccttcgtacatatgcaacgatcgacaagacaagggatgccgaagccctggttgggcaggtcctcgtgaagccttacatcgacgaggttataatcgagcagtttgtagaatcacatcccaacggactccaggttatgtataacaaattgctcgaattcgttccccatcactgtcgcctgttacgcgaagtgacaggcggcgcgatatcctctgaaaagggcaataccgtacccggttacgactttctcgtgaactctgtgtggccccagatagttcagggcctggaggaaaagctgccgagtctgttcaaccccggaaatcccgacgcgttccacgaaaagtatacgatctccatggatttcgtgcggcgattggagcgacaatgtggttcccaggcaagcgtgaagaggctgcgtgcgcatcctgcctaccattcattcaacaagaaatggaatctacctgtgtattttcagatcaggtttcgggaaattgctgggtcattagaggcggctctcactgatgttcttgaagacgccccggccgagtcgccctactgcctgctggcctctcatagaacgtggtcctccctgaggaggtgttggtccgatgaaatgttcctgcctctgctggtgcatcggctctggagactaacactgcagatccttgctagatacagtgtcttcgtcaatgaactctctctgaggcccatctctaacgaatcaccgaaagaaatcaaaaagccactggtgactgggtctaaggagcccagcattactcaagggaacactgaagatcaggggtccggaccgtctgagactaagcccgtcgtgtccatttctaggacgcaactggtgtatgtggttgccgacctggataagctccaggagcagctgcctgagcttctggagatcattaaaccaaagctcgagatgattggcttcaaaaatttctcatcaatttctgccctggaggatagccagagtagtttttctgcgtgtgtgccctcgctgtctagtaagattattcaagacctctcagatagttgttttgggttcttgaaaagcgccctggaagtgcccaggttataccgtcggaccaataaggaggtgccaactaccgccagctcctatgttgatagtgcactcaagccgctcttccagctacagtcagggcataaagacaagctgaagcaagctattattcaacaatggctggaggggacactgagtgagtcaacccataagtattacgagaccgtgtccgatgtactaaattcagtgaaaaaaatggaagagtcccttaagcggctcaaacaggccaggaaaaccaccccagctaaccctgttggcccatcaggaggcatgtcggacgacgataagatccggctgcagctggccctcgacgtggagtatctgggagaacagatccagaaactgggactgcaggcaagcgatatcaaaagcttctccgcattggccgaacttgtggccgctgccaaagaccaggccacagcggagcagccttag

SEQ ID NO: 56916 - DNA, 2214 bp, Artificial Sequence
  derived and/or modified sequence
atggagaaaagcaggatgaacctgcccaaggggccagacacgctgtgcttcgataaggatgagttcatgaaggaggatttcgatgtcgatcactttgtgtccgactgtcggaaacgcgtgcagctcgaagagttgagagatgaccttgagctgtactataagttgctcaagacggccatggtggagctgatcaataaggactatgcagattttgtaaacctgtctactaatctggtcggaatggacaaggctcttaaccagctttccgtacccctgggccaattaagggaagaagtcctctctctgaggagtagcgtgtcagaggggattcgcgctgtcgatgagcgtatgtcaaagcaggaagacataagaaagaagaaaatgtgcgtcctgcgattaatccaggtgattaggtcggtggagaagattgagaagattctgaatagccagtcaagcaaagaaacatctgcccttgaagccagctcacccctgctcactgggcaaattctggaaaggattgctaccgagtttaatcagctacaattccacgctgtgcagagcaaggggatgcccttgctcgataaggtccgaccccgtattgccggtatcactgcaatgctgcagcagagccttgaaggtctgcttctggaaggtttgcagacctccgacgtcgacatcatccgccattgtctgaggacctacgccacaatcgataagaccagggacgcagaagcactggtgggccaggtgctcgtaaaaccatatattgatgaggtgattatcgaacagttcgtggagtctcatcctaatggcttacaagtgatgtacaacaagctcctggagtttgtgccccatcattgccggctgctgagagaggtgacaggcggtgcgatttcctctgaaaaaggcaatacagtgcccggatacgacttcttggttaattccgtgtggcctcagatcgtccagggccttgaagagaagctgccctcgctctttaatcctgggaaccctgacgcattccatgagaagtatacaataagtatggatttcgtgcggaggttggagcgccagtgcggcagccaggcaagtgtgaagcgactgcgagcacaccctgcataccactccttcaacaaaaagtggaacctgcccgtgtatttccagattcgttttcgagagatcgctggatctttagaagccgctctgaccgacgtccttgaagacgccccagctgagtccccttattgtctgttagcgagtcatcgcacctggagttccttgcgcaggtgttggtcagatgagatgttcttgccactgttggtccatcgcttgtggcggctgacgttacagatcctagcccgttactctgtgtttgttaacgagctaagcctccgccctatttcaaacgaatcccctaaagaaatcaaaaagccccttgtcaccggatctaaggaaccatccatcacacagggcaatactgaggatcaagggtccggaccctccgaaacgaagcctgtcgttagcatcagcaggactcagcttgtctatgtcgtcgccgacttggacaaactgcaggaacagctgccggagttactggagatcatcaaacccaaattagagatgattgggtttaagaactttagctccataagcgccctcgaggactcccagtcctcgttctctgcgtgcgttccttcactcagctccaaaataatccaggatctgtcagattcctgctttggatttcttaagtccgctctggaggtccccagactctacaggcggacaaataaggaggttccaacgactgcatcttcctacgtcgacagtgcacttaaacccctgtttcagttgcagtccgggcacaaggataagctgaagcaggcaattatccaacaatggttagagggcactctgagtgaatcaacccacaaatactatgaaacagtgagcgatgtgctgaactcagtgaaaaagatggaagagtccctgaagcgtcttaaacaagcacggaaaacaacccccgcaaatcctgttggtccaagcgggggaatgtctgacgacgataagatcagattacagctcgcactggacgtggagtacctgggagagcagatccagaagcttggactccaggcctccgatatcaagtccttctcggcccttgcagagctggtggctgccgctaaggaccaggccactgcagaacagccgtag

SEQ ID NO: 56917 - DNA, 2843 bp, Artificial Sequence
  derived and/or modified sequence
ctcgcttggatcttggcactgagaggcggtggccggcgggatggagaaaagtaggatgaacctgcccaaggggccggacacgctctgcttcgacaaggacgagttcatgaaggaagatttcgatgtcgatcattttgtgtctgactgtaggaagcgggtccagctggaagaactgagagatgacctggagctctactataaacttcttaaaacagccatggtcgaactcatcaacaaggattatgcagattttgtcaatctttcaacaaacttggttggcatggacaaagccctcaaccagctttctgtgcctttgggacaattacgagaagaggttctgagccttagatcgtctgtcagtgaaggaattcgggcagttgatgaacgaatgtctaaacaagaggacattaggaaaaaaaagatgtgtgtattgaggcttatacaagttattcggtcagttgagaaaattgaaaaaatcttaaactctcaaagttctaaagaaacctctgcactagaagcaagcagcccccttttgactggacaaattttggagagaattgccacagaatttaatcagttacagtttcatgctgttcaaagcaaaggcatgcctcttttggacaaagtaagaccgcgtatagctggcattacagccatgttacagcagtcactggaaggtctcctattagaaggccttcagacgtctgacgtcgatataatacggcactgcttgcggacttacgccacgattgacaagacacgggacgcggaggccttagttggccaagtactagtgaaaccatacatagacgaggtgattatagagcagtttgttgaatctcatcccaatggccttcaggtcatgtataataaactcctggagtttgttcctcaccattgccgccttcttcgagaagtcacaggaggtgccatctccagtgaaaaaggcaatactgttcctggatatgactttttggtgaattctgtttggccacaaatagtacaaggattagaagaaaagttaccctcgctttttaatcctgggaatcccgatgcatttcatgagaaatataccataagtatggattttgtcagaagattggaacggcagtgtggatcacaggctagtgtaaagagattaagagcccatcctgcctatcacagcttcaataagaagtggaacttgcctgtttattttcaaataagatttagagaaatagcgggatccttagaagcagcacttacagatgtcctggaagatgccccagctgaaagtccgtattgccttttggcttctcatagaacttggagcagccttaggaggtgttggtcagatgagatgttcttgccattactggtgcatcgcctgtggagactcactctgcagattttggcacgatactctgtgtttgtcaatgagctttcactcaggcccatttctaatgaaagtcccaaggagatcaagaaacctttggtaactggtagcaaagaaccttccatcacccaaggaaacactgaagaccaaggaagtggtccttcggaaacaaagcctgtggtttccatttcccgcactcagctcgtgtatgtggttgcagacctggacaagcttcaggagcagcttccagaactcttggaaataatcaagccaaaacttgaaatgattggctttaagaatttttcttctatctcagccctggaggactcccagagctctttttcagcctgtgtgccctccttgagtagcaagatcatccaggatttaagtgactcttgcttcggtttcctaaaaagcgccctggaggttcccaggctttaccgaagaaccaataaggaggtcccaaccacagcttcctcctatgtggacagtgctctgaagcccttattccagcttcagagcggacacaaggataagctcaaacaagcaataattcagcagtggctagaaggcactctcagtgaaagcactcataagtactatgaaaccgtgtcagatgtattaaactctgtgaagaagatggaagagagcctgaaaaggctgaaacaagccagaaaaaccactcccgccaaccccgtcggtcccagtggtggcatgagcgacgacgacaaaatcaggctgcagttggccctagatgttgagtacttgggagagcagatacaaaagttgggactacaagcaagtgacataaaaagcttctcagctctcgcagagcttgttgctgctgccaaggaccaggcaacagcagagcagccttaagcatcttggaagatcccgaggttagattcttaagcaagagaagagttggacttccaggctgaaggggagaaagtgactctgttctcttagcaaccgtctgtagcaaagaagtgcttccagcatcactccagcaacacgcccatgcgtcttctctcagcgtatttgggtcttctttgcccaaaagaacacaaaagcctttttccattgtatggaagatagtttttaagacatttgaaactttctactatagtttacagaacaaattattttatttttattgtaaatcttagtgtggaagagctgatttctaaaatatgattaaagtaaatatatacctatgaatatcaagagtcgtctccctgagcctgtagttggaagtgacgactgtaatggaatgatgtcttgtatagaaatgcccttctctgaaataaagagaactcctgggctttctaaagaggctgcgggaagccatcctccactcccactgtgtgtgagagcagtgcttctgatcctgctgtcaccccgacctctggcaggagccggcgccagtaggaaagacctccttcctaaataaaagaagtgtctccca

SEQ ID NO: 56918 - DNA, 2214 bp, Artificial Sequence
  derived and/or modified sequence
atggagaagagcagaatgaacctgcccaagggccccgacaccctgtgcttcgacaaggacgagttcatgaaggaggacttcgacgtggaccacttcgtgagcgactgcagaaagagagtgcagctggaggagctgagagacgacctggagctgtactacaagctgctgaagaccgccatggtggagctgatcaacaaggactacgccgacttcgtgaacctgagcaccaacctggtgggcatggacaaggccctgaaccagctgagcgtgcccctgggccagctgagagaggaggtgctgagcctgagaagcagcgtgagcgagggcatcagagccgtggacgagagaatgagcaagcaggaggacatcagaaagaagaagatgtgcgtgctgagactgatccaggtgatcagaagcgtggagaagatcgagaagatcctgaacagccagagcagcaaggagaccagcgccctggaggccagcagccccctgctgaccggccagatcctggagagaatcgccaccgagttcaaccagctgcagttccacgccgtgcagagcaagggcatgcccctgctggacaaggtgagacccagaatcgccggcatcaccgccatgctgcagcagagcctggagggcctgctgctggagggcctgcagaccagcgacgtggacatcatcagacactgcctgagaacctacgccaccatcgacaagaccagagacgccgaggccctggtgggccaggtgctggtgaagccctacatcgacgaggtgatcatcgagcagttcgtggagagccaccccaacggcctgcaggtgatgtacaacaagctgctggagttcgtgccccaccactgcagactgctgagagaggtgaccggcggcgccatcagcagcgagaagggcaacaccgtgcccggctacgacttcctggtgaacagcgtgtggccccagatcgtgcagggcctggaggagaagctgcccagcctgttcaaccccggcaaccccgacgccttccacgagaagtacaccatcagcatggacttcgtgagaagactggagagacagtgcggcagccaggccagcgtgaagagactgagagcccaccccgcctaccacagcttcaacaagaagtggaacctgcccgtgtacttccagatcagattcagagagatcgccggcagcctggaggccgccctgaccgacgtgctggaggacgcccccgccgagagcccctactgcctgctggccagccacagaacctggagcagcctgagaagatgctggagcgacgagatgttcctgcccctgctggtgcacagactgtggagactgaccctgcagatcctggccagatacagcgtgttcgtgaacgagctgagcctgagacccatcagcaacgagagccccaaggagatcaagaagcccctggtgaccggcagcaaggagcccagcatcacccagggcaacaccgaggaccagggcagcggccccagcgagaccaagcccgtggtgagcatcagcagaacccagctggtgtacgtggtggccgacctggacaagctgcaggagcagctgcccgagctgctggagatcatcaagcccaagctggagatgatcggcttcaagaacttcagcagcatcagcgccctggaggacagccagagcagcttcagcgcctgcgtgcccagcctgagcagcaagatcatccaggacctgagcgacagctgcttcggcttcctgaagagcgccctggaggtgcccagactgtacagaagaaccaacaaggaggtgcccaccaccgccagcagctacgtggacagcgccctgaagcccctgttccagctgcagagcggccacaaggacaagctgaagcaggccatcatccagcagtggctggagggcaccctgagcgagagcacccacaagtactacgagaccgtgagcgacgtgctgaacagcgtgaagaagatggaggagagcctgaagagactgaagcaggccagaaagaccacccccgccaaccccgtgggccccagcggcggcatgagcgacgacgacaagatcagactgcagctggccctggacgtggagtacctgggcgagcagatccagaagctgggcctgcaggccagcgacatcaagagcttcagcgccctggccgagctggtggccgccgccaaggaccaggccaccgccgagcagccctag

SEQ ID NO: 56919 - protein, 692 aa, Artificial Sequence
  derived and/or modified sequence
MQGKKPGGSSGGGRSGELQGDEAQRNKKKKKKVSCFSNIKIFLVSECALMLAQGTVGAYLVSVLTTLERRFNLQSADVGVIASSFEIGNLALILFVSYFGARGHRPRLIGCGGIVMALGALLSALPEFLTHQYKYEAGEIRWGAEGRDVCAANGSGGDEGPDPDLICRNRTATNMMYLLLIGAQVLLGIGATPVQPLGVSYIDDHVRRKDSSLYIGILFTMLVFGPACGFILGSFCTKIYVDAVFIDTSNLDITPDDPRWIGAWWGGFLLCGALLFFSSLLMFGFPQSLPPHSEPAMESEQAMLSEREYERPKPSNGVLRHPLEPDSSASCFQQLRVIPKVTKHLLSNPVFTCIILAACMEIAVVAGFAAFLGKYLEQQFNLTTSSANQLLGMTAIPCACLGIFLGGLLVKKLSLSALGAIRMAMLVNLVSTACYVSFLFLGCDTGPVAGVTVPYGNSTAPGSALDPYSPCNNNCECQTDSFTPVCGADGITYLSACFAGCNSTNLTGCACLTTVPAENATVVPGKCPSPGCQEAFLTFLCVMCICSLIGAMAQTPSVIILIRTVSPELKSYALGVLFLLLRLLGFIPPPLIFGAGIDSTCLFWSTFCGEQGACVLYDNVVYRYLYVSIAIALKSFAFILYTTTWQCLRKNYKRYIKNHEGGLSTSTEYQDIETEKTCPESHSPSEDSFVRS

SEQ ID NO: 56920 - DNA, 2079 bp, Artificial Sequence
  derived and/or modified sequence
atgcagggcaagaagcccggcggcagcagcggcggcggcagaagcggcgagctgcagggcgacgaggcccagagaaacaagaagaagaagaagaaggtgagctgcttcagcaacatcaagatcttcctggtgagcgagtgcgccctgatgctggcccagggcaccgtgggcgcctacctggtgagcgtgctgaccaccctggagagaagattcaacctgcagagcgccgacgtgggcgtgatcgccagcagcttcgagatcggcaacctggccctgatcctgttcgtgagctacttcggcgccagaggccacagacccagactgatcggctgcggcggcatcgtgatggccctgggcgccctgctgagcgccctgcccgagttcctgacccaccagtacaagtacgaggccggcgagatcagatggggcgccgagggcagagacgtgtgcgccgccaacggcagcggcggcgacgagggccccgaccccgacctgatctgcagaaacagaaccgccaccaacatgatgtacctgctgctgatcggcgcccaggtgctgctgggcatcggcgccacccccgtgcagcccctgggcgtgagctacatcgacgaccacgtgagaagaaaggacagcagcctgtacatcggcatcctgttcaccatgctggtgttcggccccgcctgcggcttcatcctgggcagcttctgcaccaagatctacgtggacgccgtgttcatcgacaccagcaacctggacatcacccccgacgaccccagatggatcggcgcctggtggggcggcttcctgctgtgcggcgccctgctgttcttcagcagcctgctgatgttcggcttcccccagagcctgcccccccacagcgagcccgccatggagagcgagcaggccatgctgagcgagagagagtacgagagacccaagcccagcaacggcgtgctgagacaccccctggagcccgacagcagcgccagctgcttccagcagctgagagtgatccccaaggtgaccaagcacctgctgagcaaccccgtgttcacctgcatcatcctggccgcctgcatggagatcgccgtggtggccggcttcgccgccttcctgggcaagtacctggagcagcagttcaacctgaccaccagcagcgccaaccagctgctgggcatgaccgccatcccctgcgcctgcctgggcatcttcctgggcggcctgctggtgaagaagctgagcctgagcgccctgggcgccatcagaatggccatgctggtgaacctggtgagcaccgcctgctacgtgagcttcctgttcctgggctgcgacaccggccccgtggccggcgtgaccgtgccctacggcaacagcaccgcccccggcagcgccctggacccctacagcccctgcaacaacaactgcgagtgccagaccgacagcttcacccccgtgtgcggcgccgacggcatcacctacctgagcgcctgcttcgccggctgcaacagcaccaacctgaccggctgcgcctgcctgaccaccgtgcccgccgagaacgccaccgtggtgcccggcaagtgccccagccccggctgccaggaggccttcctgaccttcctgtgcgtgatgtgcatctgcagcctgatcggcgccatggcccagacccccagcgtgatcatcctgatcagaaccgtgagccccgagctgaagagctacgccctgggcgtgctgttcctgctgctgagactgctgggcttcatccccccccccctgatcttcggcgccggcatcgacagcacctgcctgttctggagcaccttctgcggcgagcagggcgcctgcgtgctgtacgacaacgtggtgtacagatacctgtacgtgagcatcgccatcgccctgaagagcttcgccttcatcctgtacaccaccacctggcagtgcctgagaaagaactacaagagatacatcaagaaccacgagggcggcctgagcaccagcaccgagtaccaggacatcgagaccgagaagacctgccccgagagccacagccccagcgaggacagcttcgtgagaagctag

SEQ ID NO: 56921 - DNA, 2079 bp, Artificial Sequence
  derived and/or modified sequence
atgcagggcaagaagcctggaggttcatcaggggggggcagaagtggcgaactgcagggagatgaggctcagaggaataagaagaagaagaaaaaggtgtcctgcttcagcaatatcaaaatattcctagtaagcgaatgtgctttgatgctcgctcagggcaccgtgggcgcctatctcgtctctgttttgacgacattggaacgccggtttaacctgcagtctgcagatgtgggcgttatcgcctcctccttcgagatcggcaacttggcccttattttattcgttagctactttggggctcggggacaccggccacggctgataggctgcggcggtatcgtgatggccctcggcgccctgcttagtgctttgcctgaatttctcactcaccaatacaagtacgaggctggcgaaatcaggtggggagccgaaggcagggacgtatgcgcagcaaatgggagtggcggggatgaggggcccgatccagatcttatttgtaggaatagaacagctaccaacatgatgtaccttctgctgatcggggctcaggtattgctgggcataggtgctacccctgttcagccgttaggcgtgagctacattgacgaccacgtgcggaggaaggactctagtctatacattggcatcctgtttactatgttagtgttcggaccggcgtgcggatttattttgggcagtttctgtaccaaaatatatgtggacgctgtcttcattgatacaagtaacctggacatcacccccgacgacccacggtggatcggcgcatggtggggtggttttttactgtgcggcgcactcttgttcttttcaagcttgctcatgttcggctttccacagagcctgccacctcactctgagcctgctatggagtcagagcaggcgatgctgagtgaacgagaatacgaaaggcctaaaccatccaacggggtactccgccatcccctcgagcccgactccagcgcatcatgctttcagcaactccgggtcattccaaaggtgacaaagcacctgttgtcaaatccagtttttacatgcatcatccttgctgcttgtatggagatagccgttgttgccgggttcgctgcgttcctgggcaagtatctggagcagcaattcaacctgacaacgagcagcgctaatcagctgcttggcatgactgctatcccgtgcgcctgcctggggatctttctagggggactgctggtgaagaagctgagcctgagcgccctaggcgcgatcaggatggctatgctcgtaaatctggtctctacagcctgttatgtgtctttcctgttcctgggatgcgataccggaccggtggccggggtcacagtaccatacggcaactccaccgctcccggttcggcgctggacccttattccccatgcaacaacaactgcgaatgtcagaccgacagcttcactcctgtctgtggtgcagacggtatcacctacctttctgcttgttttgccgggtgtaattctaccaatctgaccggctgtgcctgcctcacaacggtacccgccgaaaatgcaaccgtggtcccgggcaagtgcccttctcctggatgccaggaggcattcctgactttcctctgtgtgatgtgcatctgtagtcttatcggagcgatggcacagacaccttccgttattatcttgattcgtacggtctctcccgagctcaagtcttacgccctgggcgtgctgtttctgctcctacgattactcgggtttattcctcccccactcatcttcggcgcaggcatcgattccacttgtttgttttggagtaccttttgcggggaacagggtgcatgcgtactgtacgataatgtcgtgtatcggtatctttacgtgagtatcgcgattgcattgaaatcattcgcttttatcctgtataccactacctggcagtgtcttcggaagaactataagaggtatatcaagaaccatgagggtgggttaagcacgagtaccgagtaccaggatattgaaaccgagaagacgtgcccagaatcgcattctcctagcgaggacagcttcgtgcggagttag

SEQ ID NO: 56922 - DNA, 2079 bp, Artificial Sequence
  derived and/or modified sequence
atgcagggcaagaagccaggcggcagcagcggcggcggccgctctggagagctgcagggagatgaggcccagaggaacaagaagaagaagaagaaggtgtcctgcttcagcaacatcaagatcttcctggtgtctgaatgtgccctgatgctggcccagggcaccgtgggcgcctacctggtgtctgtgctgaccaccctggagcggcgcttcaacctgcagagcgcagatgtgggcgtgattgccagcagctttgaaattggcaacctggccctgatcctgtttgtgtcctactttggagcccggggccaccggccccggctgattggctgcggcggcatcgtgatggccctgggcgccctgctgagcgccctgcctgagttcctgacccaccagtacaagtatgaagctggggagatccgctggggcgctgagggcagagatgtgtgtgccgccaatggaagtggaggagatgagggccctgaccctgacctgatctgcaggaacagaacagccaccaacatgatgtacctgctgctgattggagcccaggtgctgctgggcattggagccacccctgtgcagcccctgggcgtgtcctacattgatgaccacgtgcggaggaaggacagcagcctgtacatcggcatcctcttcaccatgctggtgtttggacctgcctgtggcttcatcctgggcagcttctgcaccaagatctacgtggatgctgtgttcatcgacaccagcaacctggacatcaccccagatgacccccgctggattggagcctggtggggcggcttcctgctgtgtggggccctgctcttcttcagcagcctgctgatgtttggcttcccccagagcctgcccccccacagcgagcccgccatggagagcgagcaggccatgctgtctgagcgggagtatgagcggcccaagcccagcaatggagtgctgcggcaccccctggagccagacagcagcgccagctgcttccagcagctgcgggtcatccccaaggtgaccaagcacctgctgagcaaccctgtgttcacctgcatcatcctggccgcctgcatggagattgctgtggtggccggctttgctgccttcctgggcaagtacctggagcagcagttcaacctgaccaccagcagcgccaaccagctgctgggcatgacagccatcccctgtgcctgcctgggcatcttcctgggcggcctgctggtgaagaagctgagcctgagcgccctgggcgccatccgcatggccatgctggtgaacctggtgtccacagcctgctacgtgtccttcctgttcctgggctgtgacaccggccctgtggccggcgtgacagtgccctacggcaacagcacagcccctggcagcgccctggacccctacagcccctgcaacaacaactgtgagtgccagacagacagcttcacccctgtgtgtggggctgatggcatcacctacctgagcgcctgctttgctggctgcaacagcaccaacctgaccggctgtgcctgcctgaccaccgtgcctgcagaaaatgccaccgtggtgcctgggaagtgccccagccctggctgccaggaggccttcctgaccttcctgtgtgtgatgtgcatctgcagcctgattggagccatggcccagaccccatctgtcatcatcctgatcagaacagtgtccccagagctgaagagctatgccctgggcgtgctcttcctgctgctgcggctgctgggcttcatccccccacccctcatctttggagctggcatcgacagcacctgcctcttctggagcaccttctgtggggagcagggcgcctgtgtgctgtatgacaacgtggtgtaccgctacctgtatgtgtccatcgccatcgccctgaagagctttgccttcatcctgtacaccaccacctggcagtgcctgaggaagaactacaagcgctacatcaagaaccatgaaggaggcctgagcaccagcacagagtaccaggacatcgagacagagaagacctgcccagagagccacagccccagcgaggacagctttgtgcgctcctag

SEQ ID NO: 56923 - DNA, 2079 bp, Artificial Sequence
  derived and/or modified sequence
atgcagggcaagaagcccggcggcagcagcggcggcggccggagcggggagcttcagggggatgaggctcagcgaaacaaaaagaaaaaaaagaaggtttcctgtttttccaatatcaagatattcttggtgtcagagtgcgcgctgatgctcgcccaaggtactgtcggcgcctacttggtctctgttctcactactctggaacgccggtttaatttgcagtccgccgacgtaggggtcatagcgtccagcttcgagattggcaatctcgcacttattcttttcgtctcctatttcggtgcccgcggccacagacctcgtctgatcgggtgcggcggaattgtgatggctctgggcgcactactcagcgcactcccggagttcctcacacatcagtacaagtatgaagccggggagatccgctggggcgctgaaggcagagacgtttgcgcggcaaacgggagtggaggagatgagggtccagatcccgacctaatttgcaggaacagaaccgcgacgaatatgatgtatttgttgctgattggcgcccaagtccttcttggaattggagccactcccgtccagccactgggggtctcctacattgacgaccatgtacggcggaaggattcctctctgtacatcggaatcctctttactatgcttgtgttcggcccagcctgcggattcatcctcggatctttctgtacaaaaatctacgtcgatgccgtctttattgacacctctaacctggacatcacaccagacgaccctcggtggatcggggcgtggtggggcgggtttctcctttgcggcgccttgctgttcttctcctcacttctcatgtttgggtttccgcagtcactaccaccccactctgagccagctatggaaagcgagcaggccatgctctctgaacgggagtacgaaaggccaaagccgtcaaacggagtcctgaggcatccccttgaacccgacagcagcgcttcttgctttcagcagctgcgggtgatcccaaaggtgactaaacatctcctgagcaaccccgttttcacttgcatcattctggcagcctgcatggagatagctgttgtggctgggttcgctgctttccttggaaaatatctggaacagcagtttaacttgaccacatcctcggcaaatcagttgctagggatgactgctattccgtgcgcctgtctcggcatatttctggggggcttattagtgaagaaactgtctctgtccgccttaggggcaatccgaatggcaatgttggttaatctggtgagcaccgcatgctacgttagctttctgtttctggggtgtgatactggccccgtcgcgggggtgaccgtaccatacggcaattcaaccgcccccggctctgccttggacccatatagtccatgcaataacaattgtgagtgccaaaccgattctttcactccggtctgtggagctgacggcattacatacctgagcgcgtgcttcgccggttgtaactctactaacctgaccgggtgcgcctgcctaactaccgtgcctgccgagaacgccaccgttgtgcccgggaagtgcccatctcctggatgccaagaggcttttctgacattcctctgtgttatgtgtatctgttcgttgatcggggcaatggcacaaacaccatccgtcatcatactgattcgcactgtcagccccgaactgaagtcctacgcattaggggtattattcctcctcctgcggctgttaggttttatcccgccacccctcatttttggcgcaggaattgattctacttgcctcttctggtcaacattttgtggcgagcagggagcttgtgtgctgtacgataatgtggtgtaccgctacctttacgttagcatcgctatcgcacttaaatctttcgcattcatcctgtacacgactacctggcagtgcctgagaaagaactataaaagatacattaagaaccacgagggcgggctgtcaactagcaccgagtatcaagatatcgaaacagaaaagacatgcccagaaagtcactctccctctgaagactcattcgtgaggtcctag

SEQ ID NO: 56924 - DNA, 2079 bp, Artificial Sequence
  derived and/or modified sequence
atgcaggggaagaaacctggtgggtcgtcagggggaggaagaagcggtgagctgcagggggacgaggcacagcggaataagaagaagaagaaaaaagtgagctgtttctccaatataaagatttttcttgtctcagagtgtgctcttatgctggcacaagggacagtgggagcatacttggtctcagtcttaacaaccctggagagacgatttaacttacagtcagccgacgttggagtgattgctagctcctttgagattggaaacctggcactcatcctgttcgtctcttattttggggctcggggacatcgacccaggctgattggttgtggaggcatcgtcatggccctgggtgctctcctgagtgctctgccagagttcctgactcaccagtataaatatgaggctggggagatccgatggggcgcagaaggcagggacgtgtgtgcagcgaacggcagcggaggggacgagggcccagaccccgacttgatctgcaggaatagaactgctacaaacatgatgtatctcctgcttataggtgctcaggtgctgttaggcataggtgcaaccccagtccagcctttaggtgtctcttatatcgacgatcacgtgcgcaggaaggacagcagcctctacatcggaatactctttacgatgctggtgttcggccctgcttgcggatttattctgggaagcttttgtacaaagatctatgtggatgctgtcttcattgatactagtaacctcgacatcacccccgacgaccccaggtggatcggtgcttggtggggagggttcctcctctgcggggctctgctgttcttttccagcctcctcatgttcggctttcctcagagcctccctcctcactccgagccggctatggaatcagaacaggccatgctttctgagcgcgagtacgaaagacccaagccaagtaacggggtccttaggcaccccttagagccagacagctccgctagttgtttccagcagctaagagtcatcccgaaggtaactaagcacttactttccaatccagtcttcacgtgtatcattctggccgcatgtatggagattgccgtggtcgctggattcgctgcatttctcggaaagtacctcgaacagcaattcaacctgactactagctctgctaatcagctgctcggtatgaccgccataccatgtgcatgcctcgggatttttctaggaggcctgctagtcaaaaagctgagcttgagtgctcttggcgcaatcagaatggctatgttagtcaacctggtctccaccgcatgttacgtgtcctttttgtttcttggctgtgacaccgggccagtcgccggagtgacggtgccatacggcaactcaaccgccccaggctccgcattagatccgtacagcccctgtaataataactgtgagtgtcagacagactcgtttacccctgtttgtggtgcagatggtattacctacctttctgcatgttttgccggttgtaactctacaaatcttaccggatgtgcatgcctgacaactgtccctgctgaaaacgctaccgtggtgccaggcaaatgcccttccccaggctgtcaggaagcctttttgacttttctctgcgtcatgtgtatatgttccctgatcggagcaatggcccagaccccatctgttatcatcctgatacgaaccgtctctccggagctgaaatcctacgccctcggtgtcctgtttttgctgctccgactcctgggattcatccctcccccactgatcttcggtgccggaatcgattcgacttgcctcttctggagcaccttctgcggtgaacaaggtgcctgtgtgttatacgataacgtcgtatatagatacttgtatgtcagtattgcaattgcactgaagtcctttgctttcatcctttacacaactacctggcagtgcttaagaaagaattataagcggtatattaagaaccacgagggaggactcagtacctctacagaataccaggatatcgagacagagaagacatgtcctgaatcccactcccccagcgaggactccttcgtgaggagttag

SEQ ID NO: 56925 - DNA, 2705 bp, Artificial Sequence
  derived and/or modified sequence
ggggcgagcgggaaagcggcagcggcggcggcggcggcggcggcgggggaaggatgcaggggaagaagccgggcggttcgtcgggcggcggccggagcggcgagctgcagggggacgaggcgcagaggaacaagaaaaagaaaaagaaggtgtcctgcttttccaacatcaagatcttcctggtgtccgagtgcgccctgatgctggcgcagggcacggtgggcgcctacctggtgagcgtcctgaccaccctggagcgtaggttcaacctgcagagcgctgacgtgggtgtgatcgctagcagcttcgagatcgggaacctggcgctcatcctcttcgtgagctacttcggggcacgcgggcaccggccgcgcctgatcggctgcggcggcatcgtcatggcgctgggcgcgctgctgtcggcgctgcccgagttcctgacccaccagtacaagtacgaggcgggcgagatccgctggggcgccgagggccgcgacgtctgcgcagccaacggctcgggcggcgacgaggggcccgaccccgacctcatctgccgcaaccggacggctaccaacatgatgtacttgctgctcattggggcccaggtgctcctgggcatcggtgctacccctgtgcagcccctgggcgtctcctacatcgacgaccacgtgcggaggaaggactcctcgctctatataggaatcctgttcacgatgctggtatttggaccagcctgcgggtttatcctgggctctttctgtaccaaaatctacgtggatgcggtcttcattgacacaagtaacctggacatcactccggacgacccccgctggatcggagcctggtggggtggctttctgctctgcggtgccttactcttcttctcttccctcttgatgtttgggtttccacagtccctgcccccgcactcagagcccgccatggaaagcgagcaggccatgctctccgaaagagaatacgagagacccaagcccagcaacggggtcctgaggcaccccctggagccagacagcagtgcctcctgtttccagcagctgagagtgatcccgaaggtcaccaagcacctgctctcaaaccctgtgttcacctgcatcatcctggccgcctgcatggagattgcagtggtggctggcttcgctgcctttttggggaagtacctggagcagcagtttaacctcaccacctcttctgccaaccagctgcttgggatgactgcgatcccgtgtgcttgtctgggtatcttcctgggaggtcttttggtgaagaagctcagcctgtctgccctgggggccattcggatggccatgctcgtcaacctggtgtccactgcttgctacgtctccttcctcttcctgggctgcgacactggccctgtggctggggttactgttccctatggaaacagcacagcacctggctcagccctggacccctactcgccctgcaataataactgtgaatgccaaaccgattccttcactccagtgtgtggggcagatggcatcacctacctgtctgcctgctttgctggctgcaacagcacgaatctcacgggctgtgcgtgcctcaccaccgtccctgctgagaacgcaaccgtggttcctggaaaatgccccagtcctgggtgccaagaggccttcctcactttcctctgtgtgatgtgtatctgcagcctgatcggtgccatggcacagacaccctcagtcatcatcctcatcaggacagtcagccctgaactcaagtcttacgctttgggagttctttttctcctccttcgtttgttgggcttcatccctccacccctcatcttcggggctggcatcgactccacctgcctgttctggagcacgttctgtggggagcaaggcgcctgcgtcctctacgacaatgtggtctaccgatacctgtatgtcagcatcgccatcgcgctcaaatccttcgccttcatcctgtacaccaccacgtggcagtgcctgaggaaaaactataaacgctacatcaaaaaccacgagggcgggctgagcaccagcacagagtaccaagacattgagactgagaaaacctgccccgaatcacattcaccttcagaagactcctttgtgagaagctgagggcctggccctcttcctcttcctggagagaacagcccaccaccacccacagacctcgcgggcctcacttagcgcgctcctccctgtccgagaacccgagggtccccatgtggattatccagccagtgtgtggtcctttgaggccccaagcgcaggcctgtgatgaggaccaaagaggtgacttatggtcaggagtactccaaacagctctcagagtaggcatctttcctgggtctctaaagagtcatgctgacctggtgtgcaaattcccttccacccatccctctacctcctctggggatggcttgccgacatgctttagaaactcccctcttgggaatgctcctctgactgagggctccaacagctttaatgaaatcagccgagagggtaaaaaccaacctgttgcatagaatggaggggggaaaaagcacatactcaatagatttttgagtgtggtactctgtatttttgcagcgtttattttccaaatgagcagtttagaaatatgtgatgtaaagtacatactgtacgtttgctgaaaattatattaaaagcactattttaattctt

SEQ ID NO: 56926 - protein, 522 aa, Artificial Sequence
  derived and/or modified sequence
METDLAEMPEKGVLSSQDSPHFQEKSTEEGEVAALRLTARSQAAAAAAAPGSRSLRGVHVPPPLHPAPAREEIKSTCSLKACFSLSLTLTYYRTAFLLSTENEGNLHFQCPSDVETRPQSKDSTSVQDFSKAESCKVAIIDRLTRNSVYDSNLEAALECENWLEKQQGNQERHLREMFTHMNSLSEETDHEHDVYWKSFNQKSVLITEDRVPKGSYAFHTLEKSLKQKSNLMKKQRTYKEKKPHKCNDCGELFTCHSVHIQHQRVHTGEKPYTCNECGKSFSHRANLTKHQRTHTRILFECRECKKTFTESSSLATHQRIHVGERPYECNECGKGFNRSTHLVQHQLIHTGVRPYECNECDKAFIHSSALIKHQRTHTGEKPYKCQECGKAFSHCSSLTKHQRVHTGEKPYECSECGKTFSQSTHLVQHQRIHTGEKPYECSECGKTFSQSSNFAKHQRIHIGKKPYKCSECGKAFIHSSALIQHQRTHTGEKPFRCNECGKSFKCSSSLIRHQRVHTEEQP

SEQ ID NO: 56927 - DNA, 1569 bp, Artificial Sequence
  derived and/or modified sequence
atggagaccgacctggccgagatgcccgagaagggcgtgctgagcagccaggacagcccccacttccaggagaagagcaccgaggagggcgaggtggccgccctgagactgaccgccagaagccaggccgccgccgccgccgccgcccccggcagcagaagcctgagaggcgtgcacgtgcccccccccctgcaccccgcccccgccagagaggagatcaagagcacctgcagcctgaaggcctgcttcagcctgagcctgaccctgacctactacagaaccgccttcctgctgagcaccgagaacgagggcaacctgcacttccagtgccccagcgacgtggagaccagaccccagagcaaggacagcaccagcgtgcaggacttcagcaaggccgagagctgcaaggtggccatcatcgacagactgaccagaaacagcgtgtacgacagcaacctggaggccgccctggagtgcgagaactggctggagaagcagcagggcaaccaggagagacacctgagagagatgttcacccacatgaacagcctgagcgaggagaccgaccacgagcacgacgtgtactggaagagcttcaaccagaagagcgtgctgatcaccgaggacagagtgcccaagggcagctacgccttccacaccctggagaagagcctgaagcagaagagcaacctgatgaagaagcagagaacctacaaggagaagaagccccacaagtgcaacgactgcggcgagctgttcacctgccacagcgtgcacatccagcaccagagagtgcacaccggcgagaagccctacacctgcaacgagtgcggcaagagcttcagccacagagccaacctgaccaagcaccagagaacccacaccagaatcctgttcgagtgcagagagtgcaagaagaccttcaccgagagcagcagcctggccacccaccagagaatccacgtgggcgagagaccctacgagtgcaacgagtgcggcaagggcttcaacagaagcacccacctggtgcagcaccagctgatccacaccggcgtgagaccctacgagtgcaacgagtgcgacaaggccttcatccacagcagcgccctgatcaagcaccagagaacccacaccggcgagaagccctacaagtgccaggagtgcggcaaggccttcagccactgcagcagcctgaccaagcaccagagagtgcacaccggcgagaagccctacgagtgcagcgagtgcggcaagaccttcagccagagcacccacctggtgcagcaccagagaatccacaccggcgagaagccctacgagtgcagcgagtgcggcaagaccttcagccagagcagcaacttcgccaagcaccagagaatccacatcggcaagaagccctacaagtgcagcgagtgcggcaaggccttcatccacagcagcgccctgatccagcaccagagaacccacaccggcgagaagcccttcagatgcaacgagtgcggcaagagcttcaagtgcagcagcagcctgatcagacaccagagagtgcacaccgaggagcagccctag

SEQ ID NO: 56928 - DNA, 1569 bp, Artificial Sequence
  derived and/or modified sequence
atggagaccgacctggcagaaatgcctgaaaagggcgtcttgtctagccaggattctccacatttccaggaaaaatctaccgaagagggagaggtggctgccctgaggctcaccgctcggtcgcaggctgcagccgccgcagcagcccccggctcccggtcacttcgaggcgtgcatgttccgcctcctctgcacccagcgcccgcgcgagaggaaattaagagcacctgcagcttaaaagcatgcttttccctctcactgacactgacatactacaggacagccttcctgctttcaactgagaatgagggtaatttgcacttccaatgccctagcgatgtggagacacgtcctcagtctaaggatagcactagtgtgcaggactttagcaaggcagaatcctgtaaggtggctataatcgatagactgacgcgaaactctgtctatgattcgaacctcgaggccgcactggagtgtgagaattggctggaaaaacagcagggaaaccaggagcgtcacttacgcgagatgtttacacacatgaactctctttctgaggaaactgaccacgagcacgacgtctactggaagagtttcaatcagaaaagtgtgctaatcactgaggatagagtcccaaagggttcctacgccttccacactctggagaagtctttaaagcagaaatctaaccttatgaaaaaacaacgcacttacaaggaaaaaaagccacacaaatgtaatgactgcggagagcttttcacgtgtcactccgtccacattcaacatcaaagagtgcatacgggtgagaaaccatacacctgcaatgaatgcggcaagagcttcagtcatagagctaatctcacaaagcaccagcggacacatactcggattctcttcgagtgtagagagtgtaagaaaactttcacagaatcatctagtctggccactcatcagagaatccatgtgggagagcggccttacgagtgcaacgaatgtggcaagggtttcaacagatcaactcacctagtgcagcatcaactgatacacaccggagttcgaccttatgaatgcaatgaatgcgataaggcctttattcatagtagcgccctcattaagcaccagaggacccatacaggcgagaaaccatacaagtgccaagaatgtggcaaggccttttcgcactgttctagcctgacgaaacaccagcgagtacataccggggagaaaccgtatgaatgctccgaatgcggcaagaccttttcacagtctacacatttagtgcagcaccagagaatccacaccggcgaaaaaccgtacgaatgcagtgagtgcggaaaaacattctctcagtcaagcaacttcgccaaacatcagaggattcatattgggaaaaaaccctataaatgctcagagtgcggcaaggcctttatacacagtagcgcactgatccagcatcagcggacccatacaggagaaaagccttttcggtgcaatgaatgcggtaagtcattcaagtgtagctcaagtctcattaggcaccagcgagtgcacactgaggagcagccgtag

SEQ ID NO: 56929 - DNA, 1569 bp, Artificial Sequence
  derived and/or modified sequence
atggagacagacctggccgagatgcctgagaagggcgtgctgagcagccaggacagcccccacttccaggagaagagcacagaggagggggaggtggccgccctgcggctgacagcccggagccaggccgctgctgctgctgctgcccctggcagccgcagcctgcggggcgtgcacgtgcccccacccctgcacccagccccagcccgggaggagatcaagagcacctgcagcctgaaggcctgcttcagcctgagcctgaccctgacctactacagaacagccttcctgctgagcacagaaaatgaaggcaacctgcacttccagtgccccagtgatgtggagacccggccccagagcaaggacagcacctctgtgcaggacttcagcaaggccgagagctgcaaggtggccatcatcgaccggctgaccagaaattctgtgtatgacagcaacctggaggccgccctggagtgtgagaactggctggagaagcagcagggcaaccaggagcggcacctgcgggagatgttcacccacatgaacagcctgtctgaggagacagaccacgagcatgatgtgtactggaagagcttcaaccagaagtctgtgctgatcacagaggacagagtgcccaagggcagctatgccttccacaccctggagaagagcctgaagcagaagagcaacctgatgaagaagcagaggacctacaaggagaagaagccccacaagtgcaatgactgtggggagctgttcacctgccacagcgtgcacatccagcaccagagggtgcacactggagagaagccctacacctgcaatgaatgtgggaagagcttcagccaccgggccaacctgaccaagcaccagaggacccacacccgcatcctgtttgagtgccgggagtgcaagaagaccttcacagagagcagcagcctggccacccaccagagaattcatgtgggggagcggccctatgagtgcaatgaatgtgggaagggcttcaacagaagcacccacctggtgcagcaccagctgatccacactggagtgcggccctatgagtgcaatgaatgtgacaaggccttcatccacagcagcgccctgatcaagcaccagaggacccacactggagagaagccctacaagtgccaggagtgtgggaaggccttcagccactgcagcagcctgaccaagcaccagagggtgcacactggagagaagccctatgagtgcagtgaatgtgggaagaccttcagccagagcacccacctggtgcagcaccagaggatccacactggagagaagccctatgagtgcagtgaatgtgggaagaccttcagccagagcagcaactttgccaagcaccagaggatccacatcggcaagaagccctacaagtgcagtgaatgtgggaaggccttcatccacagcagcgccctgatccagcaccagaggacccacactggagagaagcccttccgctgcaatgaatgtgggaagagcttcaagtgcagcagcagcctcatccgccaccagagggtgcacacagaggagcagccctag

SEQ ID NO: 56930 - DNA, 1569 bp, Artificial Sequence
  derived and/or modified sequence
atggagaccgacctggccgagatgcccgagaagggcgtgctgagcagccaggacagccctcatttccaggagaaaagcactgaagagggcgaggtagccgccttaaggctgactgcccggtctcaggccgccgccgccgcggcggctcccggcagcagatccctgcgcggggttcacgttcctccacccctccacccggcccccgctcgggaggaaattaaaagtacctgcagcctgaaggcctgtttttccctgtcacttaccctgacgtattatcgaactgcgtttctgctgtcaacagagaacgaaggtaacctgcacttccaatgcccttctgacgtggagacccggccacaatctaaagattccacatcggtgcaagatttttccaaggctgagtcatgtaaagtggccatcatcgaccgcctgacgcgcaactccgtgtatgactcaaatctggaggcagccctggaatgcgagaactggctggagaagcaacagggaaaccaagaacgtcatctgcgcgaaatgttcacacacatgaacagcttaagcgaagagacagaccatgaacatgatgtgtactggaagagcttcaaccagaagagtgtgctcataactgaagatcgggttcctaaaggctcgtacgcttttcacacgctggagaaaagcttgaagcaaaaaagcaacctaatgaagaagcagagaacgtataaagaaaaaaaaccacataaatgtaacgactgcggagaattgtttacctgtcattcagtccacatccagcaccagcgggtgcataccggtgagaagccgtatacatgcaacgagtgtggaaagagttttagtcatagagccaacctgactaaacaccaacggactcatacccggatcctgtttgaatgccgtgagtgcaaaaagactttcacagaaagctccagtctcgctacccaccaacggattcatgtgggagagaggccatacgagtgcaatgaatgtggaaaaggctttaaccgcagcacccacttagttcagcaccagctgatacatacaggcgtaagaccctatgagtgtaacgagtgcgacaaagccttcatacactcctcggccctcataaaacatcaacgtacacataccggagagaaaccttacaaatgccaggagtgtgggaaggccttctcccactgttccagcttgacaaaacaccaacgtgttcataccggagagaaaccctacgaatgttctgaatgtgggaagacgttttcgcaatccacacatctcgtgcagcaccagagaatccacacaggggagaagccctacgaatgttccgaatgcggaaaaacgttcagtcagagctccaattttgctaagcaccagcgtatacatatcgggaagaagccttataaatgttctgagtgtggcaaagccttcattcacagcagcgctctaatccagcaccagagaacacacaccggtgagaagccatttagatgcaatgaatgtggcaagagcttcaagtgcagcagcagcctgattcggcatcaaagggtccacacggaagagcagccatag

SEQ ID NO: 56931 - DNA, 1569 bp, Artificial Sequence
  derived and/or modified sequence
atggagacggacctcgccgaaatgcctgagaaaggtgtgctatcatcccaggattccccgcattttcaagagaagtccactgaagagggggaggtagcagccctccgccttacagccagaagtcaagctgctgccgctgcagctgcgccaggatctaggtcccttaggggcgtgcacgtgccaccccctcttcacccggctccagcacgggaagaaatcaaatccacctgttcattaaaggcttgcttcagcctgagcctgactctgacgtattatagaacagcatttctcctgtctaccgagaatgaaggaaacttgcactttcaatgcccgtctgatgtagagacccgccctcagtcgaaagatagcacttccgtgcaagactttagcaaagctgaatcttgcaaagtggctattatcgacaggcttacaaggaattccgtgtatgatagcaacttagaggcagcactggaatgcgagaattggctagagaagcagcaagggaaccaggagaggcacttacgcgagatgttcactcatatgaattccctgagtgaggagacagatcacgagcatgacgtgtactggaagtccttcaaccagaaatctgtgctgataactgaagatcgtgtaccaaaggggagttatgccttccacacactcgaaaagtccctgaaacagaagagcaacctcatgaagaagcagagaacgtataaggaaaaaaagcctcacaagtgcaatgattgcggagagctctttacttgccactctgtccacatacagcaccagcgagtgcacaccggcgagaagccatacacctgtaatgagtgtggaaaatcattctcccacagggccaatctgaccaaacatcagaggacacataccagaattttattcgagtgtagggagtgcaaaaagactttcactgagtcctcttcactggccacccaccagcgcatccatgtcggcgaacgcccttatgaatgtaatgagtgcggaaagggtttcaaccgatcgacgcacctggtgcagcaccaactgatccatacaggagtgaggccatacgaatgtaacgagtgcgacaaggcatttatccattcctcagcactaatcaagcatcagaggactcacaccggcgagaaaccctacaagtgccaggagtgcggcaaggccttctctcactgtagctctctgacaaagcatcaacgcgttcacacaggagaaaaaccatatgaatgtagcgaatgcggaaagacctttagtcagtctactcacttagtccaacatcaacgcatccacacaggggagaaaccctatgaatgcagcgaatgcggcaagacattcagccaatcttccaactttgccaagcaccagagaatccacatcggcaagaaaccctacaagtgtagtgaatgcgggaaagcatttattcacagcagcgccctgattcagcatcagagaacccacacaggagagaagccatttcggtgtaatgagtgtgggaaatcgttcaaatgctccagcagcctgattaggcatcaaagagtccatacagaggagcagccttag

SEQ ID NO: 56932 - DNA, 5328 bp, Artificial Sequence
  derived and/or modified sequence
cgcgactccgagctggccaaagaagttcgtcccctttgtgaggcccgggatgggaggctccagcgccgtaggactgaggcagactccacggtgagaaagagacccgatctaacccaggcctttcatcagagcccaggagggaaggcaggaagtgggaccacgaggcccggggggcttctaactcgtctggccagggagatctgaattggggtgaagagcagaatctccagaacaaggaggaggtggtgatcatggagacagatttggctgaaatgcctgagaaaggagttctgtcttcccaggattctccccatttccaagagaagagcacagaagagggagaagtggctgctctgcgcctcacggccagatcccaggcggcggcggcggcggcggcgcccgggagccggagccttcgcggcgtccacgtccctcccccgctgcaccccgccccggcgcgagaggagatcaaatccacttgctccttgaaggcatgcttttcactttcattaactcttacctattacagaactgcctttttgttgagcacagaaaacgaaggaaatttgcatttccaatgtccttcagacgtggagactagaccacagagcaaggattcaacttcagtgcaagatttttccaaagcagaatcatgcaaagttgcaataatagacagactgacacggaatagtgtctatgactctaacttggaagcagcccttgaatgtgaaaattggttagagaagcagcaaggaaatcaggagagacatttgagagaaatgttcactcacatgaattcactctctgaggaaacagaccatgagcatgatgtatactggaaaagcttcaatcagaaatctgtccttatcactgaagacagagttcccaaaggatcttatgccttccatacacttgaaaaaagcttgaaacaaaaatcaaacttaatgaaaaagcagagaacttataaagagaaaaaacctcataaatgtaatgattgtggtgaactcttcacctgccattcagtgcatattcaacaccagagagtccatactggagagaaaccctatacctgcaatgaatgtgggaaatcttttagccacagagctaatttaactaaacaccagagaactcatactagaattctctttgaatgccgtgaatgtaagaaaaccttcacagaaagctcatcccttgcaacacatcagagaattcacgttggagagagaccttatgaatgcaatgaatgtgggaaaggttttaatcgaagtacacatcttgtgcagcatcagttgattcatactggagtgaggccttatgaatgtaatgaatgtgataaagcttttattcattcatcagcactcattaaacatcaaagaactcatactggagagaaaccttataaatgtcaagaatgtgggaaagcctttagccattgctcatccctaactaagcatcagagagttcatactggagaaaagccatatgaatgcagtgaatgtggaaaaacttttagtcagagcacacatcttgttcaacatcagagaattcacactggagagaaaccctatgagtgtagtgaatgtgggaaaaccttcagccagagctccaattttgctaaacatcaaagaattcatattggaaagaaaccgtacaaatgtagtgagtgtggaaaagccttcattcattcatcagctcttattcaacatcagagaactcataccggagagaaaccctttagatgtaatgagtgtgggaaaagctttaagtgcagttcatctctcatcagacatcaaagagttcacactgaagagcaaccctgaaaaattactgaatgtgaagaaatgtaagttggttttatcactatattaaatacttgagtgtttaggtggaaggcccatccataatatgcatgtgaggaccaattctatatgcatctaatttcatttgtgtaatacatagttttgagccataggcaggttctttatgtccgttaatttgataattatgaaatctagccagcgatttcaaaattttaatctccaacctcccaaatagctatctgtggaaattcaagaagtccctgagagtgggtagcagtacaaacattgtgaaatccagttttcccctctcttgtttatgtcagagctttgttgtaagcctctcactttgtaaggaaattcttattgggtaggttaggctgagggcttacatccttatcatcaggaagacacaatgttgttatttattactccttgagatctagatacacatatggtataattcatctagagtgtcatttcttttatattagccttaaaaaccaaaaatgctgggttcaaagtccttagcattcccttcctccctcaacaagctgctgtctattttgatgaccataactaggatgtataatatttacagacaattctaatttatgttcacatggattatgtacatcattgatttttttttttttttttttttgagacagagtctcgctctgttgcccgggctggagtgcagtggcgtgatctcagctcactgcaacctccacctcccaggttcatgccattctcttgtctcagcctcctgagtagctgggactacaggcacctgccagtacgcctggctaattttttttgtatttttagtagagatggggtttcaccatgttagccaggatggtcttgatctcctgacctcgtgatctgcctgcctcggcctcccaaagtgctgggattacaggcgtgagccaccatgcctggcatcatcattgatttatgtcattgttatccctctaccgcggagaccttctttcattttccatttccctgggagttcacgtgaagtagtgaatgggtcaaaatcttaacagtggttgttgatcaagtccttcctttcttatccttggcactgaataaatctttggttttccataatcaaagggtgagggagacttcttttgtctacattattcagctttctgaaagctatgctgtgtccatttgagaaaaagccccagggatattgaaggtctgagaagttgagtggttcagtgtgttattatatttagggtcccagtaaagaagaactgaagcaactgtgagacaccagggcatacttccctgtatgagtggaaaacaaggtacggaaaatagctcacaggatagtcctcaactgacttgcttgaggataagcagcttcccttcatgaagaagttgccatttctctggccttcatatttacctactttttgttattgttatctgtatcggttcaatctcacactgctataaagaaatgcctgagactgggtaacttataaagaaaaaaggtttaattggctcatggttccatgggctgtacaggaagtatgactggggaggtctcagggagcttttactcatggcaaaaggcaaagccagagcaggtatcttcacagggctagagcaagaggaaaagagagaggggaggtgctacacactttttatgcaaccaaatctcatgagaactctatcacgagacagcagtagggggacagtgctaaatcattcatgagaaactacctgcgtggtccagtcaccttgcaccaggccccacctcccacattggggattacaattaaacatgagatttgggtggggatacagatctaaactgtatcattactcaaaaaaaaaaaaaaaagaaaaaagaaagaaaacacaggaaaaggaactcacctcttttatcatcttagtatttagtactaatggtttagagcaggagttgacaaactgtggcctggactcatggaccaactctggcccaccacctgtttctcagaagaaaattttattggaactcagccacacttactcatttacatgttgtccttgactgcctttgtgtccagtgtcagaactgagtagctgcagcggaggttgtgcctctgggctttaatatcacaaacagagcagcttataagcaacagaaacttacttctcacagttttggaggctgggaagtccaagatcaaggtgtcaacatatttagggtctagggaaggtctgcttcttggttaatagaaagcacctttcactgtgtcttcacatggtagaaggggagagctctggtatcttcaggcccttataagggcactaatcccattcatgagcgctccaccctcacgacctaatcacctccaaaaggccccatttcataataccatcaattaagtttcattatatgactttgatggggatatagcccatagtaggttctatgtccctgaaagcctaaaatatttactgtttggctctttacagaaaatattttcttggcccctgttccagagcattcatcaagaagtcagataaagggtttaaaccagtcagagaaagtaggtggaatggaaaagttgaacttactgagagataactggggacagaaaaataaaagaggtgggaaatgatgcatcaaaatactcctacctctaggatgttactatatattgtcaggagaattcaagttattgaaacttgccaaattcttgagtgaaaagaaattcatttgagggccaaaatttgactaaggaaagaagaccaacatgggctttccaaagttgagtttgaattctgccatccccactaagcagtcatgtgaccttggaaaaactccctactctgagtctcagtttctttatctgtattaggtttcaacaaagggaataaatcattggcttctcatgaggttgtcataaggattaaataagacaatgcatacaaaagaactggcagacaataaatatagagtcccccactcctgcttggtgctctctttctctctccttctctacatagagaagtgccagagcatccgtcagtagaagttacttaaggttggctgtgtcttccacatcttttgtttacccatgaagaactgtgaccatcttgttctgtggcttgtcataaagatgggacgtgacttctttctgctcttgcttccatctggtgctgttttctgcacagcctccttgagaccttccagaaccttcttttttcctacttcgtatcacttaaccagtagctatctgggatggttccagaggctgaagtttgcagttgaataacattttaaatagtgttaagcgacttgggatctctggccctttgcgtttcagtatttgtcctttttatgcctgatgtttaacctgccacatgtttgtactgcaacatgaatcttggaaattttaatgttatgcatttcaaatgtttttggttatctgtaaactaaatgtgcccttattggctcacttgtcaataaagatgtttgtatatgttttgtcagaaa

SEQ ID NO: 56933 - protein, 362 aa, Artificial Sequence
  derived and/or modified sequence
MTGHTRSSLPRCTGIVLLIKLRFSERLTGHLHAQGTPPYVINLDPAVHEVPFPANIDIRDTVKYKEVMKQYGLGPNGGIVTSLNLFATRFDQVMKFIEKAQNMSKYVLIDTPGQIEVFTWSASGTIITEALASSFPTVVIYVMDTSRSTNPVTFMSNMLYACSILYKTKLPFIVVMNKTDIIDHSFAVEWMQDFEAFQDALNQETTYVSNLTRSMSLVLDEFYSSLRVVGVSAVLGTGLDELFVQVTSAAEEYEREYRPEYERLKKSLANAESQQQREQLERLRKDMGSVALDAGTAKDSLSPVLHPSDLILTRGTLDEEDEEADSDTDDIDHRVTEESHEEPAFQNFMQESMAQYWKRNNK

SEQ ID NO: 56934 - DNA, 1089 bp, Artificial Sequence
  derived and/or modified sequence
atgaccggccacaccagaagcagcctgcccagatgcaccggcatcgtgctgctgatcaagctgagattcagcgagagactgaccggccacctgcacgcccagggcacccccccctacgtgatcaacctggaccccgccgtgcacgaggtgcccttccccgccaacatcgacatcagagacaccgtgaagtacaaggaggtgatgaagcagtacggcctgggccccaacggcggcatcgtgaccagcctgaacctgttcgccaccagattcgaccaggtgatgaagttcatcgagaaggcccagaacatgagcaagtacgtgctgatcgacacccccggccagatcgaggtgttcacctggagcgccagcggcaccatcatcaccgaggccctggccagcagcttccccaccgtggtgatctacgtgatggacaccagcagaagcaccaaccccgtgaccttcatgagcaacatgctgtacgcctgcagcatcctgtacaagaccaagctgcccttcatcgtggtgatgaacaagaccgacatcatcgaccacagcttcgccgtggagtggatgcaggacttcgaggccttccaggacgccctgaaccaggagaccacctacgtgagcaacctgaccagaagcatgagcctggtgctggacgagttctacagcagcctgagagtggtgggcgtgagcgccgtgctgggcaccggcctggacgagctgttcgtgcaggtgaccagcgccgccgaggagtacgagagagagtacagacccgagtacgagagactgaagaagagcctggccaacgccgagagccagcagcagagagagcagctggagagactgagaaaggacatgggcagcgtggccctggacgccggcaccgccaaggacagcctgagccccgtgctgcaccccagcgacctgatcctgaccagaggcaccctggacgaggaggacgaggaggccgacagcgacaccgacgacatcgaccacagagtgaccgaggagagccacgaggagcccgccttccagaacttcatgcaggagagcatggcccagtactggaagagaaacaacaagtag

SEQ ID NO: 56935 - DNA, 1089 bp, Artificial Sequence
  derived and/or modified sequence
atgactggtcatactaggagctccctgccacggtgcacaggcatcgtgctgcttattaagctgaggttttcagaacgcctgacaggccacctccacgcccaaggaaccccaccgtacgtaatcaatttggaccccgcagtccacgaggtccctttccctgccaatatagacatccgagacacggttaagtataaggaggtcatgaagcaatacggcctcggacccaatggcggtatcgtgacatccctgaatctattcgctactcgctttgaccaggtgatgaagttcatcgagaaagcgcaaaacatgtcaaagtatgtcctaattgatactcccggacagattgaggtctttacgtggagcgctagtggtactattattaccgaggcactggcgtctagctttcctacagttgtgatttatgtaatggatacttctcggagcactaatcctgtcaccttcatgagcaatatgctgtacgcttgctctatcctgtacaagactaagctgccctttatcgtcgtgatgaacaaaaccgacatcattgatcactctttcgctgttgaatggatgcaagactttgaagccttccaggacgctctcaatcaggagacaacatatgtgagcaaccttacacggtcaatgtctttggtcctggacgagttctacagttccttacgcgtggttggggtaagcgcagttctgggcaccggtttggacgagctcttcgtgcaggttaccagtgctgctgaggaatacgagagggaatatcggcctgagtatgaacgactgaaaaagagtctggcgaatgctgagtcccagcaacagcgtgagcagctggagagattacgcaaagacatgggtagcgtcgccctcgacgccgggaccgctaaggactccttgagtccagtcctccatcctagtgatctgattctgacgcggggaacacttgatgaggaggatgaggaggccgattctgacacagacgacatcgaccacagagtgacagaggagtcgcatgaggaaccagcttttcagaatttcatgcaggagtccatggcgcagtactggaaacggaataacaagtag

SEQ ID NO: 56936 - DNA, 1089 bp, Artificial Sequence
  derived and/or modified sequence
atgacaggccacaccaggagcagcctgccccgctgcacaggaattgtgctgctgatcaagctgcgcttcagcgagcggctgaccggccacctgcacgcccagggcaccccaccctacgtgatcaacctggaccctgctgtgcatgaggtgcccttccctgccaacatcgacatccgggacacagtgaagtacaaggaggtgatgaagcagtatggcctgggccccaacggcggcatcgtgaccagcctgaacctgtttgccaccaggtttgaccaggtgatgaagttcatcgagaaggcccagaacatgagcaaatatgtgctgattgacaccccaggccagatcgaggtgttcacctggagcgccagcggcaccatcatcacagaggccctggccagcagcttccccaccgtggtgatctacgtgatggacaccagccgcagcaccaaccctgtgaccttcatgagcaacatgctgtatgcctgcagcatcctgtacaagaccaagctgcccttcatcgtggtgatgaacaagacagacatcatcgaccacagctttgctgtggagtggatgcaggactttgaggccttccaggatgccctgaaccaggagaccacctacgtgagcaacctgaccaggtccatgagcctggtgctggatgagttctacagcagcctgcgggtggtgggcgtgtctgctgtgctgggcaccggcctggatgagctgtttgtgcaggtgaccagcgctgctgaggagtatgagcgggagtacagaccagaatatgagcggctgaagaagagcctggccaatgctgagagccagcagcagcgggagcagctggagcggctgaggaaggacatgggctctgtggccctggatgctggaacagccaaggacagcctgagccctgtgctgcaccccagcgacctgatcctgacccggggcaccctggatgaggaggatgaggaggccgacagcgacacagatgacatcgaccaccgggtgacagaggagagccatgaggagcccgccttccagaacttcatgcaggagagcatggcccagtactggaagaggaacaacaagtag

SEQ ID NO: 56937 - DNA, 1089 bp, Artificial Sequence
  derived and/or modified sequence
atgaccggccacacccggagcagcctgccccggtgcaccggcatcgtcctgttgatcaagctgcgatttagtgaacgtctgacaggacatttgcacgctcagggaaccccgccctatgtaatcaatcttgatcctgccgttcatgaggttccatttccagccaacatcgacatacgtgacactgttaaatataaagaggtcatgaagcagtatggcttagggcctaatggcggaattgtgacaagcctgaatctgttcgctactcggtttgaccaggtgatgaagtttatagagaaggcacagaacatgagcaagtacgtgctgatcgataccccaggacagattgaagttttcacctggagcgcctccggaaccatcataactgaagcgctggcctcctcttttcccaccgtcgttatatatgtgatggatactagccgctctaccaatcccgtgacctttatgagtaatatgctgtatgcttgttcgatcctgtacaagactaagctgcccttcatcgtcgttatgaacaaaactgatatcatcgatcacagctttgctgtggagtggatgcaggatttcgaggcttttcaggacgcccttaaccaggagacgacgtatgtatctaatctgacgcgctctatgagtctcgtcctggatgaattttattccagtctcagagtcgtcggcgtgtcagctgtcttgggtacaggtctcgacgagctcttcgttcaggtaactagtgccgcggaagaatacgagagagagtatcgaccagagtacgagaggctgaagaagtcacttgcgaacgccgaatcacagcagcagagagaacagttagagaggctgcggaaggacatggggtccgtggcgctcgacgcgggcacagctaaggattcactctctcctgtccttcacccgtctgatctgatcttaacaagggggacgctcgatgaagaggatgaggaggctgactccgacaccgatgacatcgaccatcgggtcacggaggagagtcacgaagagcccgccttccagaactttatgcaggagagtatggcgcagtattggaagagaaacaataagtag

SEQ ID NO: 56938 - DNA, 1395 bp, Artificial Sequence
  derived and/or modified sequence
gagcagccggtcctccagtggctccgctccccgttctctgtgggctcaaaatgacagggcatactcggtccagcttaccacgttgtacaggaattgtcttgctgataaaattgcgtttctcggagaggctcacaggacacctgcatgcccaaggcactccaccgtatgtgatcaacctggatccagcagtacatgaagttccctttcctgccaatattgatattcgtgatactgtaaagtataaagaagtaatgaaacaatatggacttggacccaatggcggcatagtgacctcactcaatctctttgctaccagatttgatcaggtgatgaaatttattgagaaggcccagaacatgtccaaatatgtgttgattgacacacctggacagattgaggtattcacctggtcagcttctgggacaattatcactgaagcccttgcatcctcatttccaacagttgtcatctatgtaatggacacatcgagaagtaccaacccagtgaccttcatgtccaacatgctctatgcctgcagcatcttatacaaaaccaagctgcctttcattgtggtcatgaataaaactgacatcattgaccacagctttgcagtggaatggatgcaggattttgaggctttccaagatgccttgaatcaagagactacatacgtcagtaacctgactcgttcaatgagcctggtgttagatgagttttacagctcactcagggtggtgggtgtctctgctgttctgggtactggattagatgaactctttgtgcaagttaccagtgctgccgaagaatatgaaagggagtatcgtcctgaatatgaacgtctgaaaaaatcactggccaacgcagagagccaacagcagagagaacaactggaacgccttcgaaaagatatgggttctgtagccttggatgcagggactgccaaagacagcttatctcctgtgctgcacccttctgatttgatcctgactcgaggaaccttggatgaagaggatgaggaagcagacagcgatactgatgacattgaccacagagttacagaggaaagccatgaagagccagcattccagaattttatgcaagaatcgatggcacaatactggaagagaaacaataaataggagactttagcacacttcacttgtttctagaagtccagaattttggacctccacgtgaaagaactgttcttacctctgaactgggggctcccataagggataattttcctcagagtagcaaagtttctcttattagagaaatcttgtgactcagatgaagtcagggatagaagacccttggacctggcaggttaatgctgattattccttggcctttcccttgtatttatgcaaggaaggatatactgagctgata

SEQ ID NO: 56939 - DNA, 1089 bp, Artificial Sequence
  derived and/or modified sequence
atgaccggacacactcgctcttctctgcccaggtgcaccggtattgtgttgctgattaaactgaggtttagcgaaagactaacaggacaccttcatgcacagggcaccccgccttatgtgatcaatctggaccccgctgtccacgaagttccattccccgcaaatattgacatccgggatacggttaagtacaaggaggttatgaagcagtacggcctggggccaaatggaggcatcgtaacctccctgaatctgtttgcgacccggttcgatcaggtcatgaaattcatcgagaaggcgcagaacatgagcaagtatgtgctgatcgacacacccggacagattgaagtgtttacatggtccgccagtggcactataattacggaggcattggcttcatcttttccgaccgtcgtgatctatgtcatggatacctccaggtcaaccaaccccgttacctttatgagcaatatgctctacgcttgttctatcctatataaaacaaagttgccctttatagtcgttatgaacaaaacagacatcatcgatcattcctttgctgtggaatggatgcaggatttcgaagcctttcaggatgcactcaatcaggagactacatacgttagcaacctgacccgctccatgagcctggtgctagatgagttctacagcagtctcagggttgttggtgtgtcagctgtgctagggactggccttgacgagttattcgttcaggtgacatctgccgcagaagaatatgagcgagaatacaggcctgagtacgagcgcctgaagaagagcctcgcaaacgcagagtcccagcaacagcgggagcagctagagcgactcagaaaagatatggggagcgtcgcgttggacgcaggcacagccaaagacagtttgtctcctgtgctacacccatccgatttgattcttacccgcggaacactcgatgaggaggatgaggaagcagatagtgacaccgacgacatcgaccaccgcgtcactgaggagtcccatgaggagccagccttccagaactttatgcaagaaagtatggcccagtattggaagcgaaataataaatag

SEQ ID NO: 56940 - protein, 295 aa, Artificial Sequence
  derived and/or modified sequence
MKQYGLGPNGGIVTSLNLFATRFDQVMKFIEKAQNMSKYVLIDTPGQIEVFTWSASGTIITEALASSFPTVVIYVMDTSRSTNPVTFMSNMLYACSILYKTKLPFIVVMNKTDIIDHSFAVEWMQDFEAFQDALNQETTYVSNLTRSMSLVLDEFYSSLRVVGVSAVLGTGLDELFVQVTSAAEEYEREYRPEYERLKKSLANAESQQQREQLERLRKDMGSVALDAGTAKDSLSPVLHPSDLILTRGTLDEEDEEADSDTDDIDHRVTEESHEEPAFQNFMQESMAQYWKRNNK

SEQ ID NO: 56941 - DNA, 888 bp, Artificial Sequence
  derived and/or modified sequence
atgaagcagtacggcctgggccccaacggcggcatcgtgaccagcctgaacctgttcgccaccagattcgaccaggtgatgaagttcatcgagaaggcccagaacatgagcaagtacgtgctgatcgacacccccggccagatcgaggtgttcacctggagcgccagcggcaccatcatcaccgaggccctggccagcagcttccccaccgtggtgatctacgtgatggacaccagcagaagcaccaaccccgtgaccttcatgagcaacatgctgtacgcctgcagcatcctgtacaagaccaagctgcccttcatcgtggtgatgaacaagaccgacatcatcgaccacagcttcgccgtggagtggatgcaggacttcgaggccttccaggacgccctgaaccaggagaccacctacgtgagcaacctgaccagaagcatgagcctggtgctggacgagttctacagcagcctgagagtggtgggcgtgagcgccgtgctgggcaccggcctggacgagctgttcgtgcaggtgaccagcgccgccgaggagtacgagagagagtacagacccgagtacgagagactgaagaagagcctggccaacgccgagagccagcagcagagagagcagctggagagactgagaaaggacatgggcagcgtggccctggacgccggcaccgccaaggacagcctgagccccgtgctgcaccccagcgacctgatcctgaccagaggcaccctggacgaggaggacgaggaggccgacagcgacaccgacgacatcgaccacagagtgaccgaggagagccacgaggagcccgccttccagaacttcatgcaggagagcatggcccagtactggaagagaaacaacaagtag

SEQ ID NO: 56942 - DNA, 888 bp, Artificial Sequence
  derived and/or modified sequence
atgaaacagtacggactcggcccaaatggaggaatcgttacatccctgaatctgtttgccactcgcttcgatcaggttatgaaattcatcgaaaaggcccaaaacatgtccaaatatgtccttatcgacactcccggccaaatcgaagtgtttacttggtctgcatcaggcaccatcatcacagaggccttggcctcttcctttccaacagtagtgatatacgtcatggataccagtcgaagcaccaaccctgtgacatttatgtccaacatgctgtatgcatgtagcattctctataaaaccaagctgccattcatagtggttatgaataagactgatatcatcgaccactcatttgctgttgaatggatgcaggatttcgaggcttttcaggatgctctgaatcaggaaacaacctacgtctctaacctaactaggagcatgagcctggtgctcgatgagttctactccagcttgcgagtggtgggagtgagtgcggtacttgggactgggctggatgagttgtttgtgcaggtaactagtgcggctgaggaatatgagcgcgagtaccgccccgaatatgaaaggctgaagaagtctctggcaaacgctgagagtcaacaacaacgggagcagctcgaacgcttgcgaaaggacatggggtcagtggcactcgacgccggaacagcaaaggactcactgagcccagtgctgcatccgagtgacctcatcctcacacgagggacgctcgatgaggaagatgaggaggccgactcagataccgacgatatcgaccatcgtgtcacagaagagagtcacgaggaacccgcctttcagaatttcatgcaggagtcgatggctcaatattggaagagaaataacaaatag

SEQ ID NO: 56943 - DNA, 888 bp, Artificial Sequence
  derived and/or modified sequence
atgaagcagtatggcctgggccccaatggaggcatcgtgaccagcctgaacctgtttgccaccaggtttgaccaggtgatgaagttcatcgagaaggcccagaacatgagcaaatatgtgctgattgacaccccaggccagatcgaggtgttcacctggagcgccagcggcaccatcatcacagaggccctggccagcagcttccccaccgtggtgatctacgtgatggacaccagccgcagcaccaaccctgtgaccttcatgagcaacatgctgtatgcctgcagcatcctgtacaagaccaagctgcccttcatcgtggtgatgaacaagacagacatcatcgaccacagctttgctgtggagtggatgcaggactttgaggccttccaggatgccctgaaccaggagaccacctacgtgagcaacctgaccaggtccatgagcctggtgctggatgagttctacagcagcctgcgggtggtgggcgtgtctgctgtgctgggcaccggcctggatgagctgtttgtgcaggtgaccagcgctgctgaggagtatgaaagagagtacagaccagaatatgaaaggctgaagaagagcctggccaatgctgagagccagcagcagcgggagcagctggagcggctgaggaaggacatgggctctgtggccctggatgctggaacagccaaggacagcctgagccctgtgctgcaccccagcgacctgatcctgacccggggcaccctggatgaagaagatgaggaggccgacagcgacacagatgacatcgaccaccgggtgacagaggagagccatgaggagcccgccttccagaacttcatgcaggagagcatggcccagtactggaagaggaacaacaagtag

SEQ ID NO: 56944 - DNA, 888 bp, Artificial Sequence
  derived and/or modified sequence
atgaagcagtacggcctgggccccaacggcggcatcgtgaccagcctaaacctcttcgcaactagatttgaccaggtcatgaaatttatagagaaagcgcaaaatatgtccaaatacgtcttgatcgatacaccaggacagatcgaagtgtttacttggagcgcgtctggaaccatcattacagaggccctggccagttccttccccaccgtggtcatctacgtgatggacacaagcaggagcaccaaccctgtgacattcatgtctaacatgttgtatgcgtgctctatactgtataagaccaaacttccttttatcgtggtgatgaataagactgacatcatcgaccacagttttgccgtcgaatggatgcaggacttcgaggccttccaggatgcacttaatcaggaaacaacatatgtgtcaaacctgactcgcagtatgtccctggtgctggacgaattttactcctctctccgcgtggtcggtgtgagtgccgtgctgggcacaggcctggacgaattattcgtgcaagtgacctcagctgcagaggaatatgaaagggagtaccgcccggagtacgaaagactaaagaagtcacttgccaatgcagaatcacaacaacagcgggaacaattggagagattgagaaaagatatggggtcagtggcactcgatgcgggcacagcaaaggatagtctgagtcctgtgctccatccgagcgacctaatactgaccagaggaacactggacgaagaagacgaagaggcagactccgacaccgatgatatcgatcaccgggtcacagaagagtcgcatgaggagccagcattccaaaacttcatgcaagagtctatggcacagtattggaagaggaacaataagtag

SEQ ID NO: 56945 - DNA, 888 bp, Artificial Sequence
  derived and/or modified sequence
atgaaacagtacggtttaggccctaatggtggcatcgtgacaagtttgaacctattcgctactcgtttcgatcaggttatgaagttcatcgaaaaggcacagaatatgtcaaagtatgtgctgatcgacactcccggtcagatcgaagtcttcacctggtcggcttccggtaccatcattactgaggcactggcctcatccttccctacggtggtcatctatgttatggatacctcaaggtccaccaatcccgtcaccttcatgtctaacatgttatatgcatgcagcatactttataagaccaagctaccgtttatcgtggttatgaataaaactgacatcatcgatcacagttttgcagtcgaatggatgcaagatttcgaggccttccaggatgcactcaatcaggaaaccacatacgtgtcaaacctgacccgttctatgtctctggtcctggacgaattctactcatctttaagagttgtgggtgttagtgctgttctgggaacaggtcttgacgaactttttgtgcaggtcacatccgccgcagaggagtatgagagggagtaccggcctgaatacgagcggttgaagaagtctctggccaacgccgagtcacagcagcagcgcgaacagctggagcgcttgcggaaagacatgggcagtgttgctctggatgctggcaccgctaaagacagcctgtcccccgtcctccaccccagcgacttgattctcacccgcggaaccttagatgaggaagacgaggaagctgactccgacactgatgatatcgatcatcgcgtaactgaagaatcccacgaagagccagctttccagaacttcatgcaggaaagcatggcccagtactggaagagaaataacaaatag

SEQ ID NO: 56946 - protein, 279 aa, Artificial Sequence
  derived and/or modified sequence
MKFPFLPILVMKFIEKAQNMSKYVLIDTPGQIEVFTWSASGTIITEALASSFPTVVIYVMDTSRSTNPVTFMSNMLYACSILYKTKLPFIVVMNKTDIIDHSFAVEWMQDFEAFQDALNQETTYVSNLTRSMSLVLDEFYSSLRVVGVSAVLGTGLDELFVQVTSAAEEYEREYRPEYERLKKSLANAESQQQREQLERLRKDMGSVALDAGTAKDSLSPVLHPSDLILTRGTLDEEDEEADSDTDDIDHRVTEESHEEPAFQNFMQESMAQYWKRNNK

SEQ ID NO: 56947 - DNA, 840 bp, Artificial Sequence
  derived and/or modified sequence
atgaagttccccttcctgcccatcctggtgatgaagttcatcgagaaggcccagaacatgagcaagtacgtgctgatcgacacccccggccagatcgaggtgttcacctggagcgccagcggcaccatcatcaccgaggccctggccagcagcttccccaccgtggtgatctacgtgatggacaccagcagaagcaccaaccccgtgaccttcatgagcaacatgctgtacgcctgcagcatcctgtacaagaccaagctgcccttcatcgtggtgatgaacaagaccgacatcatcgaccacagcttcgccgtggagtggatgcaggacttcgaggccttccaggacgccctgaaccaggagaccacctacgtgagcaacctgaccagaagcatgagcctggtgctggacgagttctacagcagcctgagagtggtgggcgtgagcgccgtgctgggcaccggcctggacgagctgttcgtgcaggtgaccagcgccgccgaggagtacgagagagagtacagacccgagtacgagagactgaagaagagcctggccaacgccgagagccagcagcagagagagcagctggagagactgagaaaggacatgggcagcgtggccctggacgccggcaccgccaaggacagcctgagccccgtgctgcaccccagcgacctgatcctgaccagaggcaccctggacgaggaggacgaggaggccgacagcgacaccgacgacatcgaccacagagtgaccgaggagagccacgaggagcccgccttccagaacttcatgcaggagagcatggcccagtactggaagagaaacaacaagtag

SEQ ID NO: 56948 - DNA, 840 bp, Artificial Sequence
  derived and/or modified sequence
atgaaatttccctttctccctattctagtgatgaagtttattgagaaggcccagaatatgtctaagtacgtcctgatcgacacacccggacagatagaggtgtttacgtggagcgctagtggaacaattataacagaagccttagcttctagtttcccaacagttgtgatatatgtgatggacacatcccgatctacaaatcccgtgacctttatgtccaatatgctgtacgcttgctccattctgtataaaacgaagctgcctttcattgtcgtcatgaacaagaccgacatcatcgatcactcctttgccgtggaatggatgcaggactttgaagcatttcaggatgcgctgaatcaggagacgacatatgtcagtaacttaactcgctctatgagcttggttctcgacgaattctattctagtctgcgggtggtcggcgtgagtgccgtcttaggaacaggactcgacgagcttttcgtgcaggtgacgtctgccgctgaggagtacgaaagggagtaccggccggagtacgagagactgaaaaaatcgctcgccaacgccgaatctcaacagcagcgggagcagcttgaaagactaaggaaggacatgggctcagttgccctggacgcagggacagcaaaagactcgttgtcccccgtgctgcacccatctgacctcattctgacaagaggcacccttgatgaagaggacgaggaggcggattctgatactgacgacatagatcatcgggttaccgaggaaagccatgaggagcctgccttccagaattttatgcaggagtccatggctcagtattggaaacgaaacaacaagtag

SEQ ID NO: 56949 - DNA, 840 bp, Artificial Sequence
  derived and/or modified sequence
atgaagttccccttcctgcccatcctggtgatgaagttcatcgagaaggcccagaacatgagcaaatatgtgctgattgacaccccaggccagatcgaggtgttcacctggagcgccagcggcaccatcatcacagaggccctggccagcagcttccccaccgtggtgatctacgtgatggacaccagccgcagcaccaaccctgtgaccttcatgagcaacatgctgtatgcctgcagcatcctgtacaagaccaagctgcccttcatcgtggtgatgaacaagacagacatcatcgaccacagctttgctgtggagtggatgcaggactttgaggccttccaggatgccctgaaccaggagaccacctacgtgagcaacctgaccaggtccatgagcctggtgctggatgagttctacagcagcctgcgggtggtgggcgtgtctgctgtgctgggcaccggcctggatgagctgtttgtgcaggtgaccagcgctgctgaggagtatgaaagagagtacagaccagaatatgaaaggctgaagaagagcctggccaatgctgagagccagcagcagcgggagcagctggagcggctgaggaaggacatgggctctgtggccctggatgctggaacagccaaggacagcctgagccctgtgctgcaccccagcgacctgatcctgacccggggcaccctggatgaagaagatgaggaggccgacagcgacacagatgacatcgaccaccgggtgacagaggagagccatgaggagcccgccttccagaacttcatgcaggagagcatggcccagtactggaagaggaacaacaagtag

SEQ ID NO: 56950 - DNA, 840 bp, Artificial Sequence
  derived and/or modified sequence
atgaagttccccttcctgcccatcctggtgatgaagttcatcgagaaagcccagaatatgagcaagtacgtcttaatcgacacacccgggcagatagaggtgtttacttggagcgcaagtggaaccatcataactgaagcgttagcaagctccttcccaaccgtagtgatttatgtgatggatacgtctcggtcaactaaccctgtgactttcatgagcaacatgttgtacgcctgctctatcctgtacaaaaccaagttgcccttcatcgtcgtgatgaacaagaccgacattatcgatcacagctttgctgtggagtggatgcaagatttcgaagcctttcaggatgcactgaaccaggaaaccacgtatgtctccaacctgacacgcagtatgagcctagtgctagatgagttttatagttcactgagagtggtgggcgtctcagcagtgctgggcacaggactcgacgagcttttcgtgcaggtcacatccgccgccgaggagtacgaacgggaataccgtcccgaatacgagcgcctgaagaagagccttgctaacgccgaaagccagcaacagcgcgagcaactcgaaaggctccggaaagatatggggtccgtcgcactggatgctgggactgccaaggactcactttcacccgtgttgcatccttctgatcttattctgacccgtggcacattggatgaggaggatgaagaagccgactccgataccgacgacatcgatcaccgcgtcaccgaggaaagccatgaggaacccgccttccaaaacttcatgcaggagtcaatggcccaatactggaaacgaaacaacaagtag

SEQ ID NO: 56951 - DNA, 840 bp, Artificial Sequence
  derived and/or modified sequence
atgaaattcccttttctccccatcctggtaatgaagttcattgaaaaggcccagaatatgtccaaatatgtgttgattgacaccccagggcagatcgaggtattcacatggtcggccagtgggactatcatcaccgaggctctagctagctcatttccaacagtggtaatctacgtgatggataccagcaggagtaccaatcccgtcactttcatgtccaatatgctttacgcttgttccatcttatacaagaccaagcttcccttcatagtggtgatgaataagactgacatcattgatcactccttcgccgtcgagtggatgcaggactttgaagctttccaggatgctctgaaccaggagactacatacgtaagcaatttgacccgctctatgtcgctcgtgttggacgagttctattcaagcctgcgagtggtcggcgttagtgccgttttaggtacaggcctagatgagctcttcgtgcaagtgacatctgctgctgaagaatatgaacgggagtaccggcctgagtacgagcgcttgaagaaatccctggccaacgccgagagtcagcagcagagagagcagctagagagactgcgaaaggatatggggagcgttgctttagatgccggaacagccaaggattccctcagtcctgtgctccacccatctgacctgatcctgactcggggaactctggatgaagaggacgaagaagccgactcagatacagacgacatcgaccatcgagtgacggaggagagtcacgaagagcctgctttccagaacttcatgcaggaaagcatggcgcagtactggaaacgcaacaacaagtag

SEQ ID NO: 56952 - DNA, 1618 bp, Artificial Sequence
  derived and/or modified sequence
gaataagcccgagcagccggtcctccagtggctccgctccccgttctctgtgggctcaaaatgacagaggctcacaggacacctgcatgcccaaggcactccaccgtatgtgatcaacctggatccagcagtacatgaagttccctttcctgccaatattggtgatgaaatttattgagaaggcccagaacatgtccaaatatgtgttgattgacacacctggacagattgaggtattcacctggtcagcttctgggacaattatcactgaagcccttgcatcctcatttccaacagttgtcatctatgtaatggacacatcgagaagtaccaacccagtgaccttcatgtccaacatgctctatgcctgcagcatcttatacaaaaccaagctgcctttcattgtggtcatgaataaaactgacatcattgaccacagctttgcagtggaatggatgcaggattttgaggctttccaagatgccttgaatcaagagactacatacgtcagtaacctgactcgttcaatgagcctggtgttagatgagttttacagctcactcagggtggtgggtgtctctgctgttctgggtactggattagatgaactctttgtgcaagttaccagtgctgccgaagaatatgaaagggagtatcgtcctgaatatgaacgtctgaaaaaatcactggccaacgcagagagccaacagcagagagaacaactggaacgccttcgaaaagatatgggttctgtagccttggatgcagggactgccaaagacagcttatctcctgtgctgcacccttctgatttgatcctgactcgaggaaccttggatgaagaggatgaggaagcagacagcgatactgatgacattgaccacagagttacagaggaaagccatgaagagccagcattccagaattttatgcaagaatcgatggcacaatactggaagagaaacaataaataggagactttagcacacttcacttgtttctagaagtccagaattttggacctccacgtgaaagaactgttcttacctctgaactgggggctcccataagggataattttcctcagagtagcaaagtttctcttattagagaaatcttgtgactcagatgaagtcagggatagaagacccttggacctggcaggttaatgctgattattccttggcctttcccttgtatttatgcaaggaaggatatactgagctgatactcttccaagcctacaacttcaagttttatcatttgaactcaagtacttttgctgctgaggaatggaatcaaaagaacgtagtctcctggtgaccacctcagatctctattattaggctagatgtatagcctctactcccccagcttcttgctcttgaccctgcactgtaagttgcccttctattagcagccaaggaaaagggaaacatgagcttatccagaacggtggcagagtctccttggcaatcaaccaacgttgctatgaaatatgcctcacactgtatagctcattataggacgtcaggtttgttgaaaaaagtgggcaagacatgattaatgaatcagaatcctgtttcattggtgacttggataaagactttttaatttt

SEQ ID NO: 56953 - protein, 115 aa, Artificial Sequence
  derived and/or modified sequence
MTMRHNWTPDLSPLWVLLLCAHVVTLLVRATPVSQTTTAATASVRSTKDPCPSQPPVFPAAKQCPALEVTWPEVEVPLSWAEGNLAPHPRSPALQPQQSTAAGLRLSTGPAAAQP

SEQ ID NO: 56954 - DNA, 348 bp, Artificial Sequence
  derived and/or modified sequence
atgaccatgagacataactggacccccgatttgagtcccctttgggtgcttttactgtgtgcccacgtggtgactctgctggtccgtgcaactcccgtcagtcagacaaccacggctgcaaccgcaagcgtccggagcaccaaagacccatgtccaagccagccacccgtgttccccgcagcgaagcagtgccccgcactggaagtgacgtggcccgaagtggaagttcctctcagttgggcagaaggtaatttagcgcctcatcctcggtcacctgctcttcaaccccaacagtccaccgccgctgggttaaggttgtcgacaggccctgcggctgcacagccatag

SEQ ID NO: 56955 - DNA, 348 bp, Artificial Sequence
  derived and/or modified sequence
atgactatgcgacacaattggactcctgacctctcaccattgtgggtgctcttactgtgcgctcatgtggttacccttttagtccgagcaactcctgtgagccagacgacaaccgcagctaccgcaagcgtacgaagtacaaaagatccatgccccagccagccacctgtgtttccagcggccaaacaatgtccggctcttgaggttacgtggcccgaggtggaggtgcctctgagctgggcggaaggaaacctagcaccacaccctcgctctccagctttacagccccagcagtcaaccgccgccggcctgagactcagtaccggtcccgcagctgctcagccatag

SEQ ID NO: 56956 - DNA, 348 bp, Artificial Sequence
  derived and/or modified sequence
atgacaatgagacataactggacacccgacctctcccccctatgggttctgcttttgtgcgcccatgtcgtcaccctcctggtccgtgcaacacctgtgagccagactactaccgctgccaccgcatctgtacgctccaccaaagacccatgtccttcccagccccctgtgttccctgcagccaaacagtgccctgccctcgaagttacctggcccgaagtggaagtgcccctctcttgggccgagggcaatctggctcctcacccccggtcccccgctctgcaaccacagcaaagcaccgccgccggccttcgtttaagcaccggccccgccgccgcccagccatag

SEQ ID NO: 56957 - DNA, 348 bp, Artificial Sequence
  derived and/or modified sequence
atgaccatgagacacaactggacccccgacctgagccccctgtgggtgctgctgctgtgcgcccacgtggtgaccctgctggtgagagccacccccgtgagccagaccaccaccgccgccaccgccagcgtgagaagcaccaaggacccctgccccagccagccccccgtgttccccgccgccaagcagtgccccgccctggaggtgacctggcccgaggtggaggtgcccctgagctgggccgagggcaacctggccccccaccccagaagccccgccctgcagccccagcagagcaccgccgccggcctgagactgagcaccggccccgccgccgcccagccctag

SEQ ID NO: 56958 - DNA, 348 bp, Artificial Sequence
  derived and/or modified sequence
atgactatgcgccataactggacaccagatttgagtccattgtgggtgctgctgttatgcgcgcacgtcgtgaccctgctcgtgagagctacaccggtcagtcaaacaaccaccgcagctactgccagcgtacggagtactaaagacccatgtccttcccagccccccgttttccctgcggctaaacagtgtcccgctctggaagtgacctggcccgaggtggaggtgccactgtcctgggccgaaggtaacctggcgcctcaccccaggtctcccgccctgcagccgcaacagagcacggccgcagggctaagactctcaaccggccctgccgcagcccaaccctag

SEQ ID NO: 56959 - DNA, 348 bp, Artificial Sequence
  derived and/or modified sequence
atgaccatgaggcacaactggaccccagacctgagccccctgtgggtgctgctgctgtgtgcccacgtggtgaccctgctggtgcgggccacccctgtgtcccagaccaccacagctgccacagcctctgtgcgcagcaccaaggacccctgccccagccagccccctgtgtttcctgctgccaagcagtgcccagccctggaggtgacctggccagaggtggaggtgcccctgtcctgggccgagggcaacctggccccccaccccaggagccctgccctgcagccccagcagagcacagctgctggcctgcggctgagcacaggccctgctgctgcccagccctag

SEQ ID NO: 56960 - DNA, 348 bp, Artificial Sequence
  derived and/or modified sequence
atgaccatgcggcacaactggacccccgacctgagccccctgtgggttctgctgctgtgtgcccacgtcgtgactctcttggtccgcgccactccagtgtcacagacaaccactgccgccactgccagtgtgcgtagtacgaaggacccatgcccgagccagcctccagtattccctgccgccaaacagtgtcctgctctggaagtgacatggccagaggtggaagtgccgctgtcttgggctgagggaaacttggcccctcatccaaggtctccagcattgcagcctcagcagagtacagccgcagggctgcgactgtccactggccctgcagcagctcagccttag

SEQ ID NO: 56961 - DNA, 1037 bp, Artificial Sequence
  derived and/or modified sequence
agaagaggacgttgtcacagataaagagccaggctcaccagctcctgacgcatgcatcatgaccatgagacacaactggacaccagacctcagccctttgtgggtcctgctcctgtgtgcccacgtcgtcactctcctggtcagagccacacctgtctcgcagaccaccacagctgccactgcctcagttagaagcacaaaggacccctgcccctcccagcccccagtgttcccagcagctaagcagtgtccagcattggaagtgacctggccagaggtggaagtgccactgagctgggctgagggcaaccttgccccccacccaagaagccctgccctccagccacagcagtccacagcagcagggttaagactcagcacagggccagcagcagcacaaccttgaccagagcttgggtcctacctgtctacctggagtgaacagtccctgactgcctgtaggctgcgtggatgcgcaacacaccccctccttctctgctttgggtcccttctctcaccaaattcaaactccattcccacctacctagaaaatcacagcctccttataatgcctcctcctcctgccattctctctccacctatccattagccttcctaacgtcctactcctcacactgctctactgctcagaaaccaccaagactgttgatgccttagccttgcactccagggccctacctgcatttcccacatgactttctggaagcctcccaactattcttgcttttcccagacagctcccactcccatgtctctgctcatttagtcccgtcttcctcaccgccccagcaggggaacgctcaagcctggttgaaatgctgcctcttcagtgaagtcatcctctttcagctctggccgcattctgcagacttcctatcttcgtgctgtatgttttttttttcccccttcactctaatggactgttccagggaagggatgggggcagcagctgcttcggatccacactgtatctgtgtcatccccacatgggtcctcataaaggattattcaatgga

SEQ ID NO: 56962 - RNA, 348 nt, Artificial Sequence
  derived and/or modified sequence
augacuaugcgacacaauuggacuccugaccucucaccauugugggugcucuuacugugcgcucaugugguuacccuuuuaguccgagcaacuccugugagccagacgacaaccgcagcuaccgcaagcguacgaaguacaaaagauccaugccccagccagccaccuguguuuccagcggccaaacaauguccggcucuugagguuacguggcccgagguggaggugccucugagcugggcggaaggaaaccuagcaccacacccucgcucuccagcuuuacagccccagcagucaaccgccgccggccugagacucaguaccggucccgcagcugcucagccauag

SEQ ID NO: 56963 - RNA, 348 nt, Artificial Sequence
  derived and/or modified sequence
augacaaugagacauaacuggacacccgaccucuccccccuauggguucugcuuuugugcgcccaugucgucacccuccugguccgugcaacaccugugagccagacuacuaccgcugccaccgcaucuguacgcuccaccaaagacccauguccuucccagcccccuguguucccugcagccaaacagugcccugcccucgaaguuaccuggcccgaaguggaagugccccucucuugggccgagggcaaucuggcuccucacccccggucccccgcucugcaaccacagcaaagcaccgccgccggccuucguuuaagcaccggccccgccgccgcccagccauag

SEQ ID NO: 56964 - protein, 704 aa, Artificial Sequence
  derived and/or modified sequence
MEDERKNGAYGTPQKYDPTFKGPIYNRGCTDIICCVFLLLAIVGYVAVGIIAWTHGDPRKVIYPTDSRGEFCGQKGTKNENKPYLFYFNIVKCASPLVLLEFQCPTPQICVEKCPDRYLTYLNARSSRDFEYYKQFCVPGFKNNKGVAEVLQDGDCPAVLIPSKPLARRCFPAIHAYKGVLMVGNETTYEDGHGSRKNITDLVEGAKKANGVLEARQLAMRIFEDYTVSWYWIIIGLVIAMAMSLLFIILLRFLAGIMVWVMIIMVILVLGYGIFHCYMEYSRLRGEAGSDVSLVDLGFQTDFRVYLHLRQTWLAFMIILSILEVIIILLLIFLRKRILIAIALIKEASRAVGYVMCSLLYPLVTFFLLCLCIAYWASTAVFLSTSNEAVYKIFDDSPCPFTAKTCNPETFPSSNESRQCPNARCQFAFYGGESGYHRALLGLQIFNAFMFFWLANFVLALGQVTLAGAFASYYWALRKPDDLPAFPLFSAFGRALRYHTGSLAFGALILAIVQIIRVILEYLDQRLKAAENKFAKCLMTCLKCCFWCLEKFIKFLNRNAYIMIAIYGTNFCTSARNAFFLLMRNIIRVAVLDKVTDFLFLLGKLLIVGSVGILAFFFFTHRIRIVQDTAPPLNYYWVPILTVIVGSYLIAHGFFSVYGMCVDTLFLCFLEDLERNDGSAERPYFMSSTLKKLLNKTNKKAAES

SEQ ID NO: 56965 - DNA, 2115 bp, Artificial Sequence
  derived and/or modified sequence
atggaggacgagagaaagaacggcgcctacggcaccccccagaagtacgaccccaccttcaagggccccatctacaacagaggctgcaccgacatcatctgctgcgtgttcctgctgctggccatcgtgggctacgtggccgtgggcatcatcgcctggacccacggcgaccccagaaaggtgatctaccccaccgacagcagaggcgagttctgcggccagaagggcaccaagaacgagaacaagccctacctgttctacttcaacatcgtgaagtgcgccagccccctggtgctgctggagttccagtgccccaccccccagatctgcgtggagaagtgccccgacagatacctgacctacctgaacgccagaagcagcagagacttcgagtactacaagcagttctgcgtgcccggcttcaagaacaacaagggcgtggccgaggtgctgcaggacggcgactgccccgccgtgctgatccccagcaagcccctggccagaagatgcttccccgccatccacgcctacaagggcgtgctgatggtgggcaacgagaccacctacgaggacggccacggcagcagaaagaacatcaccgacctggtggagggcgccaagaaggccaacggcgtgctggaggccagacagctggccatgagaatcttcgaggactacaccgtgagctggtactggatcatcatcggcctggtgatcgccatggccatgagcctgctgttcatcatcctgctgagattcctggccggcatcatggtgtgggtgatgatcatcatggtgatcctggtgctgggctacggcatcttccactgctacatggagtacagcagactgagaggcgaggccggcagcgacgtgagcctggtggacctgggcttccagaccgacttcagagtgtacctgcacctgagacagacctggctggccttcatgatcatcctgagcatcctggaggtgatcatcatcctgctgctgatcttcctgagaaagagaatcctgatcgccatcgccctgatcaaggaggccagcagagccgtgggctacgtgatgtgcagcctgctgtaccccctggtgaccttcttcctgctgtgcctgtgcatcgcctactgggccagcaccgccgtgttcctgagcaccagcaacgaggccgtgtacaagatcttcgacgacagcccctgccccttcaccgccaagacctgcaaccccgagaccttccccagcagcaacgagagcagacagtgccccaacgccagatgccagttcgccttctacggcggcgagagcggctaccacagagccctgctgggcctgcagatcttcaacgccttcatgttcttctggctggccaacttcgtgctggccctgggccaggtgaccctggccggcgccttcgccagctactactgggccctgagaaagcccgacgacctgcccgccttccccctgttcagcgccttcggcagagccctgagataccacaccggcagcctggccttcggcgccctgatcctggccatcgtgcagatcatcagagtgatcctggagtacctggaccagagactgaaggccgccgagaacaagttcgccaagtgcctgatgacctgcctgaagtgctgcttctggtgcctggagaagttcatcaagttcctgaacagaaacgcctacatcatgatcgccatctacggcaccaacttctgcaccagcgccagaaacgccttcttcctgctgatgagaaacatcatcagagtggccgtgctggacaaggtgaccgacttcctgttcctgctgggcaagctgctgatcgtgggcagcgtgggcatcctggccttcttcttcttcacccacagaatcagaatcgtgcaggacaccgccccccccctgaactactactgggtgcccatcctgaccgtgatcgtgggcagctacctgatcgcccacggcttcttcagcgtgtacggcatgtgcgtggacaccctgttcctgtgcttcctggaggacctggagagaaacgacggcagcgccgagagaccctacttcatgagcagcaccctgaagaagctgctgaacaagaccaacaagaaggccgccgagagctag

SEQ ID NO: 56966 - DNA, 2115 bp, Artificial Sequence
  derived and/or modified sequence
atggaagatgaaaggaagaatggtgcctatggcactccacagaagtatgacccaacattcaagggacccatttacaaccgcggctgtacagacatcatttgctgtgtcttcctgcttctggccatcgtaggctacgtggcagtgggaatcatcgcctggactcacggggacccaagaaaggtgatatatcctacagactctcgaggcgagttttgtggacaaaagggaactaaaaacgagaataagccatatctgttttacttcaatatcgtgaaatgtgcatcacctctcgtcctgctggagttccaatgccctactccccagatctgcgttgagaaatgccccgacaggtatcttacctacctgaacgctcgttcctccagggactttgagtactataagcagttttgtgtgccaggcttcaaaaacaacaagggagtggcagaagttcttcaggatggcgattgtccagcggtgttgattccctctaagccacttgctaggcgttgtttcccagccatccatgcatacaagggggtcctaatggttggcaatgagaccacctacgaagatggccatgggagcaggaagaatataaccgatctcgtcgagggcgcgaaaaaggccaacggtgttcttgaggcccggcagttggcaatgcggatctttgaagactataccgtttcctggtactggataattatcggactggtgattgccatggcaatgtcgctcttatttattatccttcttcggttccttgctggaatcatggtgtgggtcatgatcataatggtcatcttggtgcttggctatggtatcttccattgttatatggaatacagcaggctgaggggagaggccggcagtgacgtgtcacttgtggatctggggttccagaccgattttagagtgtacttgcacttgcggcagacttggttagccttcatgataatattgtctatcctcgaggtgatcatcattctgctgctgattttcctccgcaagcggatcttaattgctatcgccctaattaaagaggcaagcagggccgtcggatacgtcatgtgttcactgctgtatcctttggtcactttctttttactctgtctgtgtatcgcgtattgggcgtctactgctgtatttctcagtacctctaacgaagcagtgtacaagatatttgacgatagcccctgcccatttactgccaagacctgtaacccggaaacatttcctagtagtaacgagtctcggcagtgccccaacgcgaggtgccagtttgccttctacgggggcgaaagcggataccacagagctttactggggctgcagatctttaacgccttcatgtttttctggctggccaacttcgttttagcactgggacaggtcactctggccggcgcctttgcttcatactactgggcactgcggaaaccggatgatctcccagcttttccactgttttcagcgttcgggcgagcactcagataccatacgggtagcctcgcctttggtgcactgattcttgccatcgtccagattatccgcgtgattctggagtatctggaccagcggcttaaagccgcagaaaataagttcgctaaatgcctcatgacatgcttgaaatgttgtttttggtgcttggagaagtttatcaagttcctgaatagaaatgcttacataatgattgccatttatggcactaacttttgtacatctgcccggaacgcattcttcctccttatgcgcaacattatcagggtcgctgttctggacaaggtaaccgattttttgtttttacttgggaagctgttgatcgtggggtccgtaggtatactggccttcttcttctttacccacagaatccgcatagtgcaagacaccgcccctccgttgaattactactgggtccccattttgaccgtgatagtagggtcctatctgattgcacacggctttttttctgtctatggcatgtgtgtggacacgctcttcctatgcttcctggaggacttggagcggaatgacggatccgccgaacgcccatacttcatgtctagtactctgaagaagctcctgaacaaaactaataagaaggccgccgagagttag

SEQ ID NO: 56967 - DNA, 2115 bp, Artificial Sequence
  derived and/or modified sequence
atggaggatgagaggaagaatggagcctacggcaccccccagaagtatgaccccaccttcaagggccccatctacaacagaggctgcacagacatcatctgctgcgtgttcctgctgctggccatcgtgggctacgtggccgtgggcatcatcgcctggacccatggagaccccaggaaggtgatctaccccacagacagcagaggagagttctgtggccagaagggcaccaagaatgaaaacaagccctacctgttctacttcaacatcgtgaagtgtgccagccccctggtgctgctggagttccagtgccccaccccccagatctgtgtggagaagtgcccagaccgctacctgacctacctgaatgcccggagcagccgggactttgagtactacaagcagttctgtgtgcccggcttcaagaacaacaagggcgtggccgaggtgctgcaggatggagactgcccagctgtgctgatccccagcaagcccctggcccggcgctgcttccctgccatccacgcctacaagggcgtgctgatggtgggcaatgagaccacctatgaagatggccacggcagcaggaagaacatcacagacctggtggagggcgccaagaaggccaacggggtgctggaggcccggcagctggccatgaggatctttgaggactacacagtgtcctggtactggatcatcatcggcctggtgattgccatggccatgagcctgctcttcatcatcctgctgcgcttcctggccggcatcatggtgtgggtgatgatcatcatggtgatcctggtgctgggctacggcatcttccactgctacatggagtacagccggctgcggggggaggccggcagtgatgtgtccctggtggacctgggcttccagacagacttccgggtgtacctgcacctgcggcagacctggctggccttcatgatcatcctgagcatcctggaggtgatcatcatcctgctgctgatcttcctgaggaagaggatcctgattgccatcgccctgatcaaggaggccagcagagctgtgggctacgtgatgtgcagcctgctgtaccccctggtgaccttcttcctgctgtgcctgtgcatcgcctactgggccagcacagctgtgttcctgagcaccagcaatgaagctgtgtacaagatctttgatgacagcccctgccccttcaccgccaagacctgcaaccctgagaccttccccagcagcaatgaaagccggcagtgccccaatgcccgctgccagtttgccttctacggcggggagagcggctaccaccgggccctgctgggcctgcagatcttcaatgccttcatgttcttctggctggccaactttgtgctggccctgggccaggtgaccctggccggggcctttgccagctactactgggccctgaggaagccagatgacctgcctgccttccccctcttcagcgccttcggccgggccctgcgctaccacacaggcagcctggcctttggagccctgatcctggccatcgtgcagatcatccgggtcatcctggagtacctggaccagaggctgaaggctgctgagaacaagtttgccaagtgcctgatgacctgcctgaagtgctgcttctggtgcctggagaagttcatcaagttcctgaacagaaatgcctacatcatgattgccatctacggcaccaacttctgcaccagcgccagaaatgccttcttcctgctgatgaggaacatcatccgggtggccgtgctggacaaggtgacagacttcctgttcctgctgggcaagctgctgattgtgggctctgtgggcatcctggccttcttcttcttcacccaccgcatcagaattgtgcaggacacagccccacccctgaactactactgggtgcccatcctgaccgtcatcgtgggcagctacctgattgcccacggcttcttctctgtgtatggcatgtgtgtggacaccctcttcctgtgcttcctggaggacctggagagaaatgatggcagcgctgagcggccctacttcatgagcagcaccctgaagaagctgctgaacaagaccaacaagaaggctgctgagagctag

SEQ ID NO: 56968 - DNA, 2115 bp, Artificial Sequence
  derived and/or modified sequence
atggaggacgagcggaagaacggcgcctacggcaccccccagaagtacgatccaaccttcaagggaccgatttacaacaggggctgtactgacatcatttgttgcgtgtttctgctcctggccatcgttggatacgtcgccgtaggcattatcgcctggacacacggagatccaaggaaagtcatctaccccactgattcacgcggggagttttgtggccagaaaggaaccaaaaacgagaacaagccttacctgttttacttcaatatcgtgaaatgcgcctctccactggtgctgcttgagtttcagtgtccaacccctcagatttgtgtggagaagtgccctgacaggtatttaacatatctcaacgcaagaagctcccgggatttcgagtactataagcagttttgtgtgcccggcttcaaaaacaacaaaggagtggctgaggtactgcaagacggagattgcccggcagtgctgataccatccaagcctctcgctaggcgatgcttcccggccatccacgcttataagggcgtcctgatggtcggcaacgagaccacttatgaggacggacatggctccaggaaaaatatcaccgaccttgttgaaggcgctaagaaggccaatggagtcctggaagccagacagctggcaatgcgcatctttgaggattacactgtaagttggtattggatcatcataggcctcgtaattgccatggccatgtcccttctttttatcattctccttagattccttgcaggcattatggtgtgggttatgatcatcatggtcatcctggtgctgggatacggaattttccactgttacatggagtattccaggcttcgtggggaggcaggatccgatgtctccctggttgacctgggattccagaccgactttagagtgtaccttcacttgaggcagacctggctagcatttatgatcatcctttccatcctggaggtgatcatcattctgctgcttatctttctgaggaagaggattctcattgctattgcactcattaaggaggcctcaagagctgttggctacgtcatgtgtagcctgttatatcctctggtgacctttttcctgctgtgtttatgcatagcctactgggcgtctactgctgtgttcctcagcaccagtaatgaggctgtgtataaaatattcgacgatagcccttgtcccttcaccgctaaaacatgcaacccggagacttttccatcaagcaacgagtcccggcagtgccctaatgcaaggtgccagttcgccttctacgggggcgaatccggctaccaccgggctctcctgggattgcagatttttaacgcctttatgtttttttggctggcaaacttcgtactggccctgggccaagtgacattggctggtgcctttgcctcatattactgggccctaagaaagccagatgacttaccggcctttccccttttctccgccttcggcagagccttgagataccataccggttctttggcttttggcgctctgatcctcgccattgtgcagatcataagagtgatactcgagtacttggaccagaggcttaaagcagctgaaaataaatttgcaaagtgtcttatgacatgcctgaaatgctgtttttggtgtcttgaaaagttcattaagtttcttaatcgcaatgcgtatattatgattgccatttacggaaccaacttctgtacttccgctcgcaatgccttttttcttttgatgaggaacatcattcgcgtagcggtgcttgacaaagtcactgattttctgtttctgctcggaaagctgttaatcgtgggttctgtgggcattttagcctttttcttctttacccatcggatcagaatcgtgcaggacactgcccctcccctgaattattattgggttccaattctcaccgtcattgtgggctcataccttatagcccatggttttttcagcgtctatggaatgtgtgtggataccctgttcctgtgcttcctggaagacctggagcgtaatgatggcagtgctgaacgtccgtattttatgtcctccaccttgaagaaattgttgaacaaaacgaataaaaaagcagccgagagttag

SEQ ID NO: 56969 - DNA, 2115 bp, Artificial Sequence
  derived and/or modified sequence
atggaggacgagcggaaaaacggcgcatacggcacccctcagaaatacgatccgactttcaaggggccaatctataatcgcggatgcactgatatcatatgctgcgtttttctgctgctggcaatcgttggatacgtggcagtcggaattatagcttggacccacggggacccacggaaagttatctacccgacggactccaggggagagttctgtggccagaaaggaacaaagaacgaaaacaaaccatatctgttttacttcaacatagtgaaatgcgccagtccgctagtgctcctcgagttccagtgcccaacaccccaaatctgtgtagaaaaatgtccagaccggtatctgacctacttgaacgccaggagctctcgagattttgaatattataaacaattttgtgttcccggattcaagaacaacaagggcgtagccgaagtgctacaggacggcgattgcccagctgtgctgataccatcaaagccgctggccagacggtgcttcccagctattcatgcctataagggagtgctaatggtggggaacgagactacctatgaggatgggcacggtagcaggaagaatatcacagatcttgtggagggagctaagaaggctaatggcgtattggaggctcgtcagcttgcgatgagaattttcgaggactacactgtgagctggtattggattattattggtttggtgattgccatggcaatgtccctgttattcatcatcctgctgaggttccttgcaggtataatggtatgggttatgataattatggtgatcctggtcctcggttacgggattttccactgttatatggagtattcaagactgagaggtgaggctggctccgacgtgagcctcgtcgatttaggcttccagaccgattttagggtgtacctgcacctgcggcagacctggctcgcttttatgatcattctctcaattctggaggtgataattatcctgctgttgatttttctgaggaagcggattctaatcgcaatcgctttaatcaaggaggcctcgcgggctgttggctatgtcatgtgcagcctgttgtatcccctcgtcacatttttccttttatgcctttgcatagcctactgggcctccaccgccgtctttctgtcaaccagtaacgaggccgtctacaagattttcgatgacagcccctgtcccttcacagctaagacctgcaaccctgaaaccttcccgagctcaaacgaaagccgccagtgcccaaatgctagatgccagttcgcattctatgggggtgagtccggatatcatcgggcactactggggctgcaaattttcaacgccttcatgttcttctggctggcaaactttgtcttagctctggggcaggttacactagccggagccttcgcaagctactattgggccctccggaagcctgatgacttacccgcatttcctctgttttctgctttcggcagggcactgcgataccacacggggtctttggccttcggggctctcatactcgctatcgtccaaatcatcagggtcattctggagtacctcgaccagcggctgaaggccgctgaaaacaaatttgcaaagtgtttgatgacttgtctcaaatgctgtttctggtgcctcgaaaaattcataaaatttctgaaccgaaacgcttacattatgatagctatctacgggaccaatttttgtacatctgcacggaacgccttcttcctactcatgcgaaatatcatccgggtggccgtactcgataaggtgaccgattttctctttctactgggcaaactgttgattgtcggctccgtgggtatccttgccttttttttcttcacacacaggatccgtattgtacaagatacagctccgcctctgaactactattgggtcccaattctcacagtgattgtgggtagttacctgatcgctcatggatttttttctgtgtatggaatgtgcgtggatacgcttttcctgtgcttcttagaggacctggagagaaatgatgggtctgctgaaagaccttacttcatgagcagcaccctcaaaaaactgctcaacaaaactaacaaaaaggccgcagagagttag

SEQ ID NO: 56970 - DNA, 3375 bp, Artificial Sequence
  derived and/or modified sequence
gcggggcgctgcagcccgcggagcctcccgcccgcccgggctggggtcgcgctggctcggactccgctccccgccccgccgcggccatggaggacgagcggaaaaacggagcctacggaacgccacagaagtatgatcccactttcaaaggacccatttacaataggggctgcacggatatcatatgctgtgtgttcctgctcctggccattgtgggctacgtggctgtaggcatcatagcctggactcatggagaccctcgaaaggtgatctaccccactgacagccggggcgagttctgcgggcagaagggcacaaaaaacgagaacaaaccctatctgttttatttcaacattgtgaaatgtgccagccccctggttctgctggaattccaatgtcccactccccagatctgcgtggaaaaatgccccgaccgctacctcacgtacctgaatgctcgcagctcccgggactttgagtactataagcagttctgtgttcctggcttcaagaacaataaaggagtggctgaggtgcttcaagatggtgactgccctgctgtcctcatccccagcaaacccttggcccggagatgcttccccgctatccacgcctacaagggtgtcctgatggtgggcaatgagacgacctatgaggatgggcatggctcccggaaaaacatcacagacctggtggagggcgccaagaaagccaatggagtcctagaggcgcggcaactcgccatgcgcatatttgaagattacaccgtctcttggtactggattatcataggcctggtcattgccatggcgatgagcctcctgttcatcatcctgcttcgcttcctggctggtattatggtctgggtgatgatcatcatggtgattctggtgctgggctacggaatatttcactgctacatggagtactcccgactgcgtggtgaggccggctctgatgtctctttggtggacctcggctttcagacggatttccgggtgtacctgcacttacggcagacctggttggcctttatgatcattctgagtatccttgaagtcattatcatcttgctgctcatctttctccggaagagaattctcatcgcgattgcactcatcaaagaagccagcagggctgtgggatacgtcatgtgctccttgctctacccactggtcaccttcttcttgctgtgcctctgcatcgcctactgggccagcactgctgtcttcctgtccacttccaacgaagcggtctataagatctttgatgacagcccctgcccatttactgcgaaaacctgcaacccagagaccttcccctcctccaatgagtcccgccaatgccccaatgcccgttgccagttcgccttctacggtggtgagtcgggctaccaccgggccctgctgggcctgcagatcttcaatgccttcatgttcttctggttggccaacttcgtgctggcgctgggccaggtcacgctggccggggcctttgcctcctactactgggccctgcgcaagccggacgacctgccggccttcccgctcttctctgcctttggccgggcgctcaggtaccacacaggctccctggcctttggcgcgctcatcctggccattgtgcagatcatccgtgtgatactcgagtacctggatcagcggctgaaagctgcagagaacaagtttgccaagtgcctcatgacctgtctcaaatgctgcttctggtgcctggagaagttcatcaaattccttaataggaatgcctacatcatgattgccatctacggcaccaatttctgcacctcggccaggaatgccttcttcctgctcatgagaaacatcatcagagtggctgtcctggataaagttactgacttcctcttcctgttgggcaaacttctgatcgttggtagtgtggggatcctggctttcttcttcttcacccaccgtatcaggatcgtgcaggatacagcaccacccctcaattattactgggttcctatactgacggtgatcgttggctcctacttgattgcacacggtttcttcagcgtctatggcatgtgtgtggacacgctgttcctctgcttcttggaggacctggagaggaatgacggctcggccgagaggccttacttcatgtcttccaccctcaagaaactcttgaacaagaccaacaagaaggcagcggagtcctgaaggccccgtgctccccacctctcaaggagtctcatgccgcagggtgctcagtagctgggtctgttcccccagccccttgggctcacctgaagtcctatcactgccgctctgcccctccccatgagccagatcccaccagtttctggacgtggagagtctggggcatctccttcttatgccaaggggcgcttggagttttcatggctgcccctccagactgcgagaaacaagtaaaaacccattggggcctcttgatgtctgggatggcacgtggcccgacctccacaagctccctcatgcttcctgtcccccgcttacacgacaacgggccagaccacaggaaggacggtgtttgtgtctgagggagctgctggccacagtgaacacccacgtttattcctgcctgctccggccaggactgaaccccttctccacacctgaacagttggctcaagggccaccagaagcatttctttattattattattttttaacctggacatgcattaaagggtctattagctttctttccgtctgtctcaacagctgagatggggccgccaaggagtgccttccttttgctccctcctagctgggagtgacgggtgggagtgtgtgtgcccaggtgggggtgtctcctggctgggaaggagggaaagggagggagagttttgcgggggttggcagtggagagcaggctggagaggagatggctaatagctgtttaatggaaacctgctgggctggagggagttaggctgaatttcccgacttcctctgccagttattgacacagctctctttgtaagagaggaaagaaactaaacccacccaagggatgatgtcagggggagaggtggagggcagatgtcctgggcaaaccgggcccctctgcccacacacctcacttgatccttttgccaaacttgtcaaactcaggggaactggcttcccagttgcccctttgccatattccaagtccccctcagacttcatgtctctgctcatcagcactgtcccaggatcctggagagggagaactcctggccccaggggaaagaggggggggtctcccgtttcctgtgcctgcaccagccctgcccccattgcgtctgcacacccctgcgtgtaactgcattccaaccactaataaagtgcctattgtacaggtcca

SEQ ID NO: 56971 - protein, 900 aa, Artificial Sequence
  derived and/or modified sequence
MGDSGSRRSTLVSRLPIFRRSINRRHDSLPSSPSSSNTVGVHSSSPSSTNSSSGSTGKRRSIFRTPSISFHHKKGSEPKQEPTNQNLSISNGAQPGHSNMQKLSLEEHIKTRGRHSVGFSSSRNKKITRSLTEDFEREKEHSTNKNVFINCLSSGKSEGDDSGFTEDQTRRSVKQSTRKLLPKSFSSHYKFSKPVLQSQSISLVQQSEFSLEVTQYQEREPVLVRASPSCSVDVTERAGSSLQSPLLSADLTTAQTPSEFLALTEDSVSEMDAFSKSGSMASHCDNFGHNDSTSQMSLNSAAVTKTTTELTGTVPCAIMSPGKYRLEGQCSTESNSLPETSAANQKEVLLQIAELPATSVSHSESNLPADSEREENIGLQNGETMLGTNSPRKLGFYEQHKAIAEHVKGIHPISDSKIIPTSGDHHIFNKTSHGYEANPAKVLASSLSPFREGRFIERRLRSSSEGTAGSSRMILKPKDGNIEEVNSLRKQRAGSSSSKMNSLDVLNNLGSCELDEDDLMLDLEFLEEQSLHPSVCREDSYHSVVSCAAVVLTPMEPMIEMKKREEPEFPEPSKQNLSLKLTKDVDQEARCSHISRMPNSPSADWPLQGVEENGGIDSLPFRLMLQDCTAVKTLLLKMKRVLQESADMSPASSTTSLPVSPLTEEPVPFKDIMKDECSMLKLQLKEKDELISQLQEELGKVRHLQKAFASRVDKSTQTELLCYDGLNLKRLETVQGGREATYRNRIVSQNLSTRDRKAIHTPTEDRFRYSAADQTSPYKNKTCQLPSLCLSNFLKDKELAEVIKHSRGTYETLTSDVTQNLRATVGQSSLKPTAKTEGLSTFLEKPKDQVATARQHSTFTGRFGQPPRGPISLHMYSRKNVFLHHNLHSTELQTLGQQDG

SEQ ID NO: 56972 - protein, 677 aa, Artificial Sequence
  derived and/or modified sequence
MGDSGSRRSTLVSRLPIFRRSINRRHDSLPSSPSSSNTVGVHSSSPSSTNSSSGSTGKRRSIFRTPSISFHHKKGSEPKQEPTNQNLSISNGAQPGHSNMQKLSLEEHIKTRGRHSVGFSSSRNKKITRSLTEDFEREKEHSTNKNVFINCLSSGKSEGDDSGFTEDQTRRSVKQSTRKLLPKSFSSHYKFSKPVLQSQSISLVQQSEFSLEVTQYQEREPVLVRASPSCSVDVTERAGSSLQSPLLSADLTTAQTPSEFLALTEDSVSEMDAFSKSGSMASHCDNFGHNDSTSQMSLNSAAVTKTTTELTGTVPCAIMSPGKYRLEGQCSTESNSLPETSAANQKEVLLQIAELPATSVSHSESNLPADSEREENIGLQNGETMLGTNSPRKLGFYEQHKAIAEHVKGIHPISDSKIIPTSGDHHIFNKTSHGYEANPAKVLASSLSPFREGRFIERRLRSSSEGTAGSSRMILKPKDGNIEEVNSLRKQRAGSSSSKMNSLDVLNNLGSCELDEDDLMLDLEFLEEQSLHPSVCREDSYHSVVSCAAVVLTPMEPMIEMKKREEPEFPEPSKQNLSLKLTKDVDQEARCSHISRMPNSPSADWPLQGVEENGGIDSLPFRLMLQDCTAVKTLLLKMKRVLQESADMSPASSTTSLPVSPLTEEPVPFKDYYKRPF

SEQ ID NO: 56973 - DNA, 2703 bp, Artificial Sequence
  derived and/or modified sequence
atgggcgacagcggcagcagaagaagcaccctggtgagcagactgcccatcttcagaagaagcatcaacagaagacacgacagcctgcccagcagccccagcagcagcaacaccgtgggcgtgcacagcagcagccccagcagcaccaacagcagcagcggcagcaccggcaagagaagaagcatcttcagaacccccagcatcagcttccaccacaagaagggcagcgagcccaagcaggagcccaccaaccagaacctgagcatcagcaacggcgcccagcccggccacagcaacatgcagaagctgagcctggaggagcacatcaagaccagaggcagacacagcgtgggcttcagcagcagcagaaacaagaagatcaccagaagcctgaccgaggacttcgagagagagaaggagcacagcaccaacaagaacgtgttcatcaactgcctgagcagcggcaagagcgagggcgacgacagcggcttcaccgaggaccagaccagaagaagcgtgaagcagagcaccagaaagctgctgcccaagagcttcagcagccactacaagttcagcaagcccgtgctgcagagccagagcatcagcctggtgcagcagagcgagttcagcctggaggtgacccagtaccaggagagagagcccgtgctggtgagagccagccccagctgcagcgtggacgtgaccgagagagccggcagcagcctgcagagccccctgctgagcgccgacctgaccaccgcccagacccccagcgagttcctggccctgaccgaggacagcgtgagcgagatggacgccttcagcaagagcggcagcatggccagccactgcgacaacttcggccacaacgacagcaccagccagatgagcctgaacagcgccgccgtgaccaagaccaccaccgagctgaccggcaccgtgccctgcgccatcatgagccccggcaagtacagactggagggccagtgcagcaccgagagcaacagcctgcccgagaccagcgccgccaaccagaaggaggtgctgctgcagatcgccgagctgcccgccaccagcgtgagccacagcgagagcaacctgcccgccgacagcgagagagaggagaacatcggcctgcagaacggcgagaccatgctgggcaccaacagccccagaaagctgggcttctacgagcagcacaaggccatcgccgagcacgtgaagggcatccaccccatcagcgacagcaagatcatccccaccagcggcgaccaccacatcttcaacaagaccagccacggctacgaggccaaccccgccaaggtgctggccagcagcctgagccccttcagagagggcagattcatcgagagaagactgagaagcagcagcgagggcaccgccggcagcagcagaatgatcctgaagcccaaggacggcaacatcgaggaggtgaacagcctgagaaagcagagagccggcagcagcagcagcaagatgaacagcctggacgtgctgaacaacctgggcagctgcgagctggacgaggacgacctgatgctggacctggagttcctggaggagcagagcctgcaccccagcgtgtgcagagaggacagctaccacagcgtggtgagctgcgccgccgtggtgctgacccccatggagcccatgatcgagatgaagaagagagaggagcccgagttccccgagcccagcaagcagaacctgagcctgaagctgaccaaggacgtggaccaggaggccagatgcagccacatcagcagaatgcccaacagccccagcgccgactggcccctgcagggcgtggaggagaacggcggcatcgacagcctgcccttcagactgatgctgcaggactgcaccgccgtgaagaccctgctgctgaagatgaagagagtgctgcaggagagcgccgacatgagccccgccagcagcaccaccagcctgcccgtgagccccctgaccgaggagcccgtgcccttcaaggacatcatgaaggacgagtgcagcatgctgaagctgcagctgaaggagaaggacgagctgatcagccagctgcaggaggagctgggcaaggtgagacacctgcagaaggccttcgccagcagagtggacaagagcacccagaccgagctgctgtgctacgacggcctgaacctgaagagactggagaccgtgcagggcggcagagaggccacctacagaaacagaatcgtgagccagaacctgagcaccagagacagaaaggccatccacacccccaccgaggacagattcagatacagcgccgccgaccagaccagcccctacaagaacaagacctgccagctgcccagcctgtgcctgagcaacttcctgaaggacaaggagctggccgaggtgatcaagcacagcagaggcacctacgagaccctgaccagcgacgtgacccagaacctgagagccaccgtgggccagagcagcctgaagcccaccgccaagaccgagggcctgagcaccttcctggagaagcccaaggaccaggtggccaccgccagacagcacagcaccttcaccggcagattcggccagccccccagaggccccatcagcctgcacatgtacagcagaaagaacgtgttcctgcaccacaacctgcacagcaccgagctgcagaccctgggccagcaggacggctag

SEQ ID NO: 56974 - DNA, 2703 bp, Artificial Sequence
  derived and/or modified sequence
atgggcgattccggctcaaggaggagtactctggtgagccgcctgccgatcttccggagaagcattaatagacggcacgacagtctcccctcgagtccttccagttctaacaccgtgggcgttcatagctcttctccgtcaagcacaaacagctcctccgggtccacaggtaaacggcggtccattttcagaactccaagcatttcatttcaccacaagaagggctccgaacctaagcaagagccaacaaatcagaatcttagtatatccaacggcgcccagcctggccactcaaacatgcagaagctgagtttagaggaacacattaagacgagggggcgccactctgtgggcttctcctctagccgcaataaaaaaattacacgatctctgactgaagacttcgagcgggagaaagaacactccaccaacaagaacgtatttatcaattgtttatcttccggcaagagcgaaggggatgactccgggttcaccgaggatcagacgcggcggtcagtcaagcaaagcactaggaaactgctgccgaagtcctttagcagtcactacaagttctccaagcccgtcctgcagtcacagtccatctccctggtgcaacagtcagaattttcactcgaggtgacacagtatcaggagcgagaacccgtgttggtccgtgcgagccctagctgtagcgtggacgtcacagagagggccggatctagtctgcagtcacctctgctcagtgccgatctcaccacagcacaaacaccttctgagttcctcgcactcacagaggacagtgtgtccgaaatggatgccttctctaaatctgggtctatggccagccactgcgataattttggccataatgatagtaccagtcagatgtcactgaattccgccgccgtgacaaagacaacgaccgagctcactggcacggtgccctgcgcaatcatgagtccggggaagtaccggctggagggtcagtgctctaccgagagtaatagcctgcctgaaacttctgctgcaaatcaaaaagaagtgcttctgcaaatagctgaactgcctgccacatccgtgtcccacagtgagtctaatttgcccgccgacagtgaacgcgaggagaacattggccttcagaacggggaaaccatgctaggcacaaacagtccccgcaagctagggttctatgagcagcacaaggctatcgctgagcatgtaaaaggtatccaccctatctctgattctaagattatacccacttcaggagatcaccatatcttcaacaaaaccagccacggttacgaggctaaccctgcaaaggtgctcgcatccagcctttccccgttccgcgaagggagattcattgaaaggcggctgaggtcaagttcagaagggaccgccggctcctccaggatgattctcaagccgaaagatggtaatatcgaagaggtgaacagcctgcgaaaacagagagccggttcaagctcttcgaagatgaactctcttgacgttctgaacaaccttggtagctgtgaattggacgaggacgacctgatgttagacctcgagttcctcgaggagcaaagtctccaccccagcgtctgtcgcgaggattcctatcatagcgtcgtgagctgtgccgcagtggtgctgaccccaatggagcccatgatcgaaatgaagaaacgagaggaacccgaattccccgaacccagcaagcagaacctcagcctaaaacttacaaaagacgtcgatcaggaggccagatgcagtcacatctcaaggatgccaaatagcccgtcagcagattggccactgcagggagtggaagagaacggtgggatcgattcgttaccattcaggctcatgcttcaggattgtaccgcggtaaagacccttctgctgaaaatgaagcgtgtcctgcaagagtccgccgacatgtcccctgccagcagcactacgtcactccctgtgtctcccttgaccgaggagcccgtgccattcaaggatatcatgaaggacgaatgcagcatgctcaaactgcagttaaaggagaaggatgagctgatctctcaactgcaggaggaactgggtaaagttagacacctgcaaaaagcctttgccagtcgcgtggacaagagtactcagactgaactgctttgctacgatggcttgaacctcaagcggctggaaacagtgcagggaggccgggaggctacctatcgcaataggattgtcagtcagaacctatctacacgagataggaaagcgattcatactcccactgaggaccggttcagatattccgccgctgatcagacctccccttataagaacaagacctgtcagctgccaagtttgtgtctttccaactttctgaaggacaaggagttggctgaggtcattaagcactctagaggtacatacgaaacactcacctctgatgtgacacagaatctcagggctactgtaggccagtccagcctgaagccaaccgcaaaaaccgaaggcttatctacgttcttagagaagccgaaggatcaagtggccacagcccgtcagcattccacctttacgggccgctttgggcagccaccgcgcggtcccatcagccttcacatgtatagtcgtaagaacgtgttcttacatcacaacctccattccactgagttgcaaacacttggccagcaggatggctag

SEQ ID NO: 56975 - DNA, 2703 bp, Artificial Sequence
  derived and/or modified sequence
atgggcgactctggtagccgtcgatcaacgctcgtgtcaaggttaccaatctttaggcgctccatcaaccgtaggcacgactccctgccaagtagcccgtcttcgtcgaacaccgtcggggtgcactcaagcagcccgtcctcaactaatagctccagcggttccacaggtaaacggaggtctatattcagaacaccatctattagctttcatcacaagaaagggtccgaacccaaacaagagcctacaaaccagaacctgagtatctctaatggtgcccagccgggccactccaatatgcagaagctgtcactggaagaacatatcaagaccagaggacggcattccgtcgggttcagttccagtcgcaacaagaagatcacccgatctctgacagaagatttcgagcgggaaaaggaacacagtaccaacaaaaacgtctttatcaactgtctcagcagtgggaaatctgaaggcgacgatagcggtttcacagaggaccagacgcggcgctctgtgaagcagtcgacaagaaaactgctccctaagtccttttcctctcattacaaattttctaagccggttttgcagtcacagtctataagcctcgttcagcagtcagagttctccttagaagtcactcagtaccaggagcgggaaccagtccttgtgagagcatcccccagttgtagcgtggatgtcacagaaagggccgggagcagcctacagtctcccctgctcagcgctgatctgactaccgctcaaaccccatctgagtttctggccctgaccgaggactcagtttctgagatggatgcattttctaaatcgggctcaatggcctcccactgcgacaatttcgggcacaacgactcgacttctcagatgagcctcaacagtgccgcagtgaccaagaccacgaccgagctgaccgggacggtcccttgcgcaatcatgtctcccggtaaataccgactggagggtcagtgttccacagagtccaacagcctgcccgagacatccgctgccaaccagaaagaagtgctcctgcaaatcgcggagctgcctgccacctcagttagccattccgaatccaacctgcccgcagacagtgagcgagaggagaatattggcctacagaatggcgaaaccatgcttggtaccaactcccccaggaagctgggcttttacgaacagcacaaagctatcgctgagcacgtaaagggaatccatccaatctcagactcaaaaatcattcccactagcggtgatcaccatatctttaacaaaaccagtcacggttatgaggctaatcccgccaaggttctggcgagctcattgtcaccatttagggaagggcggttcattgagaggcgactacgcagctcttctgaagggactgctggttcttccagaatgatcctcaagccaaaagatggcaacatcgaggaggtgaattcactgaggaagcagagagcagggagtagctccagtaaaatgaactctctcgacgtgctcaacaatctcggctcctgcgagctcgacgaggacgacctcatgcttgatctcgaattccttgaggaacagtctcttcatccctccgtgtgccgggaagactcctatcactccgtggtttcttgcgccgccgtcgttctgacccccatggagcctatgattgagatgaagaaacgcgaagagccagagtttccagagcctagcaagcagaatttatctctaaagctgactaaagatgtggaccaggaggctagatgcagccatatatcacgaatgcccaatagcccaagcgcagattggccactgcagggggtggaggagaatggtggcatagacagcctcccctttcggctgatgctccaggattgtactgcagtgaaaactctcctattgaaaatgaaaagagtcctccaggaaagtgctgacatgtcaccagcgtccagtactacgagcctcccagtttctccactgactgaagaacccgtgccttttaaggatattatgaaggatgagtgcagtatgctgaagttgcaactgaaggagaaagatgaactcatcagccagttacaggaggagctcgggaaggtgagacatctccagaaggctttcgcctcccgcgtggataagtccactcagactgagctgctgtgctatgatggactgaatctgaagcgcctggaaaccgtgcagggaggcagggaggctacttacagaaataggatcgtatcacagaatctatcaacacgggacaggaaggcaattcatactcccacagaggaccgcttccgctacagcgctgcagatcagacttctccttataaaaacaagacatgccagctgccgtcactctgcctgtccaacttcctgaaggataaggaattagctgaagttattaaacatagcagagggacctacgagacccttacatccgacgttacccagaacctgcgcgccacggtgggccagtcttccttgaaacctaccgcaaaaaccgaaggactgtccacgttcttagaaaagccgaaagaccaagtagccaccgcccgacagcactcaacgttcactgggcggttcggacagcctccccgaggtccgatttctctgcacatgtacagtcgaaaaaacgtctttctccaccataacctgcattcaactgaactgcagaccttggggcagcaggacggctag

SEQ ID NO: 56976 - DNA, 3057 bp, Artificial Sequence
  derived and/or modified sequence
gttaccatcgagaccggggctgtgtatgctcgaggtgcagggagctaatgtataaggagttaaatgaactcttgctgctgccaaatatgttgttatcactaactgcaccgctgctgtcattagtgctgctgccaacactgcaagccctgctgctgccagtgccaattctgctgatgccttgggctctccatgtcccagggtgattccatagacaagcagctgcttttagatttcacttgctcattacctgtagatcctttgccttaggactcaagcttaagcccatgaagcctgggatagaagacaattggaggctgcaaagttggctttcacagtgcaagcctttgattcccaatgggggactcaggatcaagacgatctaccctggtctcccggttgccaatattcagaagaagtattaacagaagacatgattctcttccttcttcaccttcttccagtaatacagttggtgtccacagttcctctccttccagcactaactcaagctcaggtagcacaggtaaacggaggagcatattccgtactccttccattagcttccaccataagaaggggagtgagcctaagcaagagcctaccaaccagaaccttagtatttcaaatggtgctcaacctggtcacagcaatatgcagaaactgagtttggaagaacatattaagaccaggggaagacattctgttggttttagtagttcacgaaataagaagataacaagatctttgacagaggattttgaaagggaaaaagagcactcaactaacaagaatgtctttataaattgtctaagttctggcaaaagtgaaggggatgattctggtttcacagaagaccaaactcgtcgttctgttaagcagtcaacaaggaagctactccctaaatctttttcatctcactataaattttctaagccagttctacagagccaatccatttcattggtacaacagtctgaattctcattggaagttacacagtaccaagagagagaacctgtattagtaagagcttcgccatcctgttctgtggatgtaacagaacgggcaggaagctctttacaatctcctttgctttctgctgatcttaccacagctcagacaccttcagaatttttagccttgactgaagattctgtgtctgaaatggatgcattttctaaaagtggaagcatggcatcccactgtgacaactttggccacaatgattctacctctcagatgtccctcaattctgctgctgttacaaagacaacaacagaacttacgggaactgttccctgtgcaattatgtctcctgggaaatataggttagagggtcaatgtagcactgaatctaattcattaccggaaacctctgctgctaatcagaaggaagtgttattacaaattgctgaactacctgctacaagtgtgagccactcagagagtaacctaccagcagatagtgaaagagaagaaaatatagggttacaaaatggtgaaacaatgctggggacaaactccccaaggaaacttggattttatgagcaacataaagcaatagcggaacatgtaaaagggatccatcctatttcagattcaaagataatacctacttctggtgatcatcatatttttaacaaaacatcacatggatatgaagcaaatcctgccaaagttcttgccagtagtctcagtccatttcgtgaaggaagatttatagagaggagactgcgatcctcgtcagaaggcactgcagggagtagcagaatgattttgaaaccgaaagatggaaatatagaagaagttaatagtttaagaaagcaaagagcaggttcttcatcttcaaaaatgaacagtttggatgttttgaataatttgggatcttgtgaactggatgaagatgatctaatgcttgatcttgaatttttagaggaacagagtcttcacccttctgtttgccgggaggactcatatcactctgtcgtctcatgtgccgcagtagttcttactcctatggaaccaatgatagaaatgaagaaaagagaagaaccagaatttcctgagccttccaaacagaatctttccctgaaattaacaaaggacgttgatcaagaagccaggtgttcccacatcagccgaatgcccaacagtccatctgcggattggcctctacaaggtgtggaagaaaacggaggcatagattctctgccattcagactgatgttacaggactgcacggcagtcaagacgttattattaaagatgaagagagttcttcaagagagtgcagacatgagtccagcaagcagtaccacgtcacttcctgttagtcctcttactgaagagccagtgcctttcaaggatataatgaaagatgaatgctcgatgctcaagctgcagctgaaagagaaggatgaactcatttcccaacttcaggaagagctgggaaaagtccggcatttacagaaggcttttgcttcaagagtagataaatccacacagactgaactactatgctatgatggtttaaacttgaaaagactagagacagtacaaggagggagagaggctacatatcgaaatcgaattgtgagccaaaatctcagcacaagggacagaaaagcaatacatactcccaccgaggaccgttttaggtattcggcagcggaccagacaagcccctacaaaaacaagacctgtcaactcccaagtctctgtttaagtaatttcctgaaggacaaggaactagcagaagttatcaaacattcaagaggaacttatgaaaccctcacttcagacgttacacagaacttacgggccaccgttgggcagagctctctgaagccaacagctaagacagaagggctctccacgttcttagagaaaccaaaggaccaagttgctacggcccgacagcattcgacctttacaggcaggtttggacagccacccagagggccaatctctttacacatgtacagcaggaagaatgtgtttctccaccacaatttacacagcactgagctgcaaactctaggccagcaggatgggtaa

SEQ ID NO: 56977 - DNA, 5847 bp, Artificial Sequence
  derived and/or modified sequence
gtctcaacatgactgactgggaagcggtggctcgggcagagcagctccgctggcgcaggcaggaggagcaggaggattattaaataacgcagctggactctgtgcaactgggagtggagaggagcccaacagccgagaaggggagggagggcagaggagggggaccaggaaggacacccccgtgccccgaagacataaatccctgagtgcccgggaggagccttaacaagcgcacggagccctcaaggctgcaaagttggctttcacagtgcaagcctttgattcccaatgggggactcaggatcaagacgatctaccctggtctcccggttgccaatattcagaagaagtattaacagaagacatgattctcttccttcttcaccttcttccagtaatacagttggtgtccacagttcctctccttccagcactaactcaagctcaggtagcacaggtaaacggaggagcatattccgtactccttccattagcttccaccataagaaggggagtgagcctaagcaagagcctaccaaccagaaccttagtatttcaaatggtgctcaacctggtcacagcaatatgcagaaactgagtttggaagaacatattaagaccaggggaagacattctgttggttttagtagttcacgaaataagaagataacaagatctttgacagaggattttgaaagggaaaaagagcactcaactaacaagaatgtctttataaattgtctaagttctggcaaaagtgaaggggatgattctggtttcacagaagaccaaactcgtcgttctgttaagcagtcaacaaggaagctactccctaaatctttttcatctcactataaattttctaagccagttctacagagccaatccatttcattggtacaacagtctgaattctcattggaagttacacagtaccaagagagagaacctgtattagtaagagcttcgccatcctgttctgtggatgtaacagaacgggcaggaagctctttacaatctcctttgctttctgctgatcttaccacagctcagacaccttcagaatttttagccttgactgaagattctgtgtctgaaatggatgcattttctaaaagtggaagcatggcatcccactgtgacaactttggccacaatgattctacctctcagatgtccctcaattctgctgctgttacaaagacaacaacagaacttacgggaactgttccctgtgcaattatgtctcctgggaaatataggttagagggtcaatgtagcactgaatctaattcattaccggaaacctctgctgctaatcagaaggaagtgttattacaaattgctgaactacctgctacaagtgtgagccactcagagagtaacctaccagcagatagtgaaagagaagaaaatatagggttacaaaatggtgaaacaatgctggggacaaactccccaaggaaacttggattttatgagcaacataaagcaatagcggaacatgtaaaagggatccatcctatttcagattcaaagataatacctacttctggtgatcatcatatttttaacaaaacatcacatggatatgaagcaaatcctgccaaagttcttgccagtagtctcagtccatttcgtgaaggaagatttatagagaggagactgcgatcctcgtcagaaggcactgcagggagtagcagaatgattttgaaaccgaaagatggaaatatagaagaagttaatagtttaagaaagcaaagagcaggttcttcatcttcaaaaatgaacagtttggatgttttgaataatttgggatcttgtgaactggatgaagatgatctaatgcttgatcttgaatttttagaggaacagagtcttcacccttctgtttgccgggaggactcatatcactctgtcgtctcatgtgccgcagtagttcttactcctatggaaccaatgatagaaatgaagaaaagagaagaaccagaatttcctgagccttccaaacagaatctttccctgaaattaacaaaggacgttgatcaagaagccaggtgttcccacatcagccgaatgcccaacagtccatctgcggattggcctctacaaggtgtggaagaaaacggaggcatagattctctgccattcagactgatgttacaggactgcacggcagtcaagacgttattattaaagatgaagagagttcttcaagagagtgcagacatgagtccagcaagcagtaccacgtcacttcctgttagtcctcttactgaagagccagtgcctttcaaggatataatgaaagatgaatgctcgatgctcaagctgcagctgaaagagaaggatgaactcatttcccaacttcaggaagagctgggaaaagtccggcatttacagaaggcttttgcttcaagagtagataaatccacacagactgaactactatgctatgatggtttaaacttgaaaagactagagacagtacaaggagggagagaggctacatatcgaaatcgaattgtgagccaaaatctcagcacaagggacagaaaagcaatacatactcccaccgaggaccgttttaggtattcggcagcggaccagacaagcccctacaaaaacaagacctgtcaactcccaagtctctgtttaagtaatttcctgaaggacaaggaactagcagaagttatcaaacattcaagaggaacttatgaaaccctcacttcagacgttacacagaacttacgggccaccgttgggcagagctctctgaagccaacagctaagacagaagggctctccacgttcttagagaaaccaaaggaccaagttgctacggcccgacagcattcgacctttacaggcaggtttggacagccacccagagggccaatctctttacacatgtacagcaggaagaatgtgtttctccaccacaatttacacagcactgagctgcaaactctaggccagcaggatgggtaattaaatcaccgtattcctgtctttgggtaggataaagatggttagtgtttctcgtgcatagttcatattaaaattgtcatgtactttttcttacattttagttataaacagagttgtgttgttgggttttttttcttagtcataaacaaagacttgtgggttttttttttccaagagtgaaagtttgagcatgttaattgaactaggttgcattgccttgaagactttactatataggtgtataataaatgggaccatcatgatcgtttatatagtccataatttatttattttttatctctatcacttactgatatgcattaaggtttcagaagataatatcaaatagcaatctgttcactgttaatggtgttactataaaagtagacctgatgaaaaatagataaaggaattataaagaattttaaattatataattaatagaaggaggaaaaaagagaaatgttaacgtcttatatttggtggtatatttatttgaagaatgtggcttgcttgcatgtaacctagagatgtgtttgtctctattacatacattcaagctcatcttgtgatactagtaagggggaaatggctgtattttttttcctttaaacgtttagttcatactagttcacaaaggatttcagacagagtaattgctagccaaatagagaatgacagctctgatctttgaaaaattttgcttttagtttttgttattgatgttgaagtaccgtgacataacacaaggtgataaagttggttgaattttgtcagatgatgcataaatactgacatgctatattctttgagccactgtcatggcaatataaacattttttcaaaatttcaaggatgaaacatcctaagaaaattattctttttctttactttccttattttttaaaatgttcttttttatgtaaatccaattttggtttatatacatcaacccatatctataattttatgaactgaagaacagaaagtcagtattttagtagccagcatacaatattctgactatgcagaaatctagatttggaacaaaagtaaagtaaatgtgaacattggcaatttaatcttagaaataagcttctaacaggaatatttaaaacccatttgatggcaaatatttctctttgacaaataaggcccaaatatgttataatatgttatatacttatgtgcactttagatcaatatatgaattgatctatggataattccatcatgttcaattagtagcagagcagaatcaaagagtacaattgaatacataaataaataatttttaaaagactaataggaatcaaggctgcagttttcttatacacatcagagctgttaagtacatccacattagccatagtccatgcaaattgaaactgtcatacctactgcatgatctgtttcccttgcattttctaacagaatctgtcagcgtgcacaagcaagatgaacaaagggaaattgagatagcagttttagcatggcatctgacaacttgcttaaattaaagctgtgtgcaaaatgcatctcctattataaaaatgtatttgtgccctgtgctttggggaaaagccattagacactccacccctgagctttaactactgaactttgatacatttgcaaacttagattggaactgataaagtaaggagtcgagtggatatgttgtacttgtaattttggttttccaaaggaacacacatgtgcatcaaggcagacatttgccaaatgttttctttctttgcgtgtttgtaattctgccaaaagagaacaatatacactgcaaattgcttgacttaatgagattgccatctaaagttcccaccatactttggaagctataatgatcatgcagatatacactttgggctgggcaatatttaagaaatgataggaaaatagaaaaatcatgattattaattgtggaattcagcttgatttgtcctaaatgttggtgtctgttgctagagtattttaaatctgtacataaataagcatgataaaataatcaaggattttttcccaggatatggaagaactatgtatcacaaataatgtttttgatttggacttttggagttgatagttttgttttcctggaagatagacttttgaattatactttataaaaataatctatttatagaagatctgtcatttaatagacattttaagagatgttttaaacgctagtattttcttgaaaaatcttttttaaagctgaatcattcaaaagaaaacctggattaaacagttcgattttaaaaggaagggtattttttggaaatatcatcttaaagctgttttgtatcagtattttcaacattgttataatattatttgtaatactaagtgtaactcaggcctggagaaggtgtaagcccactatgctaatgtacatcagtaactgtaaaacaggggttctttgtaagttcctcttgtgtatatatagtaacttataacaatggcatgtgggcattctttcagtgaattgctttctttgtactaaaatctctagttttctaagacagttccatgtataaaaatgatttatgcatttctccaaggcggtacatatccaaagacatgacaccagggggaaaaagtgcttgtttttctgatggaagcagtggtcttttcttttctttcctctttcttttgtgcatgtgtatgtgtagctaagcctaaataaccctgtaaaatttctgctgcaaattgtctcttctgaatttagaatgtgttttaaaggaacacttaggaagagaaataccttgaagaaaagctgtttccacctgaaataaactgttcccatttttataattattggaacatgaaactgta

SEQ ID NO: 56978 - DNA, 2703 bp, Artificial Sequence
  derived and/or modified sequence
atgggagacagcggcagcagaagaagcaccctggtgtcccggctgcccatcttcagaagaagcatcaacagaagacatgacagcctgcccagcagccccagcagcagcaacacagtgggcgtgcacagcagcagccccagcagcaccaacagcagcagcggcagcacaggcaagagaagaagcatcttccgcacccccagcatctccttccaccacaagaagggcagcgagcccaagcaggagcccaccaaccagaacctgagcatcagcaatggagcccagcccggccacagcaacatgcagaagctgagcctggaggagcacatcaagacccggggccgccacagcgtgggcttcagcagcagcaggaacaagaagatcaccaggagcctgacagaagattttgagcgggagaaggagcacagcaccaacaagaatgtgttcatcaactgcctgagcagcggcaagtcagaaggagatgacagcggcttcacagaggaccagacccggcgctctgtgaagcagagcaccaggaagctgctgcccaagagcttcagcagccactacaagttcagcaagcctgtgctgcagagccagagcatcagcctggtgcagcagagcgagttcagcctggaggtgacccagtaccaggagcgggagcctgtgctggtgcgggccagccccagctgcagcgtggatgtgacagagcgggccggcagcagcctgcagagccccctgctgtctgctgacctgaccacagcccagacccccagcgagttcctggccctgacagaagattctgtgtctgagatggatgccttcagcaagagcggctccatggccagccactgtgacaactttggccacaatgacagcaccagccagatgagcctgaacagcgctgctgtgaccaagaccaccacagagctgactggaacagtgccctgtgccatcatgagccctgggaagtaccgcctggagggccagtgcagcacagagagcaacagcctgcctgagaccagcgctgccaaccagaaggaggtgctgctgcagattgctgagctgcctgccacctctgtgagccacagcgagagcaacctgcctgctgacagcgagcgggaggagaacatcggcctgcagaatggagagaccatgctgggcaccaacagccccaggaagctgggcttctatgagcagcacaaggccatcgccgagcacgtgaagggcatccaccccatcagtgacagcaagatcatccccaccagcggggaccaccacatcttcaacaagaccagccacggctatgaggccaacccagccaaggtgctggccagcagcctgagccccttccgggagggccgcttcatcgagcggcggctgcggagcagcagcgagggcacagctggcagcagcaggatgatcctgaagcccaaggatggcaacatcgaggaggtgaacagcctgaggaagcagagagctggcagcagcagcagcaagatgaacagcctggatgtgctgaacaacctgggcagctgtgagctggatgaagatgacctgatgctggacctggagttcctggaggagcagagcctgcaccccagcgtgtgccgggaggacagctaccacagcgtggtgtcctgtgccgctgtggtgctgacccccatggagcccatgattgagatgaagaagcgggaggagcctgagttccctgagcccagcaagcagaacctgagcctgaagctgaccaaggatgtggaccaggaggcccgctgcagccacatcagcaggatgcccaacagccccagcgctgactggcccctgcagggcgtggaggagaatggaggcatcgacagcctgcccttccggctgatgctgcaggactgcacagctgtgaagaccctgctgctgaagatgaagagggtgctgcaggagagcgctgacatgagccctgccagcagcaccaccagcctgcctgtgagccccctgacagaggagcctgtgcccttcaaggacatcatgaaggatgagtgcagcatgctgaagctgcagctgaaggagaaggatgagctgatcagccagctgcaggaggagctgggcaaggtgcgccacctgcagaaggcctttgccagccgggtggacaagagcacccagacagagctgctgtgctatgatggcctgaacctgaagaggctggagaccgtgcagggcggccgggaggccacctacagaaaccgcatcgtgtcccagaacctgagcacccgggacaggaaggccatccacacccccacagaggaccgcttccgctacagcgctgctgaccagaccagcccctacaagaacaagacctgccagctgcccagcctgtgcctgagcaacttcctgaaggacaaggagctggccgaggtgatcaagcacagccggggcacctatgagaccctgaccagtgatgtgacccagaacctgcgggccaccgtgggccagagcagcctgaagcccacagccaagacagagggcctgagcaccttcctggagaagcccaaggaccaggtggccacagcccggcagcacagcaccttcaccggccgcttcggccagcccccccggggccccatcagcctgcacatgtacagcaggaagaatgtgttcctgcaccacaacctgcacagcacagagctgcagaccctgggccagcaggatggatag

SEQ ID NO: 56979 - DNA, 2703 bp, Artificial Sequence
  derived and/or modified sequence
atgggcgacagcggcagccggcggagcaccctggtgagccggctgcctattttccgccggagtattaaccgccggcacgacagcctaccctcaagcccgagctcttcgaacacagtgggcgtgcactccagctcccccagcagtaccaacagcagctcaggttccaccggcaagcgtaggagcatattccggaccccgagtatttcctttcatcacaagaaaggttcagagcctaaacaggagcctaccaatcaaaacttgtctatatctaacggagcacagcctgggcattccaacatgcaaaaactctcattggaagagcacatcaaaactcgagggcgccactctgtagggttttctagtagccggaataaaaagatcaccaggagtctcaccgaggactttgagagggaaaaagagcacagcactaataagaacgtatttatcaactgtctgtcgtctggcaagagcgagggagatgatagcggcttcacagaagatcagacacgacgctcggtaaagcagagtacccgaaaacttctgcctaagtcttttagttcacactacaagttttccaaacccgtgctccagtcacagtccattagcttggtgcaacaaagcgagttctctttagaggtgactcagtaccaggaaagggaacctgtgttggtgcgcgcttctccgagttgctcagtggatgtgacagaacgcgccggaagttctcttcagagcccactgctgagcgcggacttaactactgcacagacaccatctgagtttctggcactgacggaggacagtgtcagcgagatggatgcatttagcaagtccggcagtatggctagtcattgtgataatttcgggcataacgatagcacgtcgcagatgagtctcaactcagcagctgtgacaaaaactactactgagcttaccggcactgtaccttgtgccattatgtcgcctggcaagtacaggctagagggacagtgttctacagagtcaaattcactgcctgaaacctctgctgcgaaccagaaagaagtgctcctgcaaatagccgagttgcctgccacctcggtctctcattccgaatcaaatctgccagctgactccgagagggaggaaaacattggactccagaacggagagactatgttaggaacaaatagtccgcggaagcttggtttctacgaacagcacaaagccattgctgagcatgttaagggaatccacccaatttctgattctaaaattattccaacatccggcgatcaccacatcttcaacaagacatcccacgggtacgaagctaatcccgcgaaagtgctagctagcagcttatcgccattcagagagggcagattcattgaacgacgcttgagatccagcagtgaaggcaccgcagggagttccagaatgatcctcaagcctaaagatggaaacatcgaggaagttaattccctgcggaaacagagagctggatcatctagcagcaagatgaactctctcgacgtccttaataaccttggttcctgtgagctggacgaggacgacctgatgttggacctcgagtttttggaagagcagagcctacatccaagtgtttgccgtgaggattcttatcacagcgtggtctcttgtgccgctgtggtgctgacacccatggagcccatgatagaaatgaagaagagagaagagcccgagttcccggagccctcaaaacaaaatttatctttgaaactgaccaaagatgttgatcaagaagcccgttgcagtcacatatcccggatgcccaattcgccatcagcggattggcccctacagggggtcgaagagaacggtggcattgattccctcccatttaggctcatgctccaggactgtacagctgtgaagacccttctgcttaagatgaagcgagttctccaggagagcgccgacatgagcccagcatccagtactacctccctgcccgtgtctccactcactgaagagccggtaccgtttaaagacataatgaaagatgaatgttctatgctaaagctgcaactgaaggagaaggatgagctcatctctcagttgcaggaggagctcgggaaagtgagacatttgcagaaggcatttgcttctcgagtggacaagtccacccaaaccgagctgctgtgctacgacggcctgaacctgaagaggttagaaactgtccaggggggacgggaggctacctacagaaacagaattgtgtcccagaatcttagtaccagggataggaaggctattcataccccaaccgaggatcggttccggtactccgctgcagaccaaactagtccctataagaacaaaacatgtcaattgcctagcctctgcctttcaaacttccttaaggacaaagaactggccgaggttattaagcattcgcggggtacatacgagacgctgacttcagacgtcacacagaatctgcgtgcaacagtcggccagagttcactcaagcccaccgcaaagaccgagggcctgtccacattcctcgaaaagcccaaggaccaagtggccacagctcgccagcactctaccttcacaggccggttcggccaaccccctcgtggcccgatttctctgcatatgtatagccgaaaaaacgtattcctgcaccataacctacactccaccgaactgcagactctgggacagcaggatggttag

SEQ ID NO: 56980 - DNA, 2703 bp, Artificial Sequence
  derived and/or modified sequence
atgggcgacagcggcagccggcggagcaccctggtgagccggctgccgatatttcgccggagcatcaaccgccggcatgacagtttacccagctcaccttcaagctctaataccgtaggtgtgcactcatcttcccccagttctaccaatagttccagcgggtcaactggtaagaggcgtagcatctttaggaccccgtctatatcatttcatcacaagaaagggtcagagcccaagcaggaaccaaccaatcagaatctgtcgatctcaaatggggcacagccaggtcatagtaacatgcagaagttgagtctggaagagcacatcaagacccgcgggcgtcactcagtgggctttagttcatctcgtaataagaagattactcgaagcctcacggaagacttcgaacgtgaaaaagagcacagtaccaacaaaaacgtctttatcaactgcctgagcagtggcaagagtgaaggcgacgactcaggttttacagaagatcagaccagaagatccgtaaaacagagcacccggaagctgcttcccaaatcattcagttcccattacaaattttcaaagccagtcctgcaatctcagagcatatccttagtgcagcagagcgagttctctcttgaagtcacgcagtaccaagaaagggagcccgtgctcgtgcgcgcgtcaccatcatgttccgtcgacgtaactgagcgtgccggctcgtccctgcagtccccactactgtctgctgatctcaccacagcccaaaccccttctgagtttctggcccttactgaagatagcgtttcagaaatggacgcattcagtaagtccgggagcatggcctcccactgcgacaactttggccataatgactccacctcgcagatgagtctgaactccgccgccgtgactaagactacaactgagctaaccgggactgtcccatgcgcaatcatgtcgccagggaaatatcgcctagaaggccagtgcagtacagaaagcaatagcctgcccgaaacatctgccgccaatcagaaggaggtgctcctgcagatagccgaacttccagccacctccgtgtcccattcggagtccaacttacccgctgattcagagcgcgaggagaacataggtctacagaacggtgagaccatgctgggtactaattcccctcggaaactcgggttttacgagcagcataaagcaattgcagagcatgtcaaaggaatccaccctatcagcgatagcaagatcattccaacatctggggatcaccacatattcaacaaaacttcccatggttacgaggccaaccccgcaaaagtccttgcaagcagtctgagccccttccgggaaggtaggtttatcgaaagaagactgagatcctcgagcgagggcaccgcaggctcttcacgcatgatcctcaagccaaaagacggcaatatcgaagaagtgaactccctcagaaagcagagggcaggatcctcaagctcaaagatgaattcactggacgtcctgaacaatttgggaagctgcgagctggacgaggacgacctcatgctggatctggagttcttagaggagcagtccctccacccctcagtctgccgcgaagatagttaccatagtgtcgttagttgtgccgctgtcgtgcttacccccatggagcccatgatcgagatgaaaaaaagagaggagcctgaatttcctgagccaagcaagcagaacctgtccctcaaactgactaaggacgtggaccaggaggcacgatgcagccacattagccggatgcccaattctcctagcgccgactggccgctgcaaggcgtggaggaaaatgggggaatcgatagcctcccattccggctcatgctccaagattgtactgccgtgaaaaccctgctgctcaaaatgaaacgtgttcttcaggagtccgctgacatgagcccagccagctctacaacaagccttcctgtgtctccgcttaccgaggaacctgtgccatttaaagatattatgaaagacgagtgtagcatgctgaaattgcagctgaaagaaaaagacgaactgattagccaattgcaggaagaactggggaaggtgcgacacctgcagaaagcattcgcaagtcgggtggataaatctactcaaaccgaactgctatgttatgatggcttgaacctgaaacgactcgaaactgttcaaggcggccgtgaagcaacctatagaaaccgcatcgtctctcagaacctgtccacgcgggatcggaaggccattcacactcctactgaggaccgcttcagatatagtgcagccgaccagacctctccctacaagaataagacatgtcagctgccttcactgtgcttgagcaattttctcaaggacaaagaactcgccgaggtgattaaacattctcggggaacatatgaaactctgacatctgacgtgacccaaaatctgcgggcaactgtcgggcagagctccctgaagcccacagcaaagactgaagggttaagcactttccttgagaagcccaaggatcaggtcgccacagcccgccagcattctacctttacgggccgtttcggccaacccccacgtggcccaatcagcctccacatgtactcgcggaaaaacgtgttcttgcaccacaatctgcactccactgaactgcagaccttaggacagcaggatggatag

SEQ ID NO: 56981 - DNA, 2703 bp, Artificial Sequence
  derived and/or modified sequence
atgggcgatagcggatctaggcgctccacactggtctcacgcctgccgatatttagaaggtccatcaataggcgtcacgactcacttccaagttctccttcatcatctaacacagttggggttcacagttcatcgcctagctccacgaactcaagctcaggaagcacaggcaagcggaggagcattttccgcacgccctccatctctttccaccacaaaaaagggtctgaaccgaaacaggaaccaacaaaccagaacctaagcatttccaatggggcacagcccggacactcaaatatgcagaaattgtccctggaagagcacatcaagacacgcggacggcattcagttgggttcagtagttcgcgaaacaagaaaataacccgcagtttgactgaagacttcgagcgcgagaaggaacacagcactaacaagaacgtgtttattaactgtctctccagtggtaagtctgaaggtgacgatagcgggtttaccgaggatcaaacacgcaggtcagtgaaacagtccacccgtaaactgctgcctaaatctttctcttcacattataaattctccaagcctgtgctgcaaagtcaatcgatttcgctcgtccagcagagtgaattctcattagaggtgacacagtaccaagagcgcgaaccggtcctagtgagggcaagcccctcgtgctctgtggacgtaactgaaagagccggatcctctctacagagccccctgttaagtgcggatctgaccacagctcaaaccccctcagagtttctagctctgactgaggacagtgtgtctgagatggacgctttctcaaaatctgggtccatggctagccattgtgataactttggccacaacgattctacaagtcaaatgtcactgaacagtgctgccgtgaccaaaacaaccaccgagcttacaggcacagtgccttgtgctattatgtctccgggtaagtaccggcttgagggacaatgctcaacagagtccaacagcctgcctgagacatctgctgctaaccagaaggaagtgctcctgcagatcgctgagttacccgcaacatccgtgtcccattcagaatcgaatctgccggctgatagcgaaagagaagaaaatattgggctccagaacggggagactatgctcggcactaatagtccccgtaagctgggattctatgaacagcataaggctatcgctgaacacgtgaagggcattcaccccatctctgatagtaagattattcccacctctggcgatcaccatatcttcaacaagacctcacacggttacgaagcaaaccctgcaaaagtgctggcatcctcactcagcccatttagggagggtcgcttcatcgagcgaaggcttcgatcatccagcgagggcaccgcaggctccagccgcatgattctgaagcccaaagatggaaacatcgaggaggtgaactctctgcgaaaacaaagagcgggaagcagttcctcaaagatgaactcattagacgtgctcaataacctggggtcttgtgaattagacgaagatgacctgatgctcgacctggagtttctcgaggagcaatcgcttcatccatctgtgtgccgcgaagactcctatcactcagtcgtgtcatgtgccgcagtggttttgacgccaatggagccaatgatagagatgaagaaacgtgaggaaccagaattccccgagccaagtaagcagaatctctccttaaaattaaccaaggatgttgatcaagaggcgcgttgctcccacatttctagaatgcccaactcccccagcgctgactggccgctgcagggagtcgaagagaatgggggaattgactccctaccgtttaggctgatgttgcaggattgcacggcggtgaagaccctactactcaagatgaaaagagtactgcaggaaagtgccgacatgtccccggcttcctcaaccacttcgctgcccgtctctcctctcaccgaggagcccgttccgttcaaggatatcatgaaagacgagtgcagcatgctgaagttgcaactcaaggagaaagatgaacttatttcccagctgcaggaggagctgggtaaagttagacatttacagaaagcattcgcgtcccgggtggacaaaagtacccagaccgagcttctgtgttacgacggactgaacctcaagcggctggaaaccgtgcaaggcggacgcgaggctacgtatcgaaatcggatagtttcgcaaaatctaagcacgcgagacagaaaggccatccacacaccgacagaggaccgatttcgttattcagccgcagaccagacctctccttacaagaacaaaacctgccagttgccttcactctgtcttagcaatttcctgaaggacaaagagctagccgaggtcatcaaacactctcgcggaacttatgagacgctgacttcagacgtcactcagaaccttcgggcaaccgtgggacagagctcacttaaaccgacggctaagaccgagggcttatcaactttcctggaaaagccgaaagatcaggtggctacagccaggcagcactctacattcaccgggagattcggccagccaccaaggggaccaatttctctgcacatgtactcccgaaagaatgtattcctgcaccacaatctccattccactgagctgcagaccctgggacagcaagatgggtag

SEQ ID NO: 56982 - DNA, 2703 bp, Artificial Sequence
  derived and/or modified sequence
atgggagactcaggcagccgtcggagcacgctcgtttcacggctcccaatcttcagacggtcaatcaacagacggcacgatagtctcccttcctctccctcatctagtaacactgtgggggtccattcgagcagcccatcaagtaccaactcctccagcggctcaaccggcaagcgcaggagtatttttagaaccccatcaatcagcttccaccacaagaaagggtctgaacccaagcaggaaccaacgaatcagaatttatccatttctaacggcgcacagccagggcatagcaatatgcagaaactgagtctcgaggagcacatcaagacccgtggacgacattctgttgggttcagtagctctcgtaacaagaagataacgcggtccctgacggaagactttgagcgggagaaagaacactctacaaataagaacgtgtttataaactgtctgagttctggtaagagtgaaggagacgattcagggtttactgaggaccagactcgccgaagtgtgaagcaatcaactcgcaaattgcttcccaagtccttttcatctcactacaagttttcgaaacccgtcctgcagagtcagagtatcagcctggtgcagcagagcgagttcagcctcgaggtcacccagtatcaagaacgtgaacccgtgctggtgcgcgcttcccccagctgctctgtcgatgtcactgagagggccggaagctctctgcagagtcccctcctgtccgcagacctcaccaccgcccagaccccatccgaattcctagcgctgaccgaggacagcgtgagtgaaatggacgcgttctctaagtcaggctcaatggcaagccattgtgataacttcggacacaatgattccaccagtcaaatgtctttgaatagcgccgcagtgaccaagacaaccaccgagctcacggggacggtcccttgcgcaatcatgagtcctggcaagtatagattagaggggcaatgtagcaccgaaagcaattcactcccagaaacgtctgctgcaaaccaaaaggaagtgcttctgcagatcgccgagttgccggctacctcagtctcccattccgaatccaatctcccagctgatagtgagagggaagagaacattggtctgcagaatggagaaaccatgctgggcacaaactcgcccaggaaactggggttctatgagcagcataaggcgattgcagagcacgtgaagggcattcaccctataagcgattcaaagatcataccgacatccggggatcatcatatcttcaacaagacaagccatggttatgaggccaatcctgccaaggtgctggcatccagtctttccccattccgcgaaggacgcttcattgaacggagattgcgctcttcctcagaggggacagctggatcctcaaggatgattctgaaaccaaaggacggcaacatcgaggaggttaactccctaagaaaacaacgagcgggttcctcctcaagtaaaatgaatagccttgatgtgctgaacaaccttgggtcctgcgaactggacgaagatgatctcatgcttgacctggagtttcttgaagaacagagcctccacccttcagtgtgccgagaggactcataccacagtgtggttagctgtgccgctgtggtactgactccaatggagccgatgattgagatgaaaaaacgggaagagccagagttccccgagccgtccaaacaaaatttgtcactgaagctcacaaaagacgtcgatcaggaggccaggtgttctcacataagtcgaatgccaaacagcccctctgcggattggcccctgcaaggggtggaggaaaatgggggtattgatagcctccccttccggctgatgcttcaggattgcaccgccgttaagaccctccttctgaagatgaagagggtgttgcaggaatccgcagatatgtccccagctagctcaacaacgagcctccctgtgtccccgctcaccgaggagccagtgcctttcaaagatattatgaaggatgagtgctcgatgcttaaattgcagctgaaagagaaggacgaattgatctcgcagctccaggaggagctgggcaaagttagacatctgcagaaggctttcgccagccgggtggacaagagtacccagaccgagctcctgtgctacgacggtctgaaccttaagagactggagacagtccagggcggacgcgaagcaacctatagaaaccgcatagtgagccagaacttgtcaacccgcgaccggaaggccattcatacccctaccgaagacaggtttcggtattctgccgcagatcagacctcaccctacaagaacaagacatgtcagttacccagcctctgtttgagtaattttctgaaagataaagagctggctgaggttattaagcacagcagggggacttacgaaaccctgacatcagacgtcacacagaaccttcgggctacagtcggccagagctctttgaaaccaaccgcaaaaaccgagggcctgagcacgttcctggaaaagcccaaggatcaggttgccacagccagacagcacagcacgttcaccgggcgatttgggcagccccctcggggacctatcagcctgcacatgtactccaggaaaaatgtttttcttcaccataatctgcactccactgagctacaaacgctgggtcagcaagatggatag

SEQ ID NO: 56983 - protein, 923 aa, Artificial Sequence
  derived and/or modified sequence
MDGFAGSLDDSISAASTSDVQDRLSALESRVQQQEDEITVLKAALADVLRRLAISEDHVASVKKSVSSKGQPSPRAVIPMSCITNGSGANRKPSHTSAVSIAGKETLSSAAKSIKRPSPAEKSHNSWENSDDSRNKLSKIPSTPKLIPKVTKTADKHKDVIINQEGEYIKMFMRGRPITMFIPSDVDNYDDIRTELPPEKLKLEWAYGYRGKDCRANVYLLPTGKIVYFIASVVVLFNYEERTQRHYLGHTDCVKCLAIHPDKIRIATGQIAGVDKDGRPLQPHVRVWDSVTLSTLQIIGLGTFERGVGCLDFSKADSGVHLCIIDDSNEHMLTVWDWQKKAKGAEIKTTNEVVLAVEFHPTDANTIITCGKSHIFFWTWSGNSLTRKQGIFGKYEKPKFVQCLAFLGNGDVLTGDSGGVMLIWSKTTVEPTPGKGPKGVYQISKQIKAHDGSVFTLCQMRNGMLLTGGGKDRKIILWDHDLNPEREIEVPDQYGTIRAVAEGKADQFLVGTSRNFILRGTFNDGFQIEVQGHTDELWGLATHPFKDLLLTCAQDRQVCLWNSMEHRLEWTRLVDEPGHCADFHPSGTVVAIGTHSGRWFVLDAETRDLVSIHTDGNEQLSVMRYSIDGTFLAVGSHDNFIYLYVVSENGRKYSRYGRCTGHSSYITHLDWSPDNKYIMSNSGDYEILYWDIPNGCKLIRNRSDCKDIDWTTYTCVLGFQVFGVWPEGSDGTDINALVRSHNRKVIAVADDFCKVHLFQYPCSKAKAPSHKYSAHSSHVTNVSFTHNDSHLISTGGKDMSIIQWKLVEKLSLPQNETVADTTLTKAPVSSTESVIQSNTPTPPPSQPLNETAEEESRISSSPTLLENSLEQTVEPSEDHSEEESEEGSGDLGEPLYEEPCNEISKEQAKATLLEDQQDPSPSS

SEQ ID NO: 56984 - DNA, 2772 bp, Artificial Sequence
  derived and/or modified sequence
atggatgggtttgctggtagcctggacgattcaatctccgcagctagcacaagcgacgtgcaggacagactctcagccctggaatccagggtgcaacagcaggaggatgagattaccgtccttaaagctgccctggccgacgtgttacggagactggctatttctgaggaccatgtggcgagcgtgaaaaagtctgtctcttctaaaggccagccttccccgcgcgcagtgatccccatgtcttgtattacaaatggatcgggcgctaatcggaagcctagccacacaagtgccgtgagtatagccggaaaggaaactctctcttccgccgcgaagagcatcaaaaggccaagccccgccgagaagagtcacaatagctgggaaaattctgatgactcgagaaacaaactcagcaagattccttcaacccccaagctgatcccaaaggtgacaaagaccgccgataaacacaaggacgtgatcatcaaccaggagggtgaatacattaagatgttcatgcgggggcggcccatcaccatgtttatcccctccgacgtggataactacgacgacataagaactgagctgccacctgaaaagctgaagctggagtgggcctacggctaccggggtaaggattgccgggctaacgtctatcttctgcctaccgggaaaatcgtttattttatcgctagcgttgttgtgctcttcaactacgaggagaggactcagagacattacctcgggcatacagattgcgtaaaatgtctcgccatccacccagataagattaggatcgcaaccggtcaaattgccggcgttgacaaggacgggcgccccctgcagccgcacgtgcgagtgtgggacagcgtcactctcagtaccttgcagatcattggcttgggaacctttgaacgaggagtgggttgtctggacttcagcaaagcagattccggtgtccacctatgcattatcgacgactccaatgagcacatgctaactgtgtgggactggcaaaaaaaggctaaaggtgccgagatcaagacaacaaacgaggtggtactcgcagtcgagtttcatccgaccgatgctaatactattattacgtgcggtaaaagtcacatcttcttctggacctggtctggcaactctttgaccagaaaacaaggtatctttggaaagtatgagaagcctaaattcgtccaatgcctcgcgtttttaggcaatggtgatgtgttaaccggagactcagggggggtaatgctcatttggagtaagactacagtggagcctacaccgggcaagggccccaagggtgtctaccaaatcagtaaacagattaaagcccacgacgggtctgtcttcaccctttgccagatgcgcaatgggatgctgctaaccggcggcggcaaggaccgcaagatcatcctgtgggatcatgacctgaaccccgaaagggaaattgaagttccagatcagtatgggacaattagagcggtcgcagagggtaaggctgaccagttcctggtcggcacaagtcgcaactttatcttaagggggactttcaatgatggcttccagattgaggtacaaggccacactgacgagctgtgggggctggccactcatccttttaaagatctcctgctgacctgtgctcaggaccggcaggtgtgtctgtggaattcgatggagcaccggctggaatggacacgtctggtggacgagccagggcattgtgccgattttcatccgagtggaaccgtggttgcaataggcacccacagcggccggtggttcgttctcgacgccgaaacaagagacttggtgtcgatccatacagatgggaatgaacaattaagtgtaatgcggtacagtatcgatgggacatttctggccgtcggcagccatgacaattttatatacctttatgtcgtgtctgagaacggacgcaagtactctcggtacgggcggtgcactggacacagctcttacattacgcaccttgactggtccccggacaacaagtatataatgagtaattccggggattacgagatactgtattgggatatcccaaatgggtgtaagctgataaggaatagatccgactgtaaggatatagactggacaacctatacctgcgtactgggtttccaggtgtttggtgtctggccagaaggaagcgacggaacagacattaacgccctggtgcgctcccacaatcgtaaggtgatcgctgtggcagacgatttttgtaaggtccacctttttcagtacccttgctccaaggctaaagctcctagccataagtattcagcccactcatctcacgtgactaacgtgagctttactcacaatgattcccacctgatctccaccggcggaaaggatatgtctattattcagtggaagctcgtggaaaagctgtctctccctcagaacgagaccgtcgccgatacaacattaaccaaagctccagtgtccagcaccgaatctgttatccagtcaaacacaccgactcctccaccgtcacaacccctgaacgagacagccgaggaggaatcaaggatttctagttcaccaaccttgttggaaaatagccttgagcagaccgtggaacctagtgaagatcattccgaagaggagtctgaggaaggatctggagatctcggggagccactttatgaggagccctgcaatgagatttccaaagagcaggctaaggctacactattagaagatcagcaggatccatcgccatcctcctag

SEQ ID NO: 56985 - DNA, 2772 bp, Artificial Sequence
  derived and/or modified sequence
atggatggctttgctggcagcctggatgacagcatctctgctgccagcaccagtgatgtgcaggaccggctgagcgccctggagagccgggtgcagcagcaggaggatgagatcaccgtgctgaaggccgccctggctgatgtgctgcggcggctggccatcagcgaggaccacgtggcctctgtgaagaagtctgtgagcagcaagggccagcccagcccccgggccgtcatccccatgagctgcatcaccaatggaagtggggccaacaggaagcccagccacaccagcgctgtgtccattgctgggaaggagaccctgagcagcgctgccaagagcatcaagaggcccagccctgctgagaagagccacaacagctgggagaacagtgatgacagcaggaacaagctgagcaagatccccagcacccccaagctgatccccaaggtgaccaagacagctgacaagcacaaggatgtgatcatcaaccaggagggggagtacatcaagatgttcatgaggggccggcccatcaccatgttcatccccagtgatgtggacaactatgatgacatcagaacagagctgcccccagagaagctgaagctggagtgggcctacggctaccggggcaaggactgccgggccaacgtgtacctgctgcccaccgggaagatcgtgtacttcatcgcctctgtggtggtgctcttcaactatgaggagaggacccagaggcactacctgggccacacagactgtgtgaagtgcctggccatccacccagacaagatccgcatcgccaccggccagattgctggggtggacaaggatggccggcccctgcagccccacgtgcgggtgtgggacagcgtgaccctgagcaccctgcagatcatcggcctgggcacctttgagcggggcgtgggctgcctggacttcagcaaggctgacagcggcgtgcacctgtgcatcattgatgacagcaatgagcacatgctgactgtgtgggactggcagaagaaggccaagggagctgagatcaagaccaccaatgaggtggtgctggccgtggagttccaccccacagatgccaacaccatcatcacctgtgggaagagccacatcttcttctggacctggagcggcaacagcctgaccaggaagcagggcatctttgggaagtatgagaagcccaagtttgtgcagtgcctggccttcctgggcaatggagatgtgctgaccggggacagcggaggagtgatgctgatctggagcaagaccaccgtggagcccaccccaggcaagggccccaagggcgtgtaccagatcagcaagcagatcaaggcccatgatggctctgtgttcaccctgtgccagatgagaaatggcatgctgctgactggaggcggcaaggacaggaagatcatcctgtgggaccatgacctgaaccctgagcgggagattgaggtgcctgaccagtatggcaccatccgggctgtggccgagggcaaggctgaccagttcctggtgggcaccagcaggaacttcatcctgcggggcaccttcaatgatggcttccagatcgaggtgcagggccacacagatgagctgtggggcctggccacccaccccttcaaggacctgctgctgacctgtgcccaggaccggcaggtgtgcctgtggaacagcatggagcaccggctggagtggacccggctggtggatgagcccggccactgtgccgacttccaccccagcggcaccgtggtggccatcggcacccacagcggccgctggtttgtgctggatgctgagacccgggacctggtgtccatccacacagatggaaatgagcagctgtctgtgatgagatacagcattgatggcaccttcctggccgtgggcagccatgacaacttcatctacctgtatgtggtgtctgaaaatggaaggaagtacagccgctatggccgctgcaccggccacagcagctacatcacccacctggactggagcccagacaacaagtacatcatgagcaacagcggggactatgagatcctgtactgggacatccccaacggctgcaagctgatccggaacagaagtgactgcaaggacatcgactggaccacctacacctgtgtgctgggcttccaggtgtttggagtgtggccagagggcagtgatggaacagacatcaatgccctggtgcgcagccacaacaggaaggtgattgctgtggctgatgacttctgcaaggtgcacctgttccagtacccctgcagcaaggccaaggcccccagccacaagtacagcgcccacagcagccacgtgaccaacgtgtccttcacccacaatgacagccacctgatcagcactggaggcaaggacatgagcatcatccagtggaagctggtggagaagctgagcctgccccagaatgaaacagtggccgacaccaccctgaccaaggcccctgtgagcagcacagaatctgtcatccagagcaacacccccaccccaccacccagccagcccctgaatgaaacagctgaggaggagagccgcatcagcagcagccccaccctgctggagaacagcctggagcagacagtggagcccagcgaggaccacagcgaggaggagagcgaggagggcagcggggacctgggggagcccctgtatgaggagccctgcaatgagatcagcaaggagcaggccaaggccaccctgctggaggaccagcaggaccccagccccagcagctag

SEQ ID NO: 56986 - DNA, 2772 bp, Artificial Sequence
  derived and/or modified sequence
atggacggcttcgccggcagcctggacgacagcatcagcgccgcctcaacatcagatgtgcaggatcgccttagcgccctggagagccgagtgcagcaacaagaagatgagattactgtgctaaaggctgccttggctgacgtgcttaggcgacttgctattagcgaggaccatgttgcgtctgtgaaaaagagtgtgtcttcaaaaggacagccaagcccacgagccgttattcccatgagttgcattacaaacggcagcggagcaaacaggaagccttcgcatacgtccgcagtgtctatcgccgggaaagaaactttgtcatccgctgcaaaatcaattaagaggcctagccctgcagagaaatcacacaacagctgggagaacagtgatgactctcggaacaagttaagcaagattccatctactccaaaactaattcccaaagttaccaaaacggccgacaaacataaagacgtgatcatcaatcaagagggcgagtacatcaagatgttcatgcgagggcgcccaatcacgatgttcatcccaagtgatgtagacaactacgatgacatccgcactgagctccccccggagaagctgaaattggagtgggcttacggataccgggggaaggactgcagggccaatgtgtacctgttgccaactgggaaaattgtgtactttattgcatcggttgtagtcctgttcaactacgaagaaagaactcagcgtcattacttgggccatactgactgcgtgaaatgccttgctattcaccccgataaaatcagaatcgcgacaggacaaatcgcaggggtggataaagacggaagacctctgcagcctcatgtccgagtgtgggattccgtaacattgtcaaccctccagatcattggcctgggcacattcgagcgcggggtgggatgcctggacttttccaaagcagatagcggagtgcacctgtgcatcattgatgatagtaacgagcatatgctcacagtatgggactggcagaaaaaagccaaaggcgccgaaatcaagactaccaacgaagtggtgttagcagtagagttccatcccactgatgccaatactataatcacctgtggtaagagccatatcttcttctggacatggagcggtaattcactgacacggaaacaaggtatctttggtaaatatgagaagccaaaattcgtgcagtgcctggcctttctgggtaatggagacgtcctaacgggggacagtggcggcgtgatgttgatctggagtaaaacaacggtcgagccaaccccgggaaaaggtccgaaaggcgtctatcagatcagcaagcaaattaaagctcacgatgggagtgtgttcacactgtgccagatgcggaacgggatgcttctgaccggtggcggcaaagacaggaagatcattctgtgggatcatgatctgaatccagagcgggaaatcgaagttcctgaccagtatggtaccattcgtgcagtcgcagaggggaaagcagaccagttcctggtgggaacctcgagaaactttatcttgcgcggaaccttcaatgatggcttccagatcgaggtgcagggccacactgacgaactttggggcctcgctacacacccatttaaagatttgctgctgacttgcgcccaggacaggcaggtttgtctgtggaacagtatggagcacagactcgaatggaccaggctggtcgatgagcccggacattgcgcagactttcatccatccgggacagtggtagccattggcacccactccggcaggtggtttgtgttggacgccgaaaccagagatttggtgtccatccacacggacggaaatgaacagcttagtgtcatgaggtacagcatcgacggtacattcctagctgtgggtagtcatgacaacttcatctatctgtacgtggtgtccgagaacgggcggaagtactcacggtatggcaggtgtactggccattcctcatacatcactcacctggactggtcccctgacaacaaatacattatgtcaaactctggagactacgagatcctgtattgggatatccccaacgggtgcaagctcatcagaaaccgatcagattgcaaagatattgattggactacctacacctgtgtcctggggttccaggtgtttggcgtatggccagaagggtctgatggaaccgacataaacgcactggttcgcagtcacaatcgtaaagtgatagcggttgcggatgacttctgcaaggtgcatctgttccagtacccatgctccaaggccaaggccccttcgcataagtactcagctcatagtagccacgtgacaaacgtctcatttacacacaatgattctcacttgattagcacgggaggtaaagatatgagcatcattcagtggaagttagtcgagaagctgtcccttcctcagaacgagaccgtggcagatacgaccctgaccaaggcacccgtgagctccacagagtccgtgatccagagtaatacccccacgccgcctccatctcaaccactgaatgaaactgctgaagaggagtcgaggatcagctcttccccgacgctcctcgagaattcactggaacagaccgtggaaccatccgaggatcactctgaggaggagagtgaagaagggtccggtgacctgggcgaaccactgtatgaggagccgtgcaacgaaatcagcaaagagcaggctaaagctaccctgctggaagaccaacaggatcctagcccatctagttag

SEQ ID NO: 56987 - DNA, 2772 bp, Artificial Sequence
  derived and/or modified sequence
atggacggatttgccggatccttggacgactctatttctgccgcaagcactagcgatgtccaggatcggctgagtgcccttgagtctagggtacagcaacaagaggatgagatcacagtgctaaaagccgctttggccgacgtgctaagacggttggcaatcagtgaggaccacgtggcctctgtgaagaaaagcgtctcctctaaaggccagcctagccccagagcagtcatacctatgtcttgcatcactaatgggtccggagcaaatcgaaagccttcccatacctcagccgtttccattgccggaaaagaaaccctgtcgagcgcagccaaaagcatcaagaggccctctccggctgagaaaagccataactcctgggagaacagcgatgatagccgcaataagttgtcgaaaattccatccaccccaaaactgatccctaaggttaccaagactgctgataaacacaaggacgtgattattaatcaggagggggagtatataaagatgtttatgcgaggcagaccgatcactatgttcatccctagtgatgtcgataactacgacgacatccggacagagctacctcccgaaaagttgaagctggaatgggcgtacggataccggggaaaggattgccgcgcaaacgtgtacctgcttccaaccggaaagattgtatactttatcgcatctgtagtggtactgtttaattacgaggaaaggactcagaggcattatctgggtcacaccgactgtgtaaagtgtctggcaattcacccagacaaaatacggattgcaacaggccagattgccggagtcgacaaggacggaaggcctcttcagccacacgtcagagtttgggactcagtgacactaagcaccctgcaaataatcggccttggcactttcgaaaggggtgtggggtgtttagactttagcaaggctgactcaggcgtacacctgtgtattatcgacgattcaaatgagcatatgttaaccgtgtgggactggcagaaaaaagccaaaggggctgaaattaagacaaccaacgaagtggttctggcagtcgagtttcatccaacagacgccaacaccattatcacatgtggcaagtcccatatcttcttctggacctggagcggaaattcgttgacccgcaaacaaggcattttcggtaagtacgaaaagcccaaatttgtgcagtgcttggcttttctaggaaacggagacgtacttacaggagattccggcggtgtcatgctcatttggagtaagaccacggttgaacccacccctgggaagggccctaagggtgtgtatcagatctcaaagcagatcaaagctcacgatggttcagtgtttaccctctgccagatgagaaatggtatgctgcttacggggggtggcaaggaccgtaaaataatactgtgggatcacgaccttaacccagaacgcgaaattgaggtccctgaccaatatggcacaataagggcagtggccgaaggcaaggccgaccagttcctcgtgggaacatctcgtaatttcatcctgaggggtacttttaacgacggcttccagatcgaggtacagggccacacagatgagctctggggactggccacgcatccctttaaagatcttctgttgacatgcgctcaggaccggcaggtatgtctgtggaactccatggaacataggcttgagtggaccaggttagtggacgagcccggtcattgcgctgattttcacccttccgggaccgtggttgctattgggacgcattctggacgctggttcgtgctggatgcggagacaagggatcttgtatccatccatacagatggaaatgagcagctgagtgtcatgagatattcaatagacggtacgtttctggcggtaggcagtcacgataacttcatctacctttacgttgtcagcgagaatggaagaaagtactcccgatacggcaggtgcaccggccattcaagttatattacccatctcgattggtcgcccgataacaaatatattatgtccaattctggagattacgagattctgtattgggatattcctaacgggtgcaagttgataaggaatagatccgactgcaaggatatcgattggacaacctatacttgcgttctgggattccaagtgtttggcgtctggccagagggctctgacggcaccgacatcaacgctctggttagatcccataatcgcaaagtgattgccgtggctgatgacttctgtaaagtgcatctctttcagtacccctgctcaaaagcaaaagccccatcacataaatactcggcccatagctctcacgtgaccaacgttagctttacacacaacgactctcacctcatatccacaggaggcaaagatatgagcatcattcaatggaaactggtggaaaagcttagtctccctcaaaatgagactgtggccgatacgacactgacaaaggccccagtgtctagtaccgagtcagtcatccagagcaacacccctacgccaccaccaagccagccactgaatgagacggcggaagaagaatcacggatttcttcttcccctactctgttagaaaactctctggagcagaccgtggagccatccgaggaccattctgaggaggagtcagaggagggttcaggagatctcggagaacccttgtacgaagagccctgtaacgagatcagtaaggagcaggcaaaagcaaccctgctcgaggatcaacaggaccccagccctagttcatag

SEQ ID NO: 56988 - DNA, 2772 bp, Artificial Sequence
  derived and/or modified sequence
atggacggcttcgccggcagcctggacgacagcatcagcgccgccagcaccagcgacgtgcaggacagactgagcgccctggagagcagagtgcagcagcaggaggacgagatcaccgtgctgaaggccgccctggccgacgtgctgagaagactggccatcagcgaggaccacgtggccagcgtgaagaagagcgtgagcagcaagggccagcccagccccagagccgtgatccccatgagctgcatcaccaacggcagcggcgccaacagaaagcccagccacaccagcgccgtgagcatcgccggcaaggagaccctgagcagcgccgccaagagcatcaagagacccagccccgccgagaagagccacaacagctgggagaacagcgacgacagcagaaacaagctgagcaagatccccagcacccccaagctgatccccaaggtgaccaagaccgccgacaagcacaaggacgtgatcatcaaccaggagggcgagtacatcaagatgttcatgagaggcagacccatcaccatgttcatccccagcgacgtggacaactacgacgacatcagaaccgagctgccccccgagaagctgaagctggagtgggcctacggctacagaggcaaggactgcagagccaacgtgtacctgctgcccaccggcaagatcgtgtacttcatcgccagcgtggtggtgctgttcaactacgaggagagaacccagagacactacctgggccacaccgactgcgtgaagtgcctggccatccaccccgacaagatcagaatcgccaccggccagatcgccggcgtggacaaggacggcagacccctgcagccccacgtgagagtgtgggacagcgtgaccctgagcaccctgcagatcatcggcctgggcaccttcgagagaggcgtgggctgcctggacttcagcaaggccgacagcggcgtgcacctgtgcatcatcgacgacagcaacgagcacatgctgaccgtgtgggactggcagaagaaggccaagggcgccgagatcaagaccaccaacgaggtggtgctggccgtggagttccaccccaccgacgccaacaccatcatcacctgcggcaagagccacatcttcttctggacctggagcggcaacagcctgaccagaaagcagggcatcttcggcaagtacgagaagcccaagttcgtgcagtgcctggccttcctgggcaacggcgacgtgctgaccggcgacagcggcggcgtgatgctgatctggagcaagaccaccgtggagcccacccccggcaagggccccaagggcgtgtaccagatcagcaagcagatcaaggcccacgacggcagcgtgttcaccctgtgccagatgagaaacggcatgctgctgaccggcggcggcaaggacagaaagatcatcctgtgggaccacgacctgaaccccgagagagagatcgaggtgcccgaccagtacggcaccatcagagccgtggccgagggcaaggccgaccagttcctggtgggcaccagcagaaacttcatcctgagaggcaccttcaacgacggcttccagatcgaggtgcagggccacaccgacgagctgtggggcctggccacccaccccttcaaggacctgctgctgacctgcgcccaggacagacaggtgtgcctgtggaacagcatggagcacagactggagtggaccagactggtggacgagcccggccactgcgccgacttccaccccagcggcaccgtggtggccatcggcacccacagcggcagatggttcgtgctggacgccgagaccagagacctggtgagcatccacaccgacggcaacgagcagctgagcgtgatgagatacagcatcgacggcaccttcctggccgtgggcagccacgacaacttcatctacctgtacgtggtgagcgagaacggcagaaagtacagcagatacggcagatgcaccggccacagcagctacatcacccacctggactggagccccgacaacaagtacatcatgagcaacagcggcgactacgagatcctgtactgggacatccccaacggctgcaagctgatcagaaacagaagcgactgcaaggacatcgactggaccacctacacctgcgtgctgggcttccaggtgttcggcgtgtggcccgagggcagcgacggcaccgacatcaacgccctggtgagaagccacaacagaaaggtgatcgccgtggccgacgacttctgcaaggtgcacctgttccagtacccctgcagcaaggccaaggcccccagccacaagtacagcgcccacagcagccacgtgaccaacgtgagcttcacccacaacgacagccacctgatcagcaccggcggcaaggacatgagcatcatccagtggaagctggtggagaagctgagcctgccccagaacgagaccgtggccgacaccaccctgaccaaggcccccgtgagcagcaccgagagcgtgatccagagcaacacccccacccccccccccagccagcccctgaacgagaccgccgaggaggagagcagaatcagcagcagccccaccctgctggagaacagcctggagcagaccgtggagcccagcgaggaccacagcgaggaggagagcgaggagggcagcggcgacctgggcgagcccctgtacgaggagccctgcaacgagatcagcaaggagcaggccaaggccaccctgctggaggaccagcaggaccccagccccagcagctag

SEQ ID NO: 56989 - DNA, 3568 bp, Artificial Sequence
  derived and/or modified sequence
gcggcgctcgcggctgctgcctgggagggaggccgggcaggcggctgagcggcgcggctctcaacgtgacggggaagtggttcgggcggccgcggcttactaccccagggcgaacggacggacgacggaggcgggagccggtagccgagccgggcgacctagagaacgagcgggtcaggctcagcgtcggccactctgtcggtccgctgaatgaagtgcccgcccctctaagcccggagcccggcgctttccccgcaagatggacggtttcgccggcagtctcgatgatagtatttctgctgcaagtacttctgatgttcaagatcgcctgtcagctcttgagtcacgagttcagcaacaagaagatgaaatcactgtgctaaaggcggctttggctgatgttttgaggcgtcttgcaatctctgaagatcatgtggcctcagtgaaaaaatcagtctcaagtaaaggccaaccaagccctcgagcagttattcccatgtcctgtataaccaatggaagtggtgcaaacagaaaaccaagtcataccagtgctgtctcaattgcaggaaaagaaactctttcatctgctgctaaaagcataaaacgaccatcaccagctgaaaagtcacataattcttgggaaaattcagatgatagccgtaataaattgtcgaaaataccttcaacacccaaattaataccaaaagttaccaaaactgcagacaagcataaagatgtcatcatcaaccaagaaggagaatatattaaaatgtttatgcgcggtcggccaattaccatgttcattccttccgatgttgacaactatgatgacatcagaacggaactgcctcctgagaagctcaaactggagtgggcatatggttatcgaggaaaggactgtagagctaatgtttaccttcttccgaccgggaaaatagtttatttcattgcatcagtagtagtactatttaattatgaggagagaactcagcgacactacctgggccatacagactgtgtgaaatgccttgctatacatcctgacaaaattaggattgcaactggacagatagctggcgtggataaagatggaaggcctctacaaccccacgtcagagtgtgggattctgttactctatccacactgcagattattggacttggcacttttgagcgtggagtaggatgcctggatttttcaaaagcagattcaggtgttcatttatgtattattgatgactccaatgagcatatgcttactgtatgggactggcagaagaaagcaaaaggagcagaaataaagacaacaaatgaagttgttttggctgtggagtttcacccaacagatgcaaataccataattacatgcggtaaatctcatattttcttctggacctggagcggcaattcactaacaagaaaacagggaatttttgggaaatatgaaaagccaaaatttgtgcagtgtttagcattcttggggaatggagatgttcttactggagactcaggtggagtcatgcttatatggagcaaaactactgtagagcccacacctgggaaaggacctaaaggtgtatatcaaatcagcaaacaaatcaaagctcatgatggcagtgtgttcacactttgtcagatgagaaatgggatgttattaactggaggagggaaagacagaaaaataattctgtgggatcatgatctgaatcctgaaagagaaatagaggttcctgatcagtatggcacaatcagagctgtagcagaaggaaaggcagatcaatttttagtaggcacatcacgaaactttattttacgaggaacatttaatgatggcttccaaatagaagtacagggtcatacagatgagctttggggtcttgccacacatcccttcaaagatttgctcttgacatgtgctcaggacaggcaggtgtgcctgtggaactcaatggaacacaggctggaatggaccaggctggtagatgaaccaggacactgtgcagattttcatccaagtggcacagtggtggccataggaacgcactcaggcaggtggtttgttctggatgcagaaaccagagatctagtttctatccacacagacgggaatgaacagctctctgtgatgcgctactcaatagatggtaccttcctggctgtaggatctcatgacaactttatttacctctatgtagtctctgaaaatggaagaaaatatagcagatatggaaggtgcactggacattccagctacatcacacaccttgactggtccccagacaacaagtatataatgtctaactcgggagactatgaaatattgtactgggacattccaaatggctgcaaactaatcaggaatcgatcggattgtaaggacattgattggacgacatatacctgtgtgctaggatttcaagtatttggtgtctggccagaaggatctgatgggacagatatcaatgcactggtgcgatcccacaatagaaaggtgatagctgttgccgatgacttttgtaaagtccatctgtttcagtatccctgctccaaagcaaaggctcccagtcacaagtacagtgcccacagcagccatgtcaccaatgtcagttttactcacaatgacagtcacctgatatcaactggtggaaaagacatgagcatcattcagtggaaacttgtggaaaagttatctttgcctcagaatgagactgtagcggatactactctaaccaaagcccccgtctcttccactgaaagtgtcatccaatctaatactcccacaccgcctccttctcagcccttaaatgagacagctgaagaggaaagtagaataagcagttctcccacacttctggagaacagcctggaacaaactgtggagccaagtgaagaccacagcgaggaggagagtgaagagggcagcggagaccttggtgagcctctttatgaagagccatgcaacgagataagcaaggagcaggccaaagccacccttctggaggaccagcaagacccttcgccctcgtcctaacaccctggcttcagtgcaactcttttccttcagctgcatgtgattttgtgataaagttcaggtaacaggatgggcagtgatggagaatcactgttgattgagattttggtttccatgtgatttgttttcttcaatagtcttattttcagtctctcaaatacagccaacttaaagttttagtttggtgtttattgaaaattaaccaaacttaatactaggagaagactgaatcattaatgatgtctcacaaattactgtgtacctaagtggtgtgatgtaaatactggaaacaaaaacagcagttgcattgattttgaaaacaaacccccttgttatctgaacatgttttcttcaggaacaaccagaggtatcacaaacactgttactcatctactggctcagactgtactacttttttttttttttttcctgaaaaagaaaccagaaaaaaatgtactcttactgagataccctctcaccccaaatgtgtaatggaaaatttttaattaagaaaaacttcagttttgccaagtgcaa

SEQ ID NO: 56990 - protein, 615 aa, Artificial Sequence
  derived and/or modified sequence
MAEGSGEVVAVSATGAANGLNNGAGGTSATTCNPLSRKLHKILETRLDNDKEMLEALKALSTFFVENSLRTRRNLRGDIERKSLAINEEFVSIFKEVKEELESISEDVQAMSNCCQDMTSRLQAAKEQTQDLIVKTTKLQSESQKLEIRAQVADAFLSKFQLTSDEMSLLRGTREGPITEDFFKALGRVKQIHNDVKVLLRTNQQTAGLEIMEQMALLQETAYERLYRWAQSECRTLTQESCDVSPVLTQAMEALQDRPVLYKYTLDEFGTARRSTVVRGFIDALTRGGPGGTPRPIEMHSHDPLRYVGDMLAWLHQATASEKEHLEALLKHVTTQGVEENIQEVVGHITEGVCRPLKVRIEQVIVAEPGAVLLYKISNLLKFYHHTISGIVGNSATALLTTIEEMHLLSKKIFFNSLSLHASKLMDKVELPPPDLGPSSALNQTLMLLREVLASHDSSVVPLDARQADFVQVLSCVLDPLLQMCTVSASNLGTADMATFMVNSLYMMKTTLALFEFTDRRLEMLQFQIEAHLDTLINEQASYVLTRVGLSYIYNTVQQHKPEQGSLANMPNLDSVTLKAAMVQFDRYLSAPDNLLIPQLNFLLSATVKRPPNGP

SEQ ID NO: 56991 - DNA, 1848 bp, Artificial Sequence
  derived and/or modified sequence
atggccgaaggcagcggcgaggtcgtggcggtgtctgccactggggccgctaacggcctcaacaatggagcgggcggcacgagcgcaactacatgcaatcccctttcacgcaagctgcataaaattctagaaacccggttggataatgacaaggagatgcttgaggctcttaaagctctttctactttttttgtagagaactcgctgcggacacgtcggaatctgcggggcgatatcgaaagaaagtcactggcaatcaacgaagaattcgtatctatttttaaagaggtcaaggaggaactggagtccatttcggaagatgtgcaggccatgagcaattgctgtcaggatatgacatcgcgcctccaggccgcaaaagagcagacgcaggacctgattgtaaaaaccactaagctgcagagcgaatctcaaaagctcgagatccgggcacaagtggcagacgcattcctgagtaaatttcaactgacaagcgatgaaatgagtctgctccggggaacgagggagggacccattaccgaggacttttttaaagcactgggcagggtcaaacagattcacaacgacgttaaagtgctgcttagaacaaaccaacagaccgcaggcctagaaatcatggagcaaatggcgcttctgcaggagactgcatacgagagattgtatagatgggcccagtcggagtgccggaccctgacccaggagtcctgcgatgtgagccctgtgctgacacaagccatggaggccctgcaagacagaccggtcttgtacaagtatacactggatgagttcggtacagcccggagaagcaccgtcgttcgaggcttcatcgatgcactcacccgagggggccctggcgggacacctaggcccattgaaatgcatagccatgacccactgcgatatgtgggagatatgctagcatggctgcaccaggctaccgccagcgagaaagaacacttggaagctctcctaaagcatgtgacaactcaaggcgtggaggagaatatccaagaggtggtcggacacatcacagagggcgtatgtcggcctctgaaggtccgcatcgaacaggtgattgtggcagaaccaggagccgtgctgctgtacaagattagtaatctgctgaagttttaccatcatacaatcagtggaatagtaggcaattctgcaaccgcgctgctgactaccattgaagagatgcacctgctttccaaaaagatcttcttcaattccctctctttgcacgcctctaagctcatggacaaggtggaactcccccctcctgatttaggcccctcctccgccctcaatcagaccctgatgctcctgagagaagtactggcttcacacgatagttctgtggtgcccctcgacgcaagacaagccgatttcgtccaggtgctgagctgcgtgctagacccgcttctgcagatgtgcaccgtgagtgcaagtaatcttggtactgcagatatggccactttcatggtgaatagcctgtatatgatgaaaactacactggccctgttcgagttcacagacagacgcctggagatgctccagttccagatagaggcccacctcgataccttaatcaacgaacaggcgtcatacgtcctgactagggtcggcctctcatacatttataatactgtccagcagcacaagcctgagcaggggtccctcgccaacatgcccaacctcgacagtgttaccctgaaggctgcaatggtccaattcgaccgctatctgagtgctcctgataatcttttgattccacaactgaactttctgttaagcgccacagtcaaacggccacctaacggaccttag

SEQ ID NO: 56992 - DNA, 1848 bp, Artificial Sequence
  derived and/or modified sequence
atggccgagggcagcggggaggtggtggccgtgtctgccaccggggccgccaacggcctgaacaacggggccggcggcaccagcgccaccacctgcaaccccctgagcaggaagctgcacaagatcctggagacccggctggacaatgacaaggagatgctggaggccctgaaggccctgagcaccttctttgtggagaacagcctgcggaccaggaggaacctgcggggggacattgaaaggaagagcctggccatcaatgaggagtttgtgtccatcttcaaggaggtgaaggaggagctggagagcatcagtgaagatgtgcaggccatgagcaactgctgccaggacatgaccagccggctgcaggccgccaaggagcagacccaggacctgattgtgaagaccaccaagctgcagagcgagagccagaagctggagatccgggcccaggtggctgatgccttcctgagcaagttccagctgaccagtgatgagatgagcctgctgcggggcacccgggagggccccatcacagaggacttcttcaaggccctgggccgggtgaagcagatccacaatgatgtgaaggtgctgctgcggaccaaccagcagacagctggcctggagatcatggagcagatggccctgctgcaggagacagcctatgagcggctgtaccgctgggcccagagtgaatgtaggaccctgacccaggagagctgtgatgtgtcccctgtgctgacccaggccatggaggccctgcaggacaggcctgtgctgtacaagtacaccctggatgaatttggaacagcccggcgcagcacagtggtgcggggcttcattgatgccctgacccggggcggccctgggggcaccccccggcccatcgagatgcacagccatgaccccctgcgctacgtgggggacatgctggcctggctgcaccaggccacagccagcgagaaggagcacctggaggccctgctgaagcacgtgaccacccagggcgtggaggagaacatccaggaggtggtgggccacatcacagagggcgtgtgccggcccctgaaggtgagaattgagcaggtgattgtggccgagcctggagctgtgctgctgtacaagatcagcaacctgctgaagttctaccaccacaccatctctggaattgtgggcaacagcgccacagccctgctgaccaccatcgaggagatgcacctgctgagcaagaagatcttcttcaacagcctgagcctgcacgccagcaagctgatggacaaggtggagctgcccccaccagacctgggccccagcagcgccctgaaccagaccctgatgctgctgcgggaggtgctggccagccatgacagctctgtggtgcccctggatgcccggcaggccgactttgtgcaggtgctgagctgtgtgctggaccccctgctgcagatgtgcaccgtgtctgccagcaacctgggcacagctgacatggccaccttcatggtgaacagcctgtacatgatgaagaccaccctggccctgtttgagttcacagaccggcggctggagatgctgcagttccagatcgaggcccacctggacaccctcatcaatgagcaggccagctatgtgctgaccagggtgggcctgagctacatctacaacacagtgcagcagcacaagccagagcagggcagcctggccaacatgcccaacctggacagcgtgaccctgaaggccgccatggtgcagtttgaccgctacctgagcgccccagacaacctgctgatcccccagctgaacttcctgctgagcgccaccgtgaagaggcccccaaatggcccctag

SEQ ID NO: 56993 - DNA, 1848 bp, Artificial Sequence
  derived and/or modified sequence
atggccgagggcagcggcgaggtggtggccgtgagcgccaccggcgccgcaaatggtctgaataacggtgccggcggaacttccgctactacctgtaaccctttaagccgcaaactccacaaaatcctggaaactagattggataatgacaaagagatgcttgaagcattaaaggcactttctaccttctttgtcgagaattctctacgtacgaggcggaacctgcggggagacatcgagcgtaaatcccttgctattaacgaagagttcgtgtcaatcttcaaggaggtgaaagaggaattggagagtatctctgaggacgtacaggccatgtccaattgctgccaggacatgacgagccgcctccaagcagccaaagagcagacccaggacctgatcgtcaagactacaaaacttcagtcagaaagccagaagctagagattcgcgctcaggttgccgatgcttttctatccaaatttcagctgaccagtgacgaaatgagcctccttcgaggcacccgcgaagggcctattactgaggacttcttcaaggctctaggacgcgttaaacaaattcacaacgacgtaaaggtactgctgcggaccaaccagcagacagcggggcttgaaatcatggaacagatggccctgttacaggagactgcctatgagagactttaccggtgggcccaaagcgaatgcagaacgttgacccaggagagctgcgacgtgagccccgttctgacgcaggccatggaggcactgcaggaccgccctgtgctgtacaagtacacactggatgagtttgggaccgctcggaggagcaccgtggtccgtggattcattgatgcgcttactagaggtggaccaggaggcacacccagacctattgaaatgcattcccacgatccactccggtatgtcggcgacatgctagcgtggctgcaccaggctacggcgtctgaaaaagaacatttagaggctttgcttaagcatgtgactacacagggggtagaagagaatattcaagaggtcgttggacacatcactgagggtgtttgtcggcctctgaaggttaggattgagcaggtgattgtcgccgagcccggggcggtattgctgtacaagatatccaacctgctcaagttctaccaccatacaatcagcggtatagtgggaaactcagccacagccctgctgaccaccatcgaagagatgcatctgctctctaagaagatcttcttcaacagcctgtctttgcacgcgtccaaacttatggacaaagtggaactgcctccgcccgacctgggacccagcagtgctctgaaccaaacactgatgttgctaagggaagtgctcgcttctcatgacagttctgtggtccctctagacgctaggcaggcggattttgtgcaggtgctgagctgtgttctggacccactgctgcagatgtgtactgtgtctgcgtcaaatcttgggacagcagacatggcaacctttatggtcaatagcctgtatatgatgaaaaccacgctggcccttttcgaattcacagacaggcggctggaaatgctgcagtttcagatagaggcgcacttggacaccctgataaacgagcaagccagttatgtactgaccagagtggggctgtcatatatctataatacagttcagcagcacaaaccagagcaggggagcctggcaaatatgccgaaccttgattccgtgacactgaaggcagcaatggttcagtttgataggtacctcagtgccccagataacttgctgatccctcaactcaacttcctgctctccgcaacagtgaagcgcccaccgaatggcccgtag

SEQ ID NO: 56994 - DNA, 1848 bp, Artificial Sequence
  derived and/or modified sequence
atggctgaggggtccggagaggtggtcgctgtcagcgccacgggggctgctaacgggcttaataatggtgccggagggaccagtgccacgacgtgtaaccccctgtcacggaagctgcataaaatcttggaaacaagactagataatgacaaggaaatgctcgaggccttgaaggccctgtctacattctttgtggaaaactcgctgcgaacccggcgaaatctccgcggagacatcgagaggaagagtctcgccatcaatgaagaatttgtgagcattttcaaggaagtgaaggaagaactggagtccatttccgaagacgtccaagccatgtcaaactgttgtcaggatatgacctctcgcctgcaggctgccaaggagcagacccaggacttaattgtcaagacaaccaagttgcaatccgagagccagaaactggaaattagagctcaagtagccgacgcctttctttctaagttccaacttacatcagatgagatgtctctactccgcggaacccgtgagggacccatcacggaagacttcttcaaggctctcgggagagtgaaacagatccacaacgacgtcaaagtgctcttacgcacaaatcaacagacagccggactggagatcatggagcagatggccctgctgcaggagactgcctacgagagactctatcgatgggctcagtcagagtgcaggacactaacacaggagtcctgcgacgtgagccccgtcctgacgcaagctatggaagctctgcaggaccgaccagtgctctataagtatacacttgatgagttcggcacagcgaggcgatcaactgtggtgcgaggattcattgatgcacttaccaggggcggacccggaggtacacccagaccaatagagatgcactcacacgaccctctacggtatgtcggcgatatgctggcatggctgcatcaggcaacagccagtgagaaagagcatctcgaggcacttctgaagcatgtcacaacacagggcgtggaggagaacatccaggaggtggtcggtcacattactgaaggtgtttgtagaccactaaaggtgagaatcgaacaagtcattgtggccgagccaggagcagtcctcctgtataagatcagtaatctcctcaagttctaccaccacacgattagcggcattgtaggaaattcagccaccgcattactaaccaccatcgaggagatgcacttgctgagcaagaaaatttttttcaacagcctttctctgcatgcctcaaaactgatggataaggtggagcttccaccccctgatctgggccctagttcagcactgaatcagacacttatgctcctccgggaagtgctcgcctcacatgattcctcagtcgtgccactggatgccagacaagcggattttgtccaggttttgtcttgcgtcctggatccacttctacagatgtgtaccgtgagcgcctccaacctgggcacggcagacatggccacatttatggtcaattctctatacatgatgaagactacgctggctttgttcgaatttaccgatcgccgactggagatgttgcagttccagatagaggcccacctggacacactcataaatgaacaagcgtcctacgtgctgacccgcgtgggcctctcatacatctataatacagtacaacaacataagcctgagcaggggtcactcgcaaatatgcccaatttagactccgtgaccctgaaagcagcgatggtgcagtttgaccggtacctaagtgctcctgataatctcctgataccccagcttaattttctgttgtctgcaacggtgaaacggcctcccaacggcccttag

SEQ ID NO: 56995 - DNA, 5257 bp, Artificial Sequence
  derived and/or modified sequence
gatgcgcatgcgcggccgatttgcacatgcgcaatactcgcgctgcctccgtggtccctgcctggctgaggtggcagcagggggcgggacgcgcagcgctatggcagagggcagcggggaagtggtcgcagtgtctgcgaccggggctgccaacggcctcaacaatggggcaggcgggacctcggcgacgacctgcaacccgctgtcgcgcaagctgcataagatcctggagacgcggctggacaacgacaaggagatgttagaagctctcaaggcactttcaaccttttttgttgaaaatagtctgcggactcgaagaaatttacgtggagatattgaacgtaaaagtttagccatcaatgaagaatttgtaagcattttcaaggaagtgaaggaggaacttgaaagcataagcgaagatgttcaagcaatgagcaactgttgtcaagatatgacaagtcgcctacaggcagcaaaggaacagactcaagatttaatagtaaaaaccactaagcttcaatctgaaagccaaaaattagagataagagctcaagttgcagatgccttcttatccaagttccaactgacttctgatgaaatgagtcttctccgaggtacaagagaaggacccattactgaggattttttcaaggcactgggaagagtaaaacagattcataatgatgtcaaagttctcttgcgtacaaatcaacaaacggcaggtttagaaattatggaacagatggccttacttcaagaaacggcttatgaaagactttaccgatgggctcaaagtgaatgcagaacattgacacaagaatcatgtgacgtatctccagtattgacacaggcaatggaagccctgcaggacagacctgtcttatataaatataccttagatgaatttggaacagccagaagaagtacagttgttcgtggatttattgatgcgctcacaagagggggccccggaggtacacctagaccaattgaaatgcattctcatgaccctttgaggtatgtaggagatatgttggcttggctccatcaagctactgcttctgaaaaggaacaccttgaagctctcttaaagcatgtaactacacaaggtgttgaagaaaatattcaagaagttgttgggcatatcactgaaggtgtgtgcaggcctctaaaggttcgaattgagcaagtaatagttgctgaacctggggcagttttattatataaaatttctaatctcctcaaattttatcaccatacaatcagtggtattgttggaaatagtgcaactgcattattgactaccattgaagaaatgcatttgctaagcaaaaaaatattcttcaatagcttgagtcttcatgcaagtaaattaatggacaaggttgaactcccaccacctgatcttggaccaagttctgcactaaatcagacactcatgttgctgcgtgaagttttagcatctcacgattcttcagttgtaccattagatgctcgtcaagctgattttgtgcaggttttatcatgtgtcttggatcctctcctacagatgtgtactgtatcagccagcaatttaggcacagctgacatggccactttcatggtcaattcactatatatgatgaagacaacattagctctatttgaattcactgacagacgtctggaaatgctacagtttcagatcgaagcacatttggacacacttataaatgagcaagcctcttatgttttaactagggtaggcttgagttacatctataacactgtacagcaacataaacctgaacagggctctttagctaatatgcccaacctagattctgtgacactgaaggctgcaatggttcagtttgatcgttatctgtcagccccagacaacctattgataccacagctgaactttcttctaagtgccacagtgaagcgtccacccaacggcccatgatcatcttgtaaccagtgcaggaccttgtgcttctggagccattccagttgtgggaggtgatgtctcggaaaactctgccttggggactggctatagaaatgtggccagatggctttgtcatcttcccctgtctactctgtgactcttcatctggtggaaatgctgtgagggatgaaccaaatggaaactcagatttactcttcagaataatgcggatcataatacgcacacacacagcatgtagagttgctgtgtggcttaaataagtaaatgtatgcaaagcactaaaatggtgtctgtctaagtgtaaacaccaattgtgttggctattatcactattgttgttcttatctcaaatatgtgttactttctaaataactttagtgttcatagattgttaaaagacaagatgacctgaagaaaagtaagccctaaaaatccattattaacttttttctccaccactcttttcttctaaacttcactattctttgtgttttcacaaaagttgcttacttcacctggcagagatagcattacgcaggggatgattaaaatatactcacttgtacttgttggttttaaattttattatttatgaataggtaatagcatgtacactgtaaaaatctcaaaaggcaaaaaaggatatacagtaaacattaagttcctcttaccctggaccttagccatcaagttctcttccccataggcaatccctgttgcctaatttccaattcccctgcatactttaaagatcatctgtgcatctgcactcagaccactcacacgtctaaaacaaatgatagcacactacacacaaagttctgttcctttttatgctcaatgatatgttttgcatcatatttcactgccgtataaataatgctgcctcgatttttaaaataactgaacagtaatacacagtatgaatttactccaatttataatccaatccttagttaatggatattttgattttgttgttaagaatcatgcagcaatgatgtacctgttagacatgagttattaatttctcttcgaagaatcaatatgtcactacgttcaattctttgccttctacttttaaacttcacttcctcataaagcaaccttttgcgatcatctgctccaccctgactcattccaatcacctgctccaccctgactcattctgatcacctgctctgcccagactcattcccatcacctgctccaccctgacttattccaattacctgctccaccctgtctcattctccaccctgactcattccataaccatttttcccaccaaaccagtcaccccctcaccctctttaaattagctaatcggaattagtttagcttgtgtggtctaacctagccaatagatgaatgacacagcagcaggagccacgttcgtcagggataagaacaccttccccttccttgtccaggggtgtactcaccattgctccatctgtgagggcgcacccttctatagaagtaaattgccttgctgagaagaaaaaaagaaaattttatatttgagtgctatttattttgtggcaccaaaactatttataacatacctgatctttattttaaatttttgtttatttaaatattaaatatattatccacctggtattaatttgtttaaataaatgtgaggtagggttccattgctattttttaaccaggtaggttatattgactaaccttcactttgaaagtgatttgaaatacacttttcatttattaaattctcccttgtgtttaggcagtaaggcataatatttgagagtgtgggctctgcagtccagctatctgggtttgaagtttatctcctttatttgcgagtggtacaaacttgaacaaattatgtaatttgtttttctcaattccctcatgcactaagtgaggataaaaatagcaataacaccatgagattgctgataacaaaatgcaaggtaaaaattgtgtaaggcttaaaattgtgtagcctggtatacaagaggctctaaataacataagctattattgcttttctacttattattatttctggcttttgtagtctttttcccattgttgatctttctactattcacaaagcatgagtctagtatctgtagatttataaactaattaatgtaacttttcaatatgttttaatatctcatagatactgttcttcctcattacttttctattttataaatttctatttcatctgcttcataaattttgcattctcataaactaagaatcatctcctgtagttaaaaaatattgtttgtatttttgttgggagtagagtgaattaaaatatattgacttaaggagaactgacatctttataatattgaatcttcctgtttgagattggactttatgtccatattttaaagtctttgtttatgaccctaagtataattttaacgtttttatattaggcttatttctagatactttttgttaatatatcatctaactggttgttcttcatatatataatgactatgaattttttctcagtcttttttctgaattctcacatcatttgtgttatatttttaagttgattctcttgagtttttcaggtaaacaattatatcacctataaaaataatgttgccaccttaaattaagaaaatgtttttctattgtctaattgcatggactgttgcctcaggaacagtataagattgcttacaaaagccttgctttcttgttccagattttaaaaacaaggctttcaatgacaatctcgctagcaagaagctggtatacttacatacatacatacaaacagacagacacccactttctatatgtatatctagatagatttagatagacatatatgtgtgattcctgttaagatgaatctatttttggtatttaagattttaaaaatctagaatgggtattattatattgtattgaagctcttaagcatctatggaaatgaaagtatgattcttctctttcgactaattaatatgtgatccatagtattttagtaacagatttcctaatatcgaatgatctaggcattgattctagcagattatgtctatgggtattttatttaagattttgcatcagtattaataaatgaccatggtctatgggtttgcttttttgtgtgctatgtttgcagagtgtttgtagtttacaagagatttttgcaaacttctatttatgacaatatggtagattatatatctgaaaaaaaaaccttctcattacagaacatatacaaaactgctgaataaaacgaggcaaccaacattttaaatatatggttaataaggtttt

SEQ ID NO: 56996 - DNA, 1848 bp, Artificial Sequence
  derived and/or modified sequence
atggccgagggcagcggcgaggtggtggccgtgagcgccaccggcgccgccaacggcctgaacaacggcgccggcggcaccagcgccaccacctgcaaccccctgagcagaaagctgcacaagatcctggagaccagactggacaacgacaaggagatgctggaggccctgaaggccctgagcaccttcttcgtggagaacagcctgagaaccagaagaaacctgagaggcgacatcgagagaaagagcctggccatcaacgaggagttcgtgagcatcttcaaggaggtgaaggaggagctggagagcatcagcgaggacgtgcaggccatgagcaactgctgccaggacatgaccagcagactgcaggccgccaaggagcagacccaggacctgatcgtgaagaccaccaagctgcagagcgagagccagaagctggagatcagagcccaggtggccgacgccttcctgagcaagttccagctgaccagcgacgagatgagcctgctgagaggcaccagagagggccccatcaccgaggacttcttcaaggccctgggcagagtgaagcagatccacaacgacgtgaaggtgctgctgagaaccaaccagcagaccgccggcctggagatcatggagcagatggccctgctgcaggagaccgcctacgagagactgtacagatgggcccagagcgagtgcagaaccctgacccaggagagctgcgacgtgagccccgtgctgacccaggccatggaggccctgcaggacagacccgtgctgtacaagtacaccctggacgagttcggcaccgccagaagaagcaccgtggtgagaggcttcatcgacgccctgaccagaggcggccccggcggcacccccagacccatcgagatgcacagccacgaccccctgagatacgtgggcgacatgctggcctggctgcaccaggccaccgccagcgagaaggagcacctggaggccctgctgaagcacgtgaccacccagggcgtggaggagaacatccaggaggtggtgggccacatcaccgagggcgtgtgcagacccctgaaggtgagaatcgagcaggtgatcgtggccgagcccggcgccgtgctgctgtacaagatcagcaacctgctgaagttctaccaccacaccatcagcggcatcgtgggcaacagcgccaccgccctgctgaccaccatcgaggagatgcacctgctgagcaagaagatcttcttcaacagcctgagcctgcacgccagcaagctgatggacaaggtggagctgcccccccccgacctgggccccagcagcgccctgaaccagaccctgatgctgctgagagaggtgctggccagccacgacagcagcgtggtgcccctggacgccagacaggccgacttcgtgcaggtgctgagctgcgtgctggaccccctgctgcagatgtgcaccgtgagcgccagcaacctgggcaccgccgacatggccaccttcatggtgaacagcctgtacatgatgaagaccaccctggccctgttcgagttcaccgacagaagactggagatgctgcagttccagatcgaggcccacctggacaccctgatcaacgagcaggccagctacgtgctgaccagagtgggcctgagctacatctacaacaccgtgcagcagcacaagcccgagcagggcagcctggccaacatgcccaacctggacagcgtgaccctgaaggccgccatggtgcagttcgacagatacctgagcgcccccgacaacctgctgatcccccagctgaacttcctgctgagcgccaccgtgaagagaccccccaacggcccctag

SEQ ID NO: 56997 - protein, 531 aa, Artificial Sequence
  derived and/or modified sequence
MLGFLSRGPSMKLCMGLACVLSLWNTVSGIKGEAKKEKGMTFLPTTVSGLREEERKEKGVAFLATTELPARSIDLSALNLTELVNGMLSRALKDSKKFFSLLSVTSYSSFAFHKFSVAVYNISNLKTVDPAKFPTRYCYCLNNRTNDLSDFTALLVDIIGNSTSYLTEIFKSTSILSVNQSNESDCIFICVMTGKSGRNLSDFWEIEEKYPIINYTFTSGLSGVLGAATRGTARTSKPTTKSQKTLPSTSPGHWTQSTPWASALRSSPWTETAAPSETEETLNTGRPPELPARATATWFSASHTLPALATRRVARTQWLTADRQTWASISSVPWAQTISEKKPGGSLWETRSSPPTTAGTEEAMNTTSLLAPAAEIMATPGSPSQASPTLGAFTHGTQTPSPTKATAPRYPQTGDLSAEWPFTAGEEPVLVPRPHQVSRCPQPLFKVGAMAAAPLTLAIQRLNPCLMELCQFFQQCLCMSQRSPRTEDMRYCLEYYSWFLKNATYICQRVKRVSHSHTLKQKCLENICKSV

SEQ ID NO: 56998 - DNA, 1596 bp, Artificial Sequence
  derived and/or modified sequence
atgctaggcttcctgtcgagggggccttctatgaaactttgtatgggattggcctgcgttttgtccctgtggaatactgtgtccggcatcaagggagaggctaaaaaggaaaagggcatgacttttcttccgaccactgtgtccggcttgcgtgaggaggaaagaaaggagaaaggtgtagcgtttctggctactaccgagctgccggcccggtcgattgatctgtcagctctcaacctaacagagttagttaacggtatgctttcgcgggcgctcaaggatagcaaaaagttctttagcctgctctccgttacttcatacagctcgttcgctttccataagttttctgttgccgtttataatatttcaaacctgaagaccgtagaccctgcgaaatttcccactcgctattgctactgtctgaacaatcggactaatgatctgtcggactttactgctctgcttgtcgatatcattggtaattctacctcgtacctaaccgaaattttcaaatctacctctatcctaagtgtgaaccagagtaatgaaagcgactgtatatttatctgcgtcatgacaggcaaatcgggtagaaatttaagtgacttttgggagattgaggagaagtacccgattataaactacacattcaccagcggccttagtggcgtcctgggtgctgccaccagggggacagccagaacgtctaaacccaccaccaagagccagaaaactctgccatcgacatctcccggtcactggacccaaagcaccccttgggccagtgccctgcggagctccccatggacagagacagcggcgccctcagaaacagaggagactctgaataccggacgaccacccgagctacccgcccgtgctaccgcgacctggttctctgcgtctcacacactgcctgccctggctacccggcgcgttgccagaactcagtggctgacagctgaccggcagacatgggcctccatcagctccgtgccttgggcgcaaactattagcgagaagaagcccggtggttccctgtgggaaacccgctcctcacctccaacgacagccggaacggaggaggccatgaatacaaccagtctgctcgcacccgcagccgagattatggctactccaggctcccctagccaggccagccccacgttgggcgcctttacgcacggcacacagacccctagccccacaaaggccacagcccctagatatccgcaaactggcgatctctctgcggaatggcccttcactgctggggaggagcctgttctggtgccacgtcctcatcaggtgtcaagatgtccacagcccctgttcaaggtaggagcaatggctgctgctcccttgactttggcaattcagaggctgaatccctgccttatggaactgtgccagttctttcagcagtgtctttgtatgtcccagaggtcaccccggaccgaggatatgaggtactgcctggaatattattcttggttcctgaaaaacgctacctacatctgccagagagtgaaacgagtcagccatagccacactctgaaacaaaaatgcttagagaacatttgcaaaagcgtttag

SEQ ID NO: 56999 - DNA, 4105 bp, Artificial Sequence
  derived and/or modified sequence
atgctgggcttcctgtcacgtggtccttcaatgaagctgtgcatgggcctggcatgtgtcttgtccctttggaacacagtgtctggcatcaaaggagaagccaagaaagagaagggaatgacctttttacctacaacagtgtctggccttagagaagaagagaggaaggagaagggggtggcatttcttgctacgacggagctgcccgcaaggtcaatcgatctgtccgcgcttaacctgacagagcttgtgaatgggatgctcagtagagcgttaaaagatagcaagaagttcttctccttgctgagtgtcacttcctacagttccttcgccttccacaagttttctgtagctgtttacaacatttctaacctgaagacagtagaccccgccaaattccccacaaggtattgctactgtttaaacaatcggaccaatgacttatcagattttacagctctactggtagatatcatcggcaattctaccagctacctcacagagatttttaagtcaacctccatcctctcagtgaatcaaagcaatgaatcagattgcatcttcatctgtgtgatgacaggaaagtcaggaaggaatctttctgacttctgggagatagaagaaaaatatcccattatcaattacacatttaccagcggcttgtctggtgttctgggtgcagctaccaggggaactgccaggacttcaaagcccacaaccaaaagccagaaaacactaccaagtacaagccccggacactggacccagagcacaccctgggcatctgctctgagatcctctccctggacagagacagctgctccttcagaaacagaggagaccctgaacacaggcaggcctcctgagcttccagccagggccacagccacatggttcagtgcctcccacactctcccagccttggctaccaggagggtggccagaactcagtggttgacagctgacagacagacgtgggcttccatatcgtccgtgccctgggctcagaccatcagtgagaaaaaacctggagggtctctctgggaaactcgttcttccccaccgactactgcagggaccgaggaagccatgaacactacaagccttttggcgcctgctgctgagataatggccacacctggcagcccatcccaggccagccctaccttgggagcattcacccatggcacacagactccgagtccaaccaaggcaacagcccccagatatccacaaacaggtgatctctctgcagagtggccattcactgctggtgaagagccagtcctggtcccaagaccccatcaagtttcaaggtgtcctcagccactcttcaaggtgggagctatggcagctgctcctctcaccctggctattcagaggctcaacccatgcctgatggagctgtgccaattcttccagcaatgcctctgcatgagccagaggagtcccaggacagaggacatgagatactgtcttgaatactattcctggtttctgaagaatgcaacatatatctgtcagagggtgaaaagggtgtcccactcgcacaccttaaagcaaaagtgccttgagaatatctgcaagtctgtgtgaggccttgaaaataacactagggcataacaattacttcaggggatacgccatccaccctggctcttgtcccaagtgggctacatttgaagaattcacccaggctccagctagatcatcagttaatttaaagtggttattcttggaagtagcattttttttccctctcctgtgaatctgtgcaaaacattgaaggtagaagttttcttgttagaggcctcacaattaatacagtaatgccagactccttgcctgcttcaaaatcatggaaatctagtgttcatgctcaagaaactcctacaatgcttgaggcaatcctgacaatttaaaaactggggatgcgtgggcactctagcctgcacaaaccagttcagccatggagactctgacacaatacctgaggtgacttaaacttgagacttttgaaagacaacaaaagcataaattaatattgaattcatactctagagagattcacatatactgatagttaactaatacatgtacaaccaatcagacttgccatggtatgggatctatataatcttccaagcccccttaagtgggcgataatgaaaactttatcattaggaggaggtttagagagttgtttttattgacatcttgtcttgattcctcttctgtgtgacccactggattcagaggtccccatgagcaccctcaggttcaatgattcatgagtagaactcagaggtagggaaaactgttatatgcacatttagcatttattacaacaaaaggatgcagatgaaaagcagcaaatgtgaaaggcacctctagagagagtccaagagagcccaggcacaagcttccagtggggttgcacagtcagcatctaatcctcccagaaataatgtttaacaacacgtggagtattgtcagccaggaaagctcatccaagttttggtgtccaggggatgtttgggggtatggagtaggtatggagtgccttcatggcctgcatggctaaacttagttattcagtctccagtccctctagaggtcaagctgatactgcacgacctaaggccccaccataaatcacattgttaacataaactatctgtcatggcacgaagccccaggtacaagagacactcatcaggcaggatattccaaggatttacaggggattccccaggagctggtcaaggaccagatgttcctctgaaaggtgcaggatttgagctcatctgtggagtacgtctgtggagtcaactttcttctgcatccccacatactgatttgccaccttcattgtatcagattcctttttcactatattcaggtttgcggttgctccagtatccctatctatgctgagtctccacgtagagcatgtgtgccctctccagtggctctgcacggaccccttatttctcattaccagggacagtttttctcctgatgtgcctggtgctccttctccactctcttgccttaggactctgctgggccatgagtattttttttacccttttgtgacctagggctgcccttgggtgaggaaagtcactttctgttcatcatctaagtagaaaacagtttctgccattggaagacccctgagttccctggcactcctgtgaaccacaaggtgcctggggaggtagaacttggacattggagagaggagcagccagacatttctctttctaatcatatgcagaaagatttctttttattctccagaacacttgaaagactctccaagttatgcaaatgtcaagctcataaatgtatattatcatgacttttgcaaagatgaagaggatacagcaaattttctgggaggcaaagggacttctacctggataggaaccaagcaaactcattaagcatggattaatttgattcaacccttgcgtggatattaattaaggacctttgacaggagagggtcctcaaggttcctcaaagagtaacttatcatcaaggaaggtgaagaatggatggatggcttgggcccaagactggggctattcacttgtggggaaacccatgtgaacccagttaccccatactttgggaataatgactgagcatgactataatctttaagaagctcaaatgcggaatacctctgaggcttatgcaaggatctggcctagcatcaaggacaaaggctcagaggactccttggggccagttttctacagtcataccatcagccacaacagcagcaaaggcagaaggaaaacagggcccaggagtggctgacgactgcctggagtccaactggtctcctggagttcataagaggtttgaccccttctgagctgaatgtgtcctgatttaggggatagctagggcaataagaaagcctcagggggtgctactgatctggaactcctactaattagtgtgtatgtatgtggccaccagtggttagcagatgaggtgaaagagatgggacagtgactgtatctgttctgatgaaggagattgtgcagttacatgcgtaacgtcattaaacttcattcttccaggt

SEQ ID NO: 57000 - DNA, 1596 bp, Artificial Sequence
  derived and/or modified sequence
atgctgggcttcctgagccggggccccagcatgaagctgtgcatgggcctggcctgtgtgctgagcctgtggaacacagtgtctggcatcaagggggaggccaagaaggagaagggcatgaccttcctgcccaccaccgtgtctggcctgcgggaggaggagaggaaggagaagggcgtggccttcctggccaccacagagctgcctgcccggagcattgacctgagcgccctgaacctgacagagctggtgaatggcatgctgagccgggccctgaaggacagcaagaagttcttcagcctgctgtctgtgaccagctacagcagctttgccttccacaagttctctgtggccgtgtacaacatcagcaacctgaagacagtggaccctgccaagttccccacccgctactgctactgcctgaacaacagaacaaatgacctgagtgacttcaccgccctgctggtggacatcatcggcaacagcaccagctacctgacagagatcttcaagagcaccagcatcctgtctgtgaaccagagcaatgaaagtgactgcatcttcatctgtgtgatgaccgggaagagcggcaggaacctgagtgacttctgggagattgaggagaagtaccccatcatcaactacaccttcaccagcggcctgagcggcgtgctgggcgccgccacccggggcacagcccggaccagcaagcccaccaccaagagccagaagaccctgcccagcaccagccctggccactggacccagagcaccccctgggccagcgccctgcggagcagcccctggacagaaacagctgcccccagcgagacagaggagaccctgaacacaggccggcccccagagctgcctgcccgggccacagccacctggttcagcgccagccacaccctgcctgccctggccaccaggagagtggcccggacccagtggctgacagctgaccggcagacctgggccagcatcagctctgtgccctgggcccagaccatcagcgagaagaagccaggcggcagcctgtgggagaccaggagcagcccccccaccacagctggaacagaggaggccatgaacaccaccagcctgctggccccagctgctgagatcatggccaccccaggcagccccagccaggccagccccaccctgggcgccttcacccacggcacccagacccccagccccaccaaggccacagccccccgctacccccagacaggagacctgtctgctgagtggcccttcaccgctggggaggagcctgtgctggtgccccggccccaccaggtgagccgctgcccccagcccctcttcaaggtgggcgccatggccgccgcccccctgaccctggccatccagaggctgaacccctgcctgatggagctgtgccagttcttccagcagtgcctgtgcatgagccagaggagccccaggacagaggacatgagatactgcctggagtactacagctggttcctgaagaatgccacctacatctgccagagggtgaagagggtgagccacagccacaccctgaagcagaagtgcctggagaacatctgcaagtctgtgtag

SEQ ID NO: 57001 - DNA, 1596 bp, Artificial Sequence
  derived and/or modified sequence
atgctgggcttcctgagccggggccccagcatgaagctgtgcatgggcctcgcctgtgtcctcagcctgtggaatacggtaagtggcataaaaggagaagccaagaaggagaagggcatgacttttctaccgacaacagtttcgggtctgagagaagaggaacgcaaggagaagggagtggcctttttggctacaaccgagctgcccgccaggagcatcgatctgtctgcactgaacctgacagagcttgttaatggtatgttatcccgggccctgaaagactctaaaaagttcttctccttgctgtcggtaacttcttattcgtcgttcgcgttccacaagtttagcgtggcggtgtacaatatcagtaatttgaaaaccgtcgatcctgcgaaatttcccactagatactgctactgcctcaacaaccgaactaacgatctgtccgattttacagctctgctggttgacatcatcggcaactccaccagttacctgacagagattttcaagagtaccagtatccttagtgtgaatcagtcgaatgagagcgattgtatattcatctgcgtgatgacaggcaagtcgggaagaaatctgagtgatttctgggaaatagaggaaaagtacccaattatcaactacacatttacgtccggtctctctggagtgctgggcgctgccactcggggcacagccagaaccagtaagccgacgaccaagagtcaaaagaccctccccagcactagccctggccactggacacaatctacaccttgggctagtgcgctgcgatcctccccctggactgagacagccgctccttccgagacggaggagaccctgaatactggcaggccacctgagctgcccgctcgcgcgaccgcgacctggttctccgcatcgcacacattgccagccttagccacccggcgcgtcgctcgtactcagtggctgactgctgatcgccagacttgggctagcataagctctgtgccatgggcgcaaaccatttcggaaaagaagcctggcggtagtctttgggaaactcgctccagccctcccaccacagcaggcacagaagaagccatgaataccacaagtttgctggccccagccgcagagatcatggccaccccgggttccccctcgcaagcttccccaacacttggcgccttcactcatgggactcagacaccctctccgactaaggctacagcacctcgctatccgcagaccggcgacctgtccgccgagtggcctttcacagcaggtgaggaaccagtgctagtccctcgccctcatcaggtatctcgctgtccacaacctctgttcaaggtgggagccatggctgctgctccccttaccctggcgatacagcggctgaacccttgcctgatggagctatgccagttcttccagcagtgcctttgcatgagccaacgctcgccgcggacggaggatatgcgttactgcctggagtattactcttggtttctgaagaacgccacctatatatgccaacgagtcaaacgagtgtcgcattcacatacgctcaagcagaagtgtttggagaatatttgcaagtcagtgtag

SEQ ID NO: 57002 - DNA, 1596 bp, Artificial Sequence
  derived and/or modified sequence
atgcttggctttctgagcagagggccaagtatgaagctctgtatgggcttggcgtgcgtgctgtccctctggaatactgtatcaggtatcaaaggggaagctaagaaagagaaaggtatgacttttcttccgacaacagtgagtggcctcagggaggaagaaagaaaagagaaaggagtggccttcctggcaaccacagagctgcctgcacgaagcatcgacctttcagctctcaaccttactgaattggtgaatggaatgctctccagagcactgaaagactccaaaaaatttttctcccttttgagtgtcacatcctactcgtcattcgccttccacaaattctctgtggccgtatacaatatctccaacctgaagactgtggaccccgctaaattccccacacgatactgctactgcctgaacaatcggaccaatgacctctcagattttaccgcccttttggttgatattatcggtaattcaacttcgtacttgaccgagatattcaagagcacatctatcctgagcgtgaaccagtccaatgaatccgactgtatatttatttgtgtcatgaccggtaagtctggtagaaacctatctgacttctgggagatcgaggaaaaatatcctattatcaactacactttcacctccggactctccggcgtcctgggtgccgcaacccgcggaactgctaggacctctaagcccaccacaaagtctcagaagaccctgccatccacaagtcccggacattggacacagtcaaccccttgggccagtgccctaagaagctccccctggacggaaaccgcagctccaagtgaaaccgaggagacactgaatacaggtagaccacctgagctgcctgccagagcgactgctacatggtttagcgcctcacacactttgccggctctggccacaaggcgtgtcgctagaactcagtggctgacagccgataggcagacctgggcctccatctcgtctgtaccctgggcacagacaatcagtgagaaaaagcctggcggatcattgtgggagacgcgtagctctccaccgactacggccggaactgaggaggcgatgaacaccacaagcctgctcgccccagctgcagagatcatggcgaccccaggatcaccgtctcaggctagccctacgctgggagctttcacccatggcacgcaaacgccttctcccacaaaggcaacagctcctaggtacccccagacaggcgatttgagtgcagagtggcccttcactgccggagaagagccagtcctcgtgccacggccacaccaggtttcacggtgccctcagccactctttaaggtcggtgcaatggccgcagctcccctgactttagccatccagcgcctaaacccatgcctgatggagttatgtcagttttttcagcagtgcctgtgcatgtcacagagatctcctcggactgaggacatgcgctattgcttggagtattactcttggtttttgaaaaatgcaacctatatttgccagcgggtgaagagagtctcccacagccacaccctcaaacaaaaatgcctagaaaatatctgtaaaagtgtgtag

SEQ ID NO: 57003 - DNA, 1596 bp, Artificial Sequence
  derived and/or modified sequence
atgctgggcttcctgagcagaggccccagcatgaagctgtgcatgggcctggcctgcgtgctgagcctgtggaacaccgtgagcggcatcaagggcgaggccaagaaggagaagggcatgaccttcctgcccaccaccgtgagcggcctgagagaggaggagagaaaggagaagggcgtggccttcctggccaccaccgagctgcccgccagaagcatcgacctgagcgccctgaacctgaccgagctggtgaacggcatgctgagcagagccctgaaggacagcaagaagttcttcagcctgctgagcgtgaccagctacagcagcttcgccttccacaagttcagcgtggccgtgtacaacatcagcaacctgaagaccgtggaccccgccaagttccccaccagatactgctactgcctgaacaacagaaccaacgacctgagcgacttcaccgccctgctggtggacatcatcggcaacagcaccagctacctgaccgagatcttcaagagcaccagcatcctgagcgtgaaccagagcaacgagagcgactgcatcttcatctgcgtgatgaccggcaagagcggcagaaacctgagcgacttctgggagatcgaggagaagtaccccatcatcaactacaccttcaccagcggcctgagcggcgtgctgggcgccgccaccagaggcaccgccagaaccagcaagcccaccaccaagagccagaagaccctgcccagcaccagccccggccactggacccagagcaccccctgggccagcgccctgagaagcagcccctggaccgagaccgccgcccccagcgagaccgaggagaccctgaacaccggcagaccccccgagctgcccgccagagccaccgccacctggttcagcgccagccacaccctgcccgccctggccaccagaagagtggccagaacccagtggctgaccgccgacagacagacctgggccagcatcagcagcgtgccctgggcccagaccatcagcgagaagaagcccggcggcagcctgtgggagaccagaagcagcccccccaccaccgccggcaccgaggaggccatgaacaccaccagcctgctggcccccgccgccgagatcatggccacccccggcagccccagccaggccagccccaccctgggcgccttcacccacggcacccagacccccagccccaccaaggccaccgcccccagatacccccagaccggcgacctgagcgccgagtggcccttcaccgccggcgaggagcccgtgctggtgcccagaccccaccaggtgagcagatgcccccagcccctgttcaaggtgggcgccatggccgccgcccccctgaccctggccatccagagactgaacccctgcctgatggagctgtgccagttcttccagcagtgcctgtgcatgagccagagaagccccagaaccgaggacatgagatactgcctggagtactacagctggttcctgaagaacgccacctacatctgccagagagtgaagagagtgagccacagccacaccctgaagcagaagtgcctggagaacatctgcaagagcgtgtag

SEQ ID NO: 57004 - protein, 638 aa, Artificial Sequence
  derived and/or modified sequence
MENLQTNFSLVQGSTKKLNGMGDDGSPPAKKMITDIHANGKTINKVPTVKKEHLDDYGEAPVETDGEHVKRTCTSVPETLHLNPSLKHTLAQFHLSSQSSLGGPAAFSARHSQESMSPTVFLPLPSPQVLPGPLLIPSDSSTELTQTVLEGESISCFQVGGEKRLCLPQVLNSVLREFTLQQINTVCDELYIYCSRCTSDQLHILKVLGILPFNAPSCGLITLTDAQRLCNALLRPRTFPQNGSVLPAKSSLAQLKETGSAFEVEHECLGKCQGLFAPQFYVQPDAPCIQCLECCGMFAPQTFVMHSHRSPDKRTCHWGFESAKWHCYLHVNQKYLGTPEEKKLKIILEEMKEKFSMRSGKRNQSKTDAPSGMELQSWYPVIKQEGDHVSQTHSFLHPSYYLYMCDKVVAPNVSLTSAVSQSKELTKTEANASISNNSTSKRKSESATCNLVRDINKVGIGLVAAASSPLLVKDVICEDDKGKIMEEVMRTYLKQQEKLNLILQKKQQLQMEVKMLSSSKSMKELTEEQQNLQKELESLQNEHAQRMEEFYVEQKDLEKKLEQIMKQKCTCDSNLEKDKEAEYAGQLAELRQRLDHAEADRQELQDELRQEREARQKLEMMIKELKLQILKSSKTAKE

SEQ ID NO: 57005 - DNA, 1917 bp, Artificial Sequence
  derived and/or modified sequence
atggagaacctgcagaccaacttcagcctggtgcagggcagcaccaagaagctgaacggcatgggcgacgacggcagcccccccgccaagaagatgatcaccgacatccacgccaacggcaagaccatcaacaaggtgcccaccgtgaagaaggagcacctggacgactacggcgaggcccccgtggagaccgacggcgagcacgtgaagagaacctgcaccagcgtgcccgagaccctgcacctgaaccccagcctgaagcacaccctggcccagttccacctgagcagccagagcagcctgggcggccccgccgccttcagcgccagacacagccaggagagcatgagccccaccgtgttcctgcccctgcccagcccccaggtgctgcccggccccctgctgatccccagcgacagcagcaccgagctgacccagaccgtgctggagggcgagagcatcagctgcttccaggtgggcggcgagaagagactgtgcctgccccaggtgctgaacagcgtgctgagagagttcaccctgcagcagatcaacaccgtgtgcgacgagctgtacatctactgcagcagatgcaccagcgaccagctgcacatcctgaaggtgctgggcatcctgcccttcaacgcccccagctgcggcctgatcaccctgaccgacgcccagagactgtgcaacgccctgctgagacccagaaccttcccccagaacggcagcgtgctgcccgccaagagcagcctggcccagctgaaggagaccggcagcgccttcgaggtggagcacgagtgcctgggcaagtgccagggcctgttcgccccccagttctacgtgcagcccgacgccccctgcatccagtgcctggagtgctgcggcatgttcgccccccagaccttcgtgatgcacagccacagaagccccgacaagagaacctgccactggggcttcgagagcgccaagtggcactgctacctgcacgtgaaccagaagtacctgggcacccccgaggagaagaagctgaagatcatcctggaggagatgaaggagaagttcagcatgagaagcggcaagagaaaccagagcaagaccgacgcccccagcggcatggagctgcagagctggtaccccgtgatcaagcaggagggcgaccacgtgagccagacccacagcttcctgcaccccagctactacctgtacatgtgcgacaaggtggtggcccccaacgtgagcctgaccagcgccgtgagccagagcaaggagctgaccaagaccgaggccaacgccagcatcagcaacaacagcaccagcaagagaaagagcgagagcgccacctgcaacctggtgagagacatcaacaaggtgggcatcggcctggtggccgccgccagcagccccctgctggtgaaggacgtgatctgcgaggacgacaagggcaagatcatggaggaggtgatgagaacctacctgaagcagcaggagaagctgaacctgatcctgcagaagaagcagcagctgcagatggaggtgaagatgctgagcagcagcaagagcatgaaggagctgaccgaggagcagcagaacctgcagaaggagctggagagcctgcagaacgagcacgcccagagaatggaggagttctacgtggagcagaaggacctggagaagaagctggagcagatcatgaagcagaagtgcacctgcgacagcaacctggagaaggacaaggaggccgagtacgccggccagctggccgagctgagacagagactggaccacgccgaggccgacagacaggagctgcaggacgagctgagacaggagagagaggccagacagaagctggagatgatgatcaaggagctgaagctgcagatcctgaagagcagcaagaccgccaaggagtag

SEQ ID NO: 57006 - DNA, 372 bp, Artificial Sequence
  derived and/or modified sequence
atggagaacctgcagaccaacttcagcctggtgcagggcagcaccaagaagctgaacggcatgggcgacgacggcagcccccccgccaagaagatgatcaccgacatccacgccaacggcaagaccatcaacaaggtgcccaccgtgaagaaggagcacctggacgactacggcgaggcccccgtggagaccgacggcgagcacgtgaagagaacctgcaccagcgtgcccgagaccctgcacctgaaccccagcctgaagcacaccctggcccagttccacctgagcagccagagcagcctgggcggccccgccgccttcagcgccagacacagccaggagagcatgagccccaccgtgttcctgccctag

SEQ ID NO: 57007 - DNA, 1917 bp, Artificial Sequence
  derived and/or modified sequence
atggagaacctgcaaactaatttttcactcgtgcagggctcaactaaaaagctcaatggaatgggagacgacggcagcccccctgccaagaagatgataacagacatccacgccaatggcaagaccattaacaaggtacctactgtaaaaaaggaacaccttgatgactatggtgaagcacctgtcgagacagatggagagcacgtgaaaaggacatgcacttcagtccctgagacgctgcacctcaacccatcacttaagcatactctcgctcaattccacctgtcctcgcagtcgtcgttgggaggaccggcggcattcagtgcaagacacagccaggaaagcatgtctccaaccgtgtttttgcccctccctagcccacaagtcctgccagggcctctgctcatacctagcgatagctctactgagctcacccaaactgtactggaaggagagtcaatttcttgctttcaggtgggaggtgaaaaaagattgtgtctgcctcaagtacttaatagcgttctcagagaatttactttgcaacaaatcaacacagtgtgcgacgaactatacatatattgcagtaggtgtacctccgatcagcttcacattttaaaggtgttagggatcttgcctttcaacgccccaagctgtgggctgattacattaacggatgctcaaagactgtgcaatgctcttttacggcccaggacgtttcctcagaatggttctgttctgccagctaagtcatctctggcacaacttaaggaaacagggtcagctttcgaggtagagcacgagtgtctcggaaaatgtcaaggcctcttcgcccctcaattctatgtgcagccggatgccccgtgcatccagtgcctggaatgttgcggcatgtttgcgccccagacctttgtgatgcactcccacaggagccctgataaacgaacttgccactggggctttgaatctgcaaaatggcactgctacctccacgtcaatcaaaagtatctgggaacaccagaggaaaagaaactgaaaatcattctcgaggaaatgaaggaaaaattctccatgagaagtggtaaacgcaatcagagcaagacagacgcacctagcggaatggagctccagagttggtatcctgtaatcaagcaggagggagaccatgtatcccagacacactcatttctacaccccagctattacctgtatatgtgcgacaaggtggtcgcaccaaacgtgtcattgacgtcagctgtgtctcagtctaaagaactgactaagacagaggcaaatgcctcaatttctaataactctacctccaaacgcaagagtgagtcggctacgtgtaacctcgttagggacatcaataaagtgggtataggactcgtggctgctgccagctctccactcctggtcaaagatgtaatttgtgaagatgacaaagggaagatcatggaagaagtgatgcgcacatatttgaagcagcaggagaagctaaatttgatcctccagaagaagcaacagctgcagatggaagtcaaaatgttatcaagcagtaagtctatgaaggagttgacagaagaacagcaaaacctgcagaaagaactcgaatccctgcagaatgaacacgcccaaagaatggaggagttttacgtcgaacagaaggatcttgagaagaagttggagcaaataatgaaacagaagtgtacatgtgatagcaacctggagaaagacaaagaagctgaatatgcaggccagctggctgaactgcgccaacggttggaccacgcagaagctgatcgacaagaactccaggatgaattgcgccaggagcgcgaagctcggcagaagctcgagatgatgatcaaagagctcaaactgcaaattctgaaatcatcaaaaacagctaaagaatag

SEQ ID NO: 57008 - DNA, 372 bp, Artificial Sequence
  derived and/or modified sequence
atggagaacctgcagacaaacttcagcctggtgcagggctccactaagaaactcaatggcatgggagatgacgggagccctcctgcgaagaaaatgattactgacatccacgccaatggtaagacaatcaacaaagtgcccacagttaagaaggagcacctggatgactacggtgaagctcctgtcgagacagatggcgaacatgtgaaaaggacctgcacctcagtgcccgagactcttcatctcaatccaagcttgaagcataccttggctcagtttcatttgtccagtcagagcagtctgggcggccctgctgctttcagcgctcgccacagtcaggaaagtatgtcaccaacagtgtttttaccctag

SEQ ID NO: 57009 - DNA, 1917 bp, Artificial Sequence
  derived and/or modified sequence
atggagaacctgcagaccaacttcagcctggtgcagggcagcaccaagaagctgaatggcatgggagatgatggcagccccccagccaagaagatgatcacagacatccacgccaacgggaagaccatcaacaaggtgcccaccgtgaagaaggagcacctggatgattatggagaggcccctgtggagacagatggagagcacgtgaagaggacctgcacctctgtgcctgagaccctgcacctgaaccccagcctgaagcacaccctggcccagttccacctgagcagccagagcagcctgggcggccctgctgccttcagcgcccggcacagccaggagagcatgagccccaccgtcttcctgcccctgcccagcccccaggtgctgcccggccccctgctgatccccagcgacagcagcacagagctgacccagacagtgctggagggggagagcatcagctgcttccaggtgggcggggagaagaggctgtgcctgccccaggtgctgaacagcgtgctgcgggagttcaccctgcagcagatcaacacagtgtgtgatgagctgtacatctactgcagccgctgcaccagtgaccagctgcacatcctgaaggtgctgggcatcctgcccttcaatgcccccagctgtggcctcatcaccctgacagatgcccagaggctgtgcaatgccctgctgcggcccaggaccttcccccagaatggatctgtgctgcctgccaagagcagcctggcccagctgaaggagaccggcagcgcctttgaggtggagcatgaatgtctgggcaagtgccagggcctgtttgccccccagttctacgtgcagccagatgccccctgcatccagtgcctggagtgctgcggcatgtttgccccccagacctttgtgatgcacagccacaggagcccagacaagaggacctgccactggggctttgagagcgccaagtggcactgctacctgcacgtgaaccagaagtacctgggcaccccagaggagaagaagctgaagatcatcctggaggagatgaaggagaagttctccatgaggtctgggaagaggaaccagagcaagacagatgcccccagcggcatggagctgcagagctggtaccctgtgatcaagcaggagggggaccacgtgtcccagacccacagcttcctgcaccccagctactacctgtacatgtgtgacaaggtggtggcccccaacgtgtccctgaccagcgctgtgtcccagagcaaggagctgaccaagacagaggccaatgccagcatcagcaacaacagcaccagcaagaggaagtctgagagcgccacctgcaacctggtgcgggacatcaacaaggtgggcatcggcctggtggccgccgccagcagccccctgctggtgaaggatgtgatctgtgaagatgacaagggcaagatcatggaggaggtgatgaggacctacctgaagcagcaggagaagctgaacctgatcctgcagaagaagcagcagctgcagatggaggtgaagatgctgagcagcagcaagtccatgaaggagctgacagaggagcagcagaacctgcagaaggagctggagagcctgcagaatgaacatgcccagaggatggaggagttctacgtggagcagaaggacctggagaagaagctggagcagatcatgaagcagaagtgcacctgtgacagcaacctggagaaggacaaggaggccgagtatgccggccagctggccgagctgcggcagaggctggaccatgctgaggccgaccggcaggagctgcaggatgagctgcggcaggagcgggaggcccggcagaagctggagatgatgatcaaggagctgaagctgcagatcctgaagagcagcaagacagccaaggagtag

SEQ ID NO: 57010 - DNA, 372 bp, Artificial Sequence
  derived and/or modified sequence
atggagaacctgcagaccaacttcagcctggtgcagggcagcaccaagaagctgaatggcatgggagatgatggcagccccccagccaagaagatgatcacagacatccacgccaacgggaagaccatcaacaaggtgcccaccgtgaagaaggagcacctggatgattatggagaggcccctgtggagacagatggagagcacgtgaagaggacctgcacctctgtgcctgagaccctgcacctgaaccccagcctgaagcacaccctggcccagttccacctgagcagccagagcagcctgggcggccctgctgccttcagcgcccggcacagccaggagagcatgagccccaccgtcttcctgccctag

SEQ ID NO: 57011 - DNA, 1917 bp, Artificial Sequence
  derived and/or modified sequence
atggagaacctgcagaccaacttcagcctggtgcagggcagcaccaagaagctaaacgggatgggagatgatggctcacctcccgccaaaaaaatgataaccgatattcacgctaatggcaaaacaattaacaaggtgccgacagtgaaaaaggaacacctggacgattatggcgaagcgcccgtagaaaccgatggggaacatgtcaagcggacctgtacaagcgtcccagagactctccatcttaacccgtcactaaaacacaccttagctcagtttcacctgagcagccagtcctctctgggcggccccgcagcctttagtgctcgtcactcccaggagagtatgtccccaaccgtgtttttgcccctcccgagtcctcaagtactaccaggcccgctgttaattccaagtgattcaagcacagagctcacacagactgtgctggagggcgaatctatctcttgcttccaggtcggtggggaaaagcgactatgcttgccccaggtccttaactctgtgcttcgcgagtttacattgcagcagataaacaccgtgtgcgacgagctgtatatttattgctcgcgctgcacgtcggaccagctacacattctgaaagtgctcggaatcttgccctttaacgccccatcttgcgggctcatcacgctgacagacgcacagcggctctgtaatgccctcctccgcccacgtacattcccccagaacgggtccgtgttacccgcaaaatcttcgctcgcccagctaaaagagacaggatcagccttcgaggtggagcacgaatgcctcggtaaatgccaaggcctgtttgctccgcagttctacgtacagccggacgcaccctgtatccaatgcctagagtgctgcggcatgtttgcccctcagactttcgtgatgcacagtcaccggtcacccgataagcgaacctgtcattggggtttcgaatcggcaaagtggcattgttatcttcatgtgaatcagaaatacttgggtacacccgaggagaagaaattgaagataatactcgaagaaatgaaagagaagttttccatgcggagcggcaaacgcaatcagtcaaaaaccgacgctccctctggtatggagctccaatcctggtaccccgttataaaacaggaaggcgaccatgtctcacagacacattcattcctgcatccctcctattacctatatatgtgcgataaagtagtggcccctaacgtttcactgacatccgccgttagccagagcaaggaactcacaaagaccgaagctaatgcctccatttctaacaactcaactagcaaaagaaaatccgagtcagcaacttgtaacctcgtcagggacatcaataaagtcggtatcgggctggtagccgctgctagttctccactgctcgtgaaggacgtgatctgtgaagacgacaagggcaagataatggaagaagtgatgcgcacttacctgaagcagcaggagaagctcaacctcatcttgcaaaagaagcagcagctgcagatggaagtaaagatgctttctagcagcaaatcgatgaaagagctgactgaggagcaacaaaatctacagaaggagttggagtctctgcaaaatgagcatgcacaaaggatggaagagttttatgtggaacagaaggatctcgagaagaagttagagcagataatgaaacagaagtgcacatgtgacagtaaccttgagaaagacaaagaagcagaatacgccgggcagttggcggaactgagacagagacttgaccatgctgaagctgatcgtcaggaactgcaggacgagctacgccaggagagagaggcccgacagaaactggagatgatgatcaaagagctgaaactgcaaatcctgaagagctcaaagacagccaaggaatag

SEQ ID NO: 57012 - DNA, 372 bp, Artificial Sequence
  derived and/or modified sequence
atggagaacctgcagaccaacttcagcctggtgcagggcagcaccaaaaaactgaatggcatgggagacgatggatctccccccgctaagaaaatgatcacggatatccacgccaatgggaagacaatcaacaaggtacctacggtcaaaaaggagcacctggatgactacggagaggccccggtcgagacagatggagagcacgtcaagcggacctgtaccagcgtcccagaaacgttacatctgaacccttccctgaagcatacactagcgcagtttcatctgtccagtcagagtagtctcggtggcccagcagctttctccgcccgccactcgcaggagtccatgtcgccaacggtgttcctcccctag

SEQ ID NO: 57013 - DNA, 2702 bp, Artificial Sequence
  derived and/or modified sequence
ggtttcaaattggccctttggcctctggagcaaattcaaatgtaactcttccccaaccccccttctcttcttccagattaattaaaagaagaatgaactataatccttgaagataactgggcaattttttaagtcggaggctgttcttactggtgtgaggatttacacacgtcttcagtttttcagcacagaccagcagaccatcatttttagaggaaatactccctctgccctcctttttggtttccttggtggtaaagattaaatttggttgcatcattttgacttgtgtttgagtctagattttatggcacaaggaatggcataaacttttcatgtgttttggttaaaacaaaccagaccattgcattgaccctggacatctttaattgagaaattggtaactttattttaatatgtatatctgaagaattcaagaaaacaaaggcatcctcagaggtgtgcctcttttctttattattagaggcaaaacgaacaattttataggatttgtagtgaaattataccagattataaggagaaccaaaactaagtcgcaaaatttattaatttaaggggctctcgctttgaaagtttgagagtaagttacgataggcatttgtatccattcattactttcctcttttcaaataagcaactaaatagaaatgctaatctcagacttaattatttaacagaagagtgtaccatggaaaacctccagacaaatttctccttggttcagggctcaactaaaaaactgaatgggatgggagatgatggcagccccccagcgaaaaaaatgataacggacattcatgcaaatggaaaaacgataaacaaggtgccaacagttaagaaggaacacttggatgactatggagaagcaccagtggaaactgatggagagcatgttaagcgaacctgtacttctgttcctgaaactttgcatttaaatcccagtttgaaacacacattggcacaattccatttaagtagtcagagctcgctgggtggaccagcagcattttctgctcggcattcccaagaaagcatgtcgcctactgtatttctgcctcttccatcacctcaggttcttcctggcccattgctcatcccttcagatagctccacagaactcactcagactgtgttggaaggggaatctatttcttgttttcaagttggaggagaaaagagactctgtttgccccaagtcttaaattctgttctccgagaatttacactccagcaaataaatacagtgtgtgatgaactgtacatatattgttcaaggtgtacttcagaccagcttcatatcttaaaggtactgggcatacttccattcaatgccccatcctgtgggctgattacattaactgatgcacaaagattatgtaatgctttattgcggccacgaacttttcctcaaaatggtagcgtacttcctgctaaaagctcattggcccagttaaaggaaactggcagtgcctttgaagtggagcatgaatgcctaggcaaatgtcagggtttatttgcaccccagttttatgttcagcctgatgctccgtgtattcaatgtctggagtgttgtggaatgtttgcaccccagacgtttgtgatgcattctcacagatcacctgacaaaagaacttgccactggggctttgaatcagctaaatggcattgctatcttcatgtgaaccaaaaatacttaggaacacctgaagaaaagaaactgaagataattttagaagaaatgaaggagaagtttagcatgagaagtggaaagagaaatcaatccaagacagatgcaccatcaggaatggaattacagtcatggtatcctgttataaagcaggaaggtgaccatgtttctcagacacattcatttttacaccccagctactacttatacatgtgtgataaagtggttgccccaaatgtgtcacttacttctgctgtatcccagtctaaagagctcacaaagacagaggcaaatgcatcaatctcaaataattctacaagtaaaaggaaatctgagtctgccacttgcaacttagtcagagacataaacaaagtgggaattggccttgttgctgccgcttcatctccgcttcttgtgaaagatgtcatttgtgaggatgataagggaaaaatcatggaagaagtaatgagaacttatttaaaacaacaggaaaaactaaacttgattttgcaaaagaagcaacaacttcagatggaagtaaaaatgttgagtagttcaaaatctatgaaggaactcactgaagaacagcagaatttacagaaagagcttgaatctttgcagaatgaacatgctcaaagaatggaagaattttatgttgaacagaaagacttagagaaaaaattggagcagataatgaagcaaaaatgtacctgtgactcaaatttagaaaaagacaaagaggctgaatatgcaggacagttggcagaactgaggcagagattggaccatgctgaggccgataggcaagaactccaagatgaactcagacaggaacgggaagcaagacagaagttagagatgatgataaaagagctaaagctgcaaattctgaaatcatcaaagactgctaaagaatagaaactgttaaagagattcatctgtgtattactgacaaggttttttttgtttgttgcttgctttggtaattgaattc

SEQ ID NO: 57014 - DNA, 1917 bp, Artificial Sequence
  derived and/or modified sequence
atggaaaacctgcagaccaacttttccctagtccagggctcaaccaagaagctcaacggcatgggcgatgacggcagtccccctgccaagaaaatgattaccgacattcatgcaaacggaaaaacaatcaacaaggtgcccactgtgaaaaaagagcatttggatgactatggtgaggctcctgtagaaaccgacggcgagcacgtaaagaggacctgcacctccgtgcccgaaaccctgcacctgaacccgtcgttgaagcacactctcgctcagtttcacctgtcttcccagtcatccctggggggaccagcagctttctctgctcgtcactcgcaggagagcatgtcgcctaccgttttccttccattacccagtcctcaggtcttaccagggcctctactcatcccatcggattcctccaccgagctcacccagacagtcctggagggggaaagcatctcttgcttccaggttggaggagaaaagcgcctgtgcctcccccaggttctgaactccgtgttgagagagtttacactccagcagatcaacaccgtgtgtgacgagctgtatatctactgttctcggtgcacatctgaccagctgcatatcttaaaggttctcgggatccttccatttaacgcgccttcctgtggcctgataacactcacggatgctcagagactttgcaacgccctgctgcggcctagaacattcccccagaacggcagcgtgctccccgctaaaagcagcctggctcaactaaaagaaactggcagcgcctttgaggttgagcatgagtgcctcggcaagtgccaggggctgtttgccccacagttctacgtccagccggacgcaccctgcattcagtgcttagagtgctgcggaatgttcgcacctcagacttttgtgatgcacagccaccgcagccccgacaagcggacctgtcactggggcttcgaatcagctaagtggcactgctatctgcacgtgaaccagaaatacctcggaacaccagaggaaaaaaagcttaagattattctggaggaaatgaaggagaagttttcaatgcgatctggcaaacggaatcagtccaaaacagatgcaccctcagggatggagctccagtcctggtaccccgtgatcaaacaagagggcgatcacgtgagccaaacacactcttttctacacccctcctactatttgtacatgtgtgataaagtggtggctcccaatgtaagcctgacgagtgccgtctcccagagcaaagagctcaccaagacagaggccaatgcttccatcagtaataactccaccagcaagaggaagagtgagtctgcaacctgtaacctggttcgcgatattaataaggtgggcatcggtctggtggccgctgctagcagcccgttgcttgtcaaggacgttatttgcgaagacgacaaggggaagataatggaggaggtcatgcgtacttaccttaaacagcaggaaaaactcaacttgattttgcaaaagaagcagcagctccaaatggaggtgaagatgctctcgtccagtaaatcaatgaaagagctgaccgaggaacagcagaatctgcagaaggagcttgagtccctgcagaacgagcacgcacagcgcatggaagaattttacgtggaacaaaaggaccttgaaaagaagctggaacaaatcatgaaacagaagtgtacctgcgatagcaatctggagaaggacaaggaagccgagtatgccggacaactggcggagttgcgtcaacgcttggaccacgctgaagcagacagacaggagttgcaagacgagctgcggcaggaacgagaggccaggcagaaactggagatgatgattaaggaactgaaactgcagatcttgaaaagctccaagactgcaaaagaatag

SEQ ID NO: 57015 - DNA, 372 bp, Artificial Sequence
  derived and/or modified sequence
atggagaacctacagactaacttttcgcttgtgcagggctctactaagaaactgaacggtatgggagatgacgggagtcctccagcaaaaaaaatgattaccgatatccacgctaacggtaagaccataaataaggtgcccactgttaaaaaggagcacctcgatgattacggggaggcgccagtggagaccgacggtgagcacgtaaaacgaacctgcaccagcgtgcccgaaaccctgcatttgaatcctagcctgaagcacacccttgcacaatttcacctgtcatcacagagctcacttggcggacctgcggcattctccgccagacactctcaagagtcaatgtcacctaccgtttttctcccctag

SEQ ID NO: 57016 - DNA, 607 bp, Artificial Sequence
  derived and/or modified sequence
acagccgaagggagcgggcgagcggcgacggcggcggcggcgggcacagattaattaaaagaagaatgaactataatccttgaagataactgggcaattttttaagtcggaggctgttcttactggtgtgaggatttacacacgtcttcagtttttcagcacagaccagcagaccatcatttttagaggaaatactccctctgccctcctttttggtttccttggtgaagagtgtaccatggaaaacctccagacaaatttctccttggttcagggctcaactaaaaaactgaatgggatgggagatgatggcagccccccagcgaaaaaaatgataacggacattcatgcaaatggaaaaacgataaacaaggtgccaacagttaagaaggaacacttggatgactatggagaagcaccagtggaaactgatggagagcatgttaagcgaacctgtacttctgttcctgaaactttgcatttaaatcccagtttgaaacacacattggcacaattccatttaagtagtcagagctcgctgggtggaccagcagcattttctgctcggcattcccaagaaagcatgtcgcctactgtatttctgcct

SEQ ID NO: 57017 - protein, 445 aa, Artificial Sequence
  derived and/or modified sequence
MQEPLLGAEGPDYDTFPEKPPPSPGDRARVGTLQNKRVFLATFAAVLGNFSFGYALVYTSPVIPALERSLDPDLHLTKSQASWFGSVFTLGAAAGGLSAMILNDLLGRKLSIMFSAVPSAAGYALMAGAHGLWMLLLGRTLTGFAGGLTAACIPVYVSEIAPPGVRGALGATPQLMAVFGSLSLYALGLLLPWRWLAVAGEAPVLIMILLLSFMPNSPRFLLSRGRDEEALRALAWLRGTDVDVHWEFEQIQDNVRRQSSRVSWAEARAPHVCRPITVALLMRLLQQLTGITPILVYLQSIFDSTAVLLPPKDDAAIVGAVRLLSVLIAALTMDLAGRKVLLFVSGYAVGWGPITWLLMSEVLPLRARGVASGLCVLASWLTAFVLTKSFLPVVSTFGLQVPFFFFAAICLVSLVFTGCCVPETKGRSLEQIESFFRTGRRSFLR

SEQ ID NO: 57018 - DNA, 1338 bp, Artificial Sequence
  derived and/or modified sequence
atgcaggaaccactccttggagccgaaggtcctgactacgataccttccccgaaaaaccaccgccaagtcccggcgatcgcgcacgagtggggacactgcagaacaaacgggtattcctcgctacgtttgccgcagtgctcggcaacttctcctttggctatgcactggtctatacctcacccgtgatccccgccttggaaaggtctttggatccagacctccacctgactaaaagccaagcctcctggtttggctcagtctttacgctaggggctgccgctgggggattgtctgccatgattctgaacgacctgctggggcggaaactgtccataatgttttcagctgtgccaagtgccgcaggttatgccctgatggctggggcccatggtctgtggatgctgctcttgggtcgtactctcaccggatttgcaggaggcctgacagccgcatgtataccagtgtatgtgtccgagattgcccctccgggagttcgtggcgcgctcggcgctaccccgcagctgatggctgtttttggttcgctgtcactgtacgctctcgggctgctcctgccctggagatggttggccgtggcaggcgaggcccccgtcctgataatgattctgctgctgagctttatgcctaattcccctcggtttttgctgtcaaggggccgcgatgaagaggcgctcagagcattggcctggttgagggggacagacgtggacgtccattgggagttcgagcaaattcaagacaacgttagacgacagtcctccagggttagttgggccgaggctcgggcgccccacgtttgcagacctatcaccgtggctctgctaatgcggctgttacagcagctgacaggaattacacccattctcgtgtatctgcagagtatttttgattccaccgccgtactcctgcctcccaaagatgatgccgctatcgttggagcagtgcgcctcctctctgtgttgatcgccgcgctgacaatggatctggccgggaggaaagtcctgctgttcgtgtccgggtatgccgtggggtggggaccaattacgtggctgctgatgtcagaggtgctgccactccgcgctaggggggttgctagtggtctctgcgtgttggctagttggctgacagcattcgtactaacgaagtcatttctccccgtggtgtccacttttggacttcaagtcccattcttttttttcgccgcaatttgcctggtgtccttggtttttactggctgctgtgttccagaaacaaagggccggtctttggagcagattgagtcattttttaggaccggaagacgaagctttcttagatag

SEQ ID NO: 57019 - DNA, 1338 bp, Artificial Sequence
  derived and/or modified sequence
atgcaggagcccctgctgggcgctgagggccctgactatgacaccttccctgagaagcccccacccagccctggggaccgggcccgggtgggcaccctgcagaacaagagggtcttcctggccacctttgctgctgtgctgggcaacttctcctttggctacgccctggtgtacaccagccctgtgatcccagccctggagaggagcctggaccctgacctgcacctgaccaagagccaggcctcctggtttggcagcgtcttcaccctgggcgctgctgctgggggcctgagcgccatgatcctgaatgacctgctgggcaggaagctgagcatcatgttttctgctgtgcccagcgctgctggctacgccctgatggccggggcccacggcctgtggatgctgctgctgggccgcaccctgaccggctttgctgggggcctgacagctgcctgcatccctgtgtatgtgtctgagatcgcccctcctggggtgcggggggccctgggcgccaccccccagctgatggctgtgtttggcagcctgagcctgtatgccctgggcctgctgctgccctggcgctggctggccgtggccggggaggcccctgtgctgatcatgatcctgctgctgtccttcatgcccaacagcccccgcttcctgctgagccggggcagagatgaggaggccctgcgggccctggcctggctgcggggcacagatgtggatgtgcactgggagtttgagcagatccaggacaacgtgcggcggcagagcagccgggtgtcctgggccgaggcccgggcccctcatgtgtgccggcccatcaccgtggccctgctgatgaggctgctgcagcagctgaccggcatcacccccatcctggtgtacctgcagagcatctttgacagcacagctgtgctgctgccccccaaggatgatgctgccatcgtgggcgctgtgcggctgctgtctgtgctgattgctgccctgaccatggacctggccggcaggaaggtgctgctgtttgtgtctggctatgctgtgggctggggccccatcacctggctgctgatgtctgaggtgctgcccctgcgggcccggggcgtggccagcggcctgtgtgtgctggcctcctggctgacagcctttgtgctgaccaagagcttcctgcctgtggtgtccaccttcggcctgcaggtgcccttcttcttctttgctgccatctgcctggtgtccctggtgttcaccggctgctgcgtgcctgagaccaagggccgcagcctggagcagatcgagagcttcttcagaacaggccgccgctccttcctgaggtag

SEQ ID NO: 57020 - DNA, 1338 bp, Artificial Sequence
  derived and/or modified sequence
atgcaggagcccctgctgggcgccgagggccccgactacgacacctttccagagaagccacctccatctcccggggatagagctcgagtaggaactctgcagaacaaaagagtctttctcgcgactttcgccgccgttttgggcaatttttcgttcggatacgccctggtgtacacatctcctgtgattccggccctggaacgatctttggatccagatctgcatttaactaagtcacaggcttcctggttcgggagcgtatttactctcggcgcagccgcaggtggcctctccgcaatgatactcaacgatctgctcggacgaaagttgtcaatcatgttctctgccgttccctctgctgcaggctacgccctcatggctggggcccacggcttgtggatgctcctgttaggccggactctgaccggattcgcaggtggtctgaccgccgcttgtatacctgtgtacgtgtcagagattgcccccccgggggtgaggggagcgctgggtgcaaccccccaattgatggctgttttcggttcgttatcattgtatgctctcggccttctcctgccatggcgatggctggccgtggctggcgaagctccagtcctcatcatgatccttttgctgtcatttatgccaaactctccgcgattcctgctaagccggggccgagatgaggaagcactcagggcattagcatggctgagaggcactgatgtcgacgtccactgggagtttgagcagatccaagacaacgttagaaggcagagttcaagagtgtcatgggcggaggcacgagctcctcacgtttgtcggcctattactgtcgctctccttatgcgactcctccagcagttgacaggcattacgcctatcctggtgtacctccagagtatttttgatagtaccgcggtgctactgccgcctaaagacgacgcggctattgtgggagctgtgagattattatctgttttgatagccgccctgacaatggacctcgcaggacgaaaagttctgctcttcgtctccggatacgcagtgggatggggcccaattacgtggttgctgatgagcgaagtgctccccctcagggccagaggagttgcctcaggactatgcgtgttagctagctggctcaccgcattcgtgctcaccaaatccttcctgcccgtggtgagtactttcggtctgcaagttcccttcttcttttttgcagcaatttgcctcgtgtccctcgtcttcactggctgctgtgtgcccgaaacaaaggggcgtagccttgaacagatagagtcattcttcagaacaggccgtagatcttttctccgctag

SEQ ID NO: 57021 - DNA, 1338 bp, Artificial Sequence
  derived and/or modified sequence
atgcaggagccattactgggcgctgaaggtcctgactacgacactttcccggagaaaccacccccaagccccggagaccgtgcgcgtgtcggcaccctccagaataaacgtgtcttcttggcaaccttcgcagctgtcctgggcaatttttcattcggttacgcgttggtgtacacgagtccggtgataccagcactggagaggagtctcgacccggatctacacctgacgaaatctcaagcttcctggttcggtagcgtcttcacactgggagctgcagccggaggcttgtccgccatgatcctcaacgacctcctgggtcgtaaattgagcatcatgttcagcgcggtgccatcagcagcaggatacgcactcatggcgggtgcccacggcctatggatgctattgctggggcgtacccttacaggctttgccggaggcttgaccgcagcgtgtatcccggtctacgtaagcgaaattgctccaccaggtgtaagaggcgctcttggagcaaccccccaattgatggccgtgtttgggagcctttctctgtatgctctgggactgctccttccctggaggtggttggccgtggccggagaagcacctgtcctgatcatgattctgctgctatctttcatgcccaattcacccaggttcctgctctcaaggggcagggacgaagaggccctacgcgctttggcttggctgcgtggtacggacgtggacgttcactgggaattcgaacagattcaggacaatgtgcgccgtcagagcagcagggttagctgggccgaagcccgagctcctcacgtctgtcgccctataaccgtggccctgctgatgcggttactgcagcaactcaccggaatcacacctatcctggtatacctacaaagtatattcgactctactgcagtgctcctgcctccaaaggacgacgccgctatagtcggggcagtgagacttttatctgtcctgatcgccgctctgacgatggatctagcaggcaggaaggtgctgctgttcgtgagcggctacgccgtgggctgggggccaatcacctggttgctgatgtccgaagtgctaccactgagagccagaggagtggcgagtggcctatgcgtgctggcaagttggctgacagcttttgtactgacgaagtcctttctgcctgtggtgtccacgttcggccttcaagtccctttttttttcttcgccgctatttgtctggtgagtttggtgtttacaggctgctgcgtgcccgaaaccaaagggcgatcgctggagcagattgaatctttctttaggaccggaaggcggtcatttctcaggtag

SEQ ID NO: 57022 - DNA, 2301 bp, Artificial Sequence
  derived and/or modified sequence
ctgagcgccctccgctcgccccgagagagacccggccatgcaggagccgctgctgggagccgagggcccggactacgacaccttccccgagaagccgcccccgtcgccaggggacagggcgcgggtcgggaccctgcagaacaaaagggtgttcctggccaccttcgccgcagtgctcggcaatttcagctttgggtatgccctggtctacacatcccctgtcatcccagccctggagcgctccttggatcctgacctgcatctgaccaaatcccaggcatcctggtttgggtccgtgttcaccctgggagcagcggccggaggcctgagtgccatgatcctcaacgacctcctgggccggaagctgagcatcatgttctcagctgtgccgtcggcggccggctatgcgctcatggcgggtgcgcacggcctctggatgctgctgctcggaaggacgctgacgggcttcgccggggggctcacagctgcctgcatcccggtgtacgtgtctgagattgctcccccaggcgttcgtggggctctgggggccacaccccagctcatggcagtgttcggatccctgtccctctacgcccttggcctcctgctgccgtggcgctggctggctgtggccggggaggcgcctgtgctcatcatgatcctgctgctcagcttcatgcccaactcgccgcgcttcctgctctctcggggcagggacgaagaggccctgcgggcgctggcctggctgcgtgggacggacgtcgatgtccactgggagttcgagcagatccaggacaacgtccggagacagagcagccgagtatcgtgggctgaggcacgggccccacacgtgtgccggcccatcaccgtggccttgctgatgcgcctcctgcagcagctgacgggcatcacgcccatcctggtctacctgcagtccatcttcgacagcaccgctgtcctgctgccccccaaggacgacgcagccatcgttggggccgtgcggctcctgtccgtgctgatcgccgccctcaccatggacctcgcaggccgcaaggtgctgctcttcgtctcaggctacgccgtgggctggggtcccatcacctggctgctcatgtctgaggtcctgcccctgcgtgcccgtggcgtggcctcagggctctgcgtgctggccagctggctcaccgccttcgtcctcaccaagtccttcctgccagtggtgagcaccttcggcctccaggtgcctttcttcttcttcgcggccatctgcttggtgagcctggtgttcacaggctgctgtgtgcccgagaccaagggacggtccctggagcagatcgagtccttcttccgcacggggagaaggtccttcttgcgctaggtcaaggtccccgcctggagggggccaaacccccagtggctgggcctctgtgttggctacaaacctgcaccctgggaccaagaggcagcagtcatccctgccaccagccagagcacaggaagagcagtgtgatggggcctcagcagcgggtgcccctggctcgggacaggtagcactgctgtccagccacagccccagcccaggcagcccacagtgctgcacgtagccatgggccgcaggagtgcatacaaccctgcatccagggacacggccctgctgggtgacctcaggcctagtccctttcccttgcgtgaaggacacgccccacagaaggctacggggaggactgagaggacagggctggaggcagccaagtaacgtagtcatatcatcgcgctctgatctggtggcatctggctgtgcaaggaagacccggctttgccctcacaagtcttatgggcaccacagggaacatcctggacttaaaaagccagggcaggccgggcacagtggctcacgcctgtaatcccagcactttgggaggccaaagcaggtggattacccaaggccaggagttcaagaccagcctggccaacatggtgaaaccccgtctctactaaaaaatacaaaaaagctgggtgtggtggcacacacccgtagttccagctacttgggaggctgaggcagcattgcttgaacccgggaggtggaggctgcaatgagctgagatcatgccattgcactccagcctgggcaacgagagtgaaactccgtccccaccccctgccaaaaaaaaaaaaaaaaaagccagggcaaaggacctggcgtggccacttcctcctgccccagcccaacctctgggaacaggcagctcctatctgcaaactgtgttcacccttttgtaaaaataaaggaactggacctgt

SEQ ID NO: 57023 - DNA, 1338 bp, Artificial Sequence
  derived and/or modified sequence
atgcaggagcccctgctgggcgccgagggccccgactacgacaccttccccgagaagcccccccccagccccggcgacagagccagagtgggcaccctgcagaacaagagagtgttcctggccaccttcgccgccgtgctgggcaacttcagcttcggctacgccctggtgtacaccagccccgtgatccccgccctggagagaagcctggaccccgacctgcacctgaccaagagccaggccagctggttcggcagcgtgttcaccctgggcgccgccgccggcggcctgagcgccatgatcctgaacgacctgctgggcagaaagctgagcatcatgttcagcgccgtgcccagcgccgccggctacgccctgatggccggcgcccacggcctgtggatgctgctgctgggcagaaccctgaccggcttcgccggcggcctgaccgccgcctgcatccccgtgtacgtgagcgagatcgccccccccggcgtgagaggcgccctgggcgccaccccccagctgatggccgtgttcggcagcctgagcctgtacgccctgggcctgctgctgccctggagatggctggccgtggccggcgaggcccccgtgctgatcatgatcctgctgctgagcttcatgcccaacagccccagattcctgctgagcagaggcagagacgaggaggccctgagagccctggcctggctgagaggcaccgacgtggacgtgcactgggagttcgagcagatccaggacaacgtgagaagacagagcagcagagtgagctgggccgaggccagagccccccacgtgtgcagacccatcaccgtggccctgctgatgagactgctgcagcagctgaccggcatcacccccatcctggtgtacctgcagagcatcttcgacagcaccgccgtgctgctgccccccaaggacgacgccgccatcgtgggcgccgtgagactgctgagcgtgctgatcgccgccctgaccatggacctggccggcagaaaggtgctgctgttcgtgagcggctacgccgtgggctggggccccatcacctggctgctgatgagcgaggtgctgcccctgagagccagaggcgtggccagcggcctgtgcgtgctggccagctggctgaccgccttcgtgctgaccaagagcttcctgcccgtggtgagcaccttcggcctgcaggtgcccttcttcttcttcgccgccatctgcctggtgagcctggtgttcaccggctgctgcgtgcccgagaccaagggcagaagcctggagcagatcgagagcttcttcagaaccggcagaagaagcttcctgagatag

SEQ ID NO: 57024 - DNA, 963 bp, Artificial Sequence
  derived and/or modified sequence
atggagctgtgcgagttcgccttcaacatgaagaaggacgaggtgtgcgtgaacccctaccactaccagagagtggagacccccgtgctgccccccgtgctggtgcccagacacaccgagatccccgccgagttcccccccctggacgactacagccacagcatccccgagaacaccaacttccccgccggcatcgagccccagagcaacatccccgagacccccccccccggctacctgagcgaggacggcgagaccagcgaccaccagatgaaccacagcatggacgccggcagccccaacctgagccccaaccccatgagccccgcccacaacaacctggacctgcagcccgtgacctactgcgagcccgccttctggtgcagcatcagctactacgagctgaaccagagagtgggcgagaccttccacgccagccagcccagcatgaccgtggacggcttcaccgaccccagcaacagcgagagattctgcctgggcctgctgagcaacgtgaacagaaacgccgccgtggagctgaccagaagacacatcggcagaggcgtgagactgtactacatcggcggcgaggtgttcgccgagtgcctgagcgacagcgccatcttcgtgcagagccccaactgcaaccagagatacggctggcaccccgccaccgtgtgcaagatcccccccggctgcaacctgaagatcttcaacaaccaggagttcgccgccctgctggcccagagcgtgaaccagggcttcgaggccgtgtaccagctgaccagaatgtgcaccatcagaatgagcttcgtgaagggctggggcgccgagtacagaagacagaccgtgaccagcaccccctgctggatcgagctgcacctgaacggccccctgcagtggctggacaaggtgctgacccagatgggcagccccagcatcagatgcagcagcgtgagctag

SEQ ID NO: 57025 - DNA, 963 bp, Artificial Sequence
  derived and/or modified sequence
atggagctgtgtgagttcgctttcaatatgaaaaaggacgaggtttgcgttaacccctaccactaccagagggttgaaactcctgtcctgccgccagttctcgtgccccgccacaccgaaatcccggcggagttcccacccctggatgactacagccactccatacctgagaatacgaactttcctgctgggatcgagccccagtcaaacatccctgagacacctcccccagggtatctctccgaggatggggaaacatccgaccaccagatgaatcattctatggacgcgggaagccctaatctgagtccaaatcctatgtccccagctcataataatcttgacctccaacctgttacctattgcgaaccagccttttggtgctccattagctactacgaactcaatcagcgcgtgggtgagacgttccatgctagtcagccgtcaatgaccgtagatggtttcacagacccgtcgaacagcgaaaggttttgcctgggtcttttatccaacgtgaataggaacgctgcagtggagctgaccaggcgccacatcggaagaggcgttagattgtactacattggtggcgaggtgtttgcagaatgcctctctgacagcgctatcttcgtacagtcaccaaactgcaatcagaggtacggttggcatccagcgactgtatgcaagattccccccggctgtaatctgaaaatcttcaacaaccaggagtttgcggcacttctggctcagagcgttaaccaagggtttgaggccgtctatcagctgactcggatgtgcaccataagaatgtcattcgtgaagggttggggggctgaatacaggcgccagaccgtgacatcaaccccctgctggatcgaattacacttgaacggtcctcttcagtggttggacaaggttctgacccagatgggtagccctagcattagatgttcatccgtttcttag

SEQ ID NO: 57026 - DNA, 963 bp, Artificial Sequence
  derived and/or modified sequence
atggagctgtgtgaatttgccttcaacatgaagaaggatgaggtgtgtgtgaacccctaccactaccagagggtggagacccctgtgctgccccctgtgctggtgcccaggcacacagagatcccagctgagttcccccccctggatgactacagccacagcatccctgagaacaccaacttccctgctggcatcgagccccagagcaacatccctgagaccccacctcctggctacctgtctgaagatggagagaccagtgaccaccagatgaaccacagcatggatgctggcagccccaacctgagccccaaccccatgagccctgcccacaacaacctggacctgcagcctgtgacctactgtgagcccgccttctggtgcagcatctcctactatgagctgaaccagagggtgggggagaccttccacgccagccagcccagcatgacagtggatggcttcacagaccccagcaacagcgagcgcttctgcctgggcctgctgagcaatgtgaacagaaatgctgctgtggagctgacccggcggcacatcggccggggcgtgcggctgtactacatcggcggggaggtgtttgctgaatgtctgagtgacagcgccatctttgtgcagagccccaactgcaaccagagatatggctggcacccagccaccgtgtgcaagatccccccaggctgcaacctgaagatcttcaacaaccaggagtttgctgccctgctggcccagagcgtgaaccagggctttgaagctgtgtaccagctgaccaggatgtgcaccatccgcatgagctttgtgaagggctggggcgctgagtaccgccggcagacagtgaccagcaccccctgctggattgagctgcacctgaatggccccctgcagtggctggacaaggtgctgacccagatgggcagccccagcatccgctgcagctctgtgtcctag

SEQ ID NO: 57027 - DNA, 963 bp, Artificial Sequence
  derived and/or modified sequence
atggagctgtgcgagttcgccttcaacatgaagaaggacgaggtgtgcgtgaatccatatcactaccagagagttgagactccggttctgccaccagtgctcgtgcctcgacatacagagatcccagcggaattccccccccttgacgactattcacactctataccagagaacacaaattttccagccggtattgagcctcagtccaacatccccgagaccccgcctccaggctatttatcagaggacggagaaacttcagaccaccaaatgaaccatagcatggacgccgggtctccaaatctctccccaaaccccatgagccccgcgcacaataacttggatctccagcccgttacatattgtgagccagccttctggtgcagcatctcctactatgagcttaaccagagagttggtgaaactttccatgctagccagccgagcatgaccgtagacggctttactgacccctccaattccgagcggttttgcctcggtctgctctcaaacgtgaatcgaaacgccgcagttgaactcacccgtcgtcacattggacgaggggtgagactgtattacataggtggggaagtttttgccgagtgtctcagcgacagcgccatcttcgtgcaatcccccaactgcaatcaacgctatggatggcacccagctaccgtttgcaagattccaccaggatgcaacctaaaaatcttcaataaccaagagttcgctgctctcttagcacaatcagtgaatcagggcttcgaggccgtgtaccaactgactaggatgtgtacaatcagaatgtcctttgtaaaaggctggggggcagagtacaggaggcagacagtaaccagcacaccatgctggattgaactccatctgaacggcccactgcagtggctggacaaggtgttaacccagatgggcagccctagcattcgttgctcttcagtaagctag

SEQ ID NO: 57028 - DNA, 963 bp, Artificial Sequence
  derived and/or modified sequence
atggagctgtgcgagttcgcattcaacatgaagaaggacgaagtgtgcgtgaacccctaccattaccaacgtgtggaaacacctgtcctcccacccgtgctcgttcccagacacacagagataccagctgaatttccccctttggacgactattctcacagtattccagagaatacaaacttcccagccggaatagaaccgcagtcaaacatacccgagactcctcctcctggctacttaagtgaggatggggagacaagtgatcatcagatgaaccactctatggacgccggatcccccaatctctccccgaatcccatgtcccctgcgcacaataacctggaccttcagcctgtgacctactgcgagccagctttctggtgcagtattagctattatgaacttaaccaacgggtaggcgagacattccatgcgtcccagccatccatgacagtggacggctttacggatccgtcgaattcagaacgtttctgtctcggccttctgagcaatgtcaatagaaacgctgccgtcgagttaaccaggagacacattgggcgaggggtgcgcctttactacatcggcggagaagtttttgctgagtgcctttcagattctgcaatattcgtacagagtccgaattgcaatcagcgttacggctggcaccctgcaacagtgtgcaagattccccctgggtgtaatctcaaaattttcaataaccaggagtttgcggctctactggcccaatctgtcaatcagggttttgaagccgtctaccagctgaccagaatgtgcacgatacgcatgagtttcgtaaagggctggggcgctgagtaccgaagacagaccgtaacgtctactccttgttggatcgaactacacctgaatggcccactgcagtggttggacaaagttcttacccagatgggctccccatccattcggtgttccagtgtgagctag

SEQ ID NO: 57029 - DNA, 1147 bp, Artificial Sequence
  derived and/or modified sequence
agtaatcctgctgcgttcctcttagagcattctaatttggacgtgacgttcatcctgggttagtttactgggctgagattggctacaggcctgtgtgcttgggtcagagtgttaaggaggagacccactgtccaaccttctcagatcctttgcgggtagccctggcgtcccgcggagaccccaccccctggctacctgagtgaagatggagaaaccagtgaccaccagatgaaccacagcatggacgcaggttctccaaacctatccccgaatccgatgtccccagcacataataacttggacctgcagccagttacctactgcgagccggccttctggtgctccatctcctactacgagctgaaccagcgcgtcggggagacattccacgcctcgcagccatccatgactgtggatggcttcaccgacccctccaattcggagcgcttctgcctagggctgctctccaatgtcaacaggaatgcagcagtggagctgacacggagacacatcggaagaggcgtgcggctctactacatcggaggggaggtcttcgcagagtgcctcagtgacagcgctatttttgtccagtctcccaactgtaaccagcgctatggctggcacccggccaccgtctgcaagatcccaccaggatgcaacctgaagatcttcaacaaccaggagttcgctgccctcctggcccagtcggtcaaccagggctttgaggctgtctaccagttgacccgaatgtgcaccatccgcatgagcttcgtcaaaggctggggagcggagtacaggagacagactgtgaccagtaccccctgctggattgagctgcacctgaatgggcctttgcagtggcttgacaaggtcctcacccagatgggctccccaagcatccgctgttccagtgtgtcttagagacatcaagtatggtaggggagggcaggcttggggaaaatggccatgcaggaggtggagaaaattggaactctactcaacccattgttgtcaaggaagaagaaatctttctccctcaactgaaggggtgcacccacctgttttctgaaacacacgagcaaacccagaggtggatgttatgaacagctgtgtctgccaaacacatttaccctttggccccactttg

SEQ ID NO: 57030 - protein, 381 aa, Artificial Sequence
  derived and/or modified sequence
MSCLHPRQTWKGAALVHRKAWWMGRSLDGRLQVSHRKGLPHVIYCRLWRWPDLHSHHELRAMELCEFAFNMKKDEVCVNPYHYQRVETPVLPPVLVPRHTEIPAEFPPLDDYSHSIPENTNFPAGIEPQSNIPETPPPGYLSEDGETSDHQMNHSMDAGSPNLSPNPMSPAHNNLDLQPVTYCEPAFWCSISYYELNQRVGETFHASQPSMTVDGFTDPSNSERFCLGLLSNVNRNAAVELTRRHIGRGVRLYYIGGEVFAECLSDSAIFVQSPNCNQRYGWHPATVCKIPPGCNLKIFNNQEFAALLAQSVNQGFEAVYQLTRMCTIRMSFVKGWGAEYRRQTVTSTPCWIELHLNGPLQWLDKVLTQMGSPSIRCSSVS

SEQ ID NO: 57031 - DNA, 1146 bp, Artificial Sequence
  derived and/or modified sequence
atgagctgcctgcaccccagacagacctggaagggcgccgccctggtgcacagaaaggcctggtggatgggcagaagcctggacggcagactgcaggtgagccacagaaagggcctgccccacgtgatctactgcagactgtggagatggcccgacctgcacagccaccacgagctgagagccatggagctgtgcgagttcgccttcaacatgaagaaggacgaggtgtgcgtgaacccctaccactaccagagagtggagacccccgtgctgccccccgtgctggtgcccagacacaccgagatccccgccgagttcccccccctggacgactacagccacagcatccccgagaacaccaacttccccgccggcatcgagccccagagcaacatccccgagacccccccccccggctacctgagcgaggacggcgagaccagcgaccaccagatgaaccacagcatggacgccggcagccccaacctgagccccaaccccatgagccccgcccacaacaacctggacctgcagcccgtgacctactgcgagcccgccttctggtgcagcatcagctactacgagctgaaccagagagtgggcgagaccttccacgccagccagcccagcatgaccgtggacggcttcaccgaccccagcaacagcgagagattctgcctgggcctgctgagcaacgtgaacagaaacgccgccgtggagctgaccagaagacacatcggcagaggcgtgagactgtactacatcggcggcgaggtgttcgccgagtgcctgagcgacagcgccatcttcgtgcagagccccaactgcaaccagagatacggctggcaccccgccaccgtgtgcaagatcccccccggctgcaacctgaagatcttcaacaaccaggagttcgccgccctgctggcccagagcgtgaaccagggcttcgaggccgtgtaccagctgaccagaatgtgcaccatcagaatgagcttcgtgaagggctggggcgccgagtacagaagacagaccgtgaccagcaccccctgctggatcgagctgcacctgaacggccccctgcagtggctggacaaggtgctgacccagatgggcagccccagcatcagatgcagcagcgtgagctag

SEQ ID NO: 57032 - DNA, 1146 bp, Artificial Sequence
  derived and/or modified sequence
atgagttgccttcaccctcgccagacgtggaaaggagctgccctggtgcataggaaggcctggtggatgggcaggtctctcgatggccggctgcaggtctcgcaccgcaaagggctgccccacgttatatattgccggctctggcgctggcctgatctgcattcacaccacgagctgcgggccatggaactgtgtgaattcgcatttaatatgaagaaagacgaagtttgcgtgaatccatatcactatcagcgcgtggagaccccggtgctgcctccagtgctggtacccagacacaccgagatccctgcggagtttcctcctcttgacgattatagccattccataccagaaaacaccaattttcctgctggaatcgagcctcagtcgaatataccagagacacctcctccaggctacctgagtgaggacggcgaaactagtgaccatcagatgaatcatagtatggacgccgggagcccaaacttgagcccaaacccaatgagcccagcccacaacaacctggacctacaacctgtcacatattgtgaaccagcattttggtgtagtatttcttactatgaactcaatcagcgggtgggcgagacgttccacgcctcacagccgtctatgaccgttgatggcttcaccgatcccagcaactcagaacgcttttgtctcggattgttaagtaacgtaaaccgcaacgctgcagtagaactaaccagacggcatattggccggggcgttaggctgtattatatagggggcgaggtgttcgcggagtgcctgagcgacagcgccattttcgtacaatcacccaattgcaaccaacgctatgggtggcacccggctactgtgtgcaagatcccacctggctgcaatcttaaaatcttcaataaccaggagtttgctgcgttgttggcacagtccgttaaccaggggtttgaggccgtataccaactgacacgcatgtgcactatccgtatgagctttgtcaaggggtggggcgctgagtatcgccgacagacagtgacttctaccccctgttggatcgagctgcaccttaacggaccacttcagtggcttgataaagtcttgacacagatgggcagcccctctataagatgttcatccgtgtcttag

SEQ ID NO: 57033 - DNA, 1146 bp, Artificial Sequence
  derived and/or modified sequence
atgagctgcctgcacccccggcagacctggaagggagctgccctggtgcacaggaaggcctggtggatgggccgcagcctggatggccgcctgcaggtgagccacaggaagggcctgccccacgtgatctactgccgcctgtggcgctggccagacctgcacagccaccacgagctgcgggccatggagctgtgtgaatttgccttcaacatgaagaaggatgaggtgtgtgtgaacccctaccactaccagagggtggagacccctgtgctgccccctgtgctggtgcccaggcacacagagatcccagctgagttcccccccctggatgactacagccacagcatccctgagaacaccaacttccctgctggcatcgagccccagagcaacatccctgagaccccacctcctggctacctgtctgaagatggagagaccagtgaccaccagatgaaccacagcatggatgctggcagccccaacctgagccccaaccccatgagccctgcccacaacaacctggacctgcagcctgtgacctactgtgagcccgccttctggtgcagcatctcctactatgagctgaaccagagggtgggggagaccttccacgccagccagcccagcatgacagtggatggcttcacagaccccagcaacagcgagcgcttctgcctgggcctgctgagcaatgtgaacagaaatgctgctgtggagctgaccaggaggcacatcggccggggcgtgcggctgtactacatcggcggggaggtgtttgctgagtgcctgagtgacagcgccatctttgtgcagagccccaactgcaaccagagatatggctggcacccagccaccgtgtgcaagatccccccaggctgcaacctgaagatcttcaacaaccaggagtttgctgccctgctggcccagagcgtgaaccagggctttgaggccgtgtaccagctgaccaggatgtgcaccatccgcatgagctttgtgaagggctggggcgctgagtaccgccggcagacagtgaccagcaccccctgctggattgagctgcacctgaatggccccctgcagtggctggacaaggtgctgacccagatgggcagccccagcatccgctgcagctctgtgtcctag

SEQ ID NO: 57034 - DNA, 1146 bp, Artificial Sequence
  derived and/or modified sequence
atgagctgcctgcacccccggcagacctggaagggcgccgccctggtgcacagaaaggcttggtggatgggacggagcctcgatgggagactgcaagtctcccacagaaagggcctcccgcacgtcatctattgccgcctgtggagatggcccgatcttcatagtcaccacgagctgcgagcaatggaattgtgtgaattcgcattcaacatgaagaaagatgaagtatgtgtcaacccttaccattatcagagagtagagactccggttttgcctccggtccttgtcccccgtcacacagagattcctgccgagtttcctcccttggacgactattcacattcaataccagagaacactaacttcccagctggtatcgaaccacagagcaatatccctgaaaccccaccgccgggctacctgtctgaagatggggaaacatctgatcaccagatgaaccatagtatggatgcagggtcacctaacctaagccccaacccgatgagcccagctcacaacaatcttgacttgcagccagtcacttattgcgagcctgctttttggtgctccatttcttactacgagctgaaccaaagggtgggcgagacttttcacgccagtcagccgtcaatgaccgttgatggctttacagaccccagcaattcagaacgtttttgcttgggcctgctgtccaacgtgaacaggaacgccgccgtcgagcttacacgcaggcatatcggtcgaggcgtgaggttgtattatatagggggagaagtgtttgccgagtgcctaagtgactccgccattttcgtccagtctcctaactgtaatcagcggtacggctggcaccctgccacagtgtgtaagatccccccagggtgtaaccttaaaattttcaataaccaggagtttgccgcattgctcgcccagtccgtaaaccaaggttttgaagcggtttatcagctgacacgtatgtgcaccattcgtatgtcttttgtgaagggctggggcgccgagtatcgccggcagacagtgactagcaccccatgctggatcgagcttcatctgaatgggcctctgcaatggctggacaaggttttaactcagatgggctctccttccataagatgttccagcgtatcctag

SEQ ID NO: 57035 - DNA, 1146 bp, Artificial Sequence
  derived and/or modified sequence
atgtcttgcctacatcctcggcagacatggaaaggggctgcccttgtacatcggaaggcgtggtggatgggtaggtcccttgacggtcggctgcaagtctcccatcgcaagggtctgccccatgttatctattgtcgactctggcgatggcctgacctgcactcccaccacgaactgagagccatggaactgtgcgagttcgcgttcaacatgaagaaagacgaggtgtgcgtgaatccatatcattatcaacgagttgaaacccccgtgctaccgccagtgctcgtccccaggcacacggagatccctgccgaatttccaccactcgatgattactcccattctatacccgaaaacactaacttccctgccggaatcgaaccacaaagcaatattcctgaaaccccccctcctgggtacctgtccgaggacggtgaaacaagcgatcaccaaatgaatcacagtatggacgcaggcagcccaaacctgagtccaaatccaatgagccccgctcataacaacctggaccttcagcccgtgacttattgtgaaccagccttttggtgcagcattagctattacgaattgaatcaaagggtgggggaaaccttccatgctagtcagccaagcatgacggtggatggattcaccgacccatccaactcagagcgcttttgtctgggccttttgagcaacgtcaacagaaatgccgctgtagagctgactagacgacacattggcaggggagtgagattgtactacatcgggggtgaagtgtttgccgagtgtttgtctgacagcgctatatttgtgcagtccccaaactgtaatcagcgctatggttggcaccccgctaccgtgtgtaagatcccacccggatgcaatctgaaaattttcaataaccaggaatttgcagcactgttagcacagtccgtaaaccagggatttgaggcagtctaccaattaaccagaatgtgtaccataaggatgtcttttgtcaagggatggggagctgaatatagacgacagaccgtgacctcaacaccttgctggatagaattgcacctcaatggcccactgcaatggctggataaagttctgacgcagatgggaagcccctcaattcgctgttcttcagttagctag

SEQ ID NO: 57036 - DNA, 1530 bp, Artificial Sequence
  derived and/or modified sequence
ccctgtgacctcccaacttcacaaacatgtcttgcctgcaccctaggcaaacgtggaaaggcgcagctctggtacaccggaaagcatggtggatggggaggtccctggatggccggttgcaggtgtcccatcggaaggggctccctcatgtcatctactgccgcctgtggcgatggccagacctgcacagccaccacgagctacgggccatggagctgtgtgagttcgccttcaatatgaagaaggacgaggtctgcgtgaatccctaccactaccagagagtagagacaccagttctacctcctgtgttggtgccacgccacacagagatcccggccgagttccccccactggacgactacagccattccatccccgaaaacactaacttccccgcaggcatcgagccccagagcaatattccagagaccccaccccctggctacctgagtgaagatggagaaaccagtgaccaccagatgaaccacagcatggacgcaggttctccaaacctatccccgaatccgatgtccccagcacataataacttggacctgcagccagttacctactgcgagccggccttctggtgctccatctcctactacgagctgaaccagcgcgtcggggagacattccacgcctcgcagccatccatgactgtggatggcttcaccgacccctccaattcggagcgcttctgcctagggctgctctccaatgtcaacaggaatgcagcagtggagctgacacggagacacatcggaagaggcgtgcggctctactacatcggaggggaggtcttcgcagagtgcctcagtgacagcgctatttttgtccagtctcccaactgtaaccagcgctatggctggcacccggccaccgtctgcaagatcccaccaggatgcaacctgaagatcttcaacaaccaggagttcgctgccctcctggcccagtcggtcaaccagggctttgaggctgtctaccagttgacccgaatgtgcaccatccgcatgagcttcgtcaaaggctggggagcggagtacaggagacagactgtgaccagtaccccctgctggattgagctgcacctgaatgggcctttgcagtggcttgacaaggtcctcacccagatgggctccccaagcatccgctgttccagtgtgtcttagagacatcaagtatggtaggggagggcaggcttggggaaaatggccatgcaggaggtggagaaaattggaactctactcaacccattgttgtcaaggaagaagaaatctttctccctcaactgaaggggtgcacccacctgttttctgaaacacacgagcaaacccagaggtggatgttatgaacagctgtgtctgccaaacacatttaccctttggccccactttgaagggcaagaaatggcgtctgctctggtggcttaagtgagcagaacaggtagtattacaccaccggccccctccccccagactctttttttgagtgacagctttctgggatgtcacagtccaaccagaaaca

SEQ ID NO: 57037 - DNA, 693 bp, Artificial Sequence
  derived and/or modified sequence
atgaaccacagcatggacgccggcagccccaacctgagccccaaccccatgagccccgcccacaacaacctggacctgcagcccgtgacctactgcgagcccgccttctggtgcagcatcagctactacgagctgaaccagagagtgggcgagaccttccacgccagccagcccagcatgaccgtggacggcttcaccgaccccagcaacagcgagagattctgcctgggcctgctgagcaacgtgaacagaaacgccgccgtggagctgaccagaagacacatcggcagaggcgtgagactgtactacatcggcggcgaggtgttcgccgagtgcctgagcgacagcgccatcttcgtgcagagccccaactgcaaccagagatacggctggcaccccgccaccgtgtgcaagatcccccccggctgcaacctgaagatcttcaacaaccaggagttcgccgccctgctggcccagagcgtgaaccagggcttcgaggccgtgtaccagctgaccagaatgtgcaccatcagaatgagcttcgtgaagggctggggcgccgagtacagaagacagaccgtgaccagcaccccctgctggatcgagctgcacctgaacggccccctgcagtggctggacaaggtgctgacccagatgggcagccccagcatcagatgcagcagcgtgagctag

SEQ ID NO: 57038 - DNA, 693 bp, Artificial Sequence
  derived and/or modified sequence
atgaatcattcaatggacgccgggagcccaaatctgagcccaaatccaatgtcccctgcacacaataaccttgaccttcagccggttacttattgtgagccagccttctggtgcagcattagctactacgaactcaaccaaagagtgggagaaaccttccatgcgtcacagccttctatgaccgtggatggattcactgatccaagcaatagcgagaggttttgcctcgggcttcttagcaatgttaatcggaacgctgcagtagagctgacccgccgacatatcgggcggggcgtgagactgtattatataggtggagaagtgttcgctgaatgcctgtctgactctgccatcttcgtacagagtcctaactgcaaccaacgctatgggtggcaccccgccacagtctgcaagatccccccaggttgcaatcttaaaattttcaacaaccaagaattcgctgccctgctggcccagtccgtgaaccagggctttgaggcagtataccagttaacacgcatgtgtacaattcggatgtcatttgtgaaagggtggggcgccgagtatcgccgccaaacagtgacatccaccccgtgctggatcgagctgcaccttaacggccccctccagtggctcgataaggtcctgacccagatgggctcaccaagtatccgctgtagcagcgtcagctag

SEQ ID NO: 57039 - DNA, 693 bp, Artificial Sequence
  derived and/or modified sequence
atgaaccacagcatggatgctggcagccccaacctgagccccaaccccatgagccctgcccacaacaacctggacctgcagcctgtgacctactgtgagcccgccttctggtgcagcatctcctactatgagctgaaccagagggtgggggagaccttccacgccagccagcccagcatgacagtggatggcttcacagaccccagcaacagcgagcgcttctgcctgggcctgctgagcaatgtgaacagaaatgctgctgtggagctgacccggcggcacatcggccggggcgtgcggctgtactacatcggcggggaggtgtttgctgaatgtctgagtgacagcgccatctttgtgcagagccccaactgcaaccagagatatggctggcacccagccaccgtgtgcaagatccccccaggctgcaacctgaagatcttcaacaaccaggagtttgctgccctgctggcccagagcgtgaaccagggctttgaagctgtgtaccagctgaccaggatgtgcaccatccgcatgagctttgtgaagggctggggcgctgagtaccgccggcagacagtgaccagcaccccctgctggattgagctgcacctgaatggccccctgcagtggctggacaaggtgctgacccagatgggcagccccagcatccgctgcagctctgtgtcctag

SEQ ID NO: 57040 - DNA, 693 bp, Artificial Sequence
  derived and/or modified sequence
atgaaccacagcatggacgccggcagccccaacctgagccccaaccctatgtcaccggctcataacaatttagatctgcagcctgtgacatattgcgaaccagctttttggtgctctattagctattatgaactcaaccagcgcgttggggagacctttcatgctagccagccctccatgacagtcgatggtttcactgacccgtccaacagtgaaaggttctgtctgggacttctgagtaatgtgaacaggaacgccgcagtcgagttgacccggagacatatcggtaggggtgtgcgcctgtactatatcggcggcgaggtttttgcggagtgtctgtcagacagcgccattttcgtgcaaagtccaaactgcaaccagagatatggatggcacccagctactgtttgtaagatccccccaggttgcaacctcaaaatcttcaacaaccaggagttcgctgccctactagcccagagcgtgaatcaaggctttgaggccgtctaccagctgacccgcatgtgtaccattcggatgtccttcgtgaagggatggggggccgagtataggcgccaaacagtcacaagcacaccctgctggattgagctccacctcaatggcccactgcagtggctggacaaagtcttaacgcagatgggcagtcccagcattaggtgttctagtgtctcatag

SEQ ID NO: 57041 - DNA, 693 bp, Artificial Sequence
  derived and/or modified sequence
atgaaccattcaatggatgctggctcccccaatctgtcaccgaatcccatgagtccggctcataacaacttggatctccagccagtaacctactgtgagcctgcattctggtgtagtatatcttactacgagctcaatcagcgtgttggggagactttccacgccagccaaccttcaatgaccgtcgacggctttacagacccatccaacagtgagcgcttttgcctgggcctgctgagtaatgtcaacaggaacgcagctgtggaactcacccgcagacatatcgggagaggagtccgcctatattacatcggcggagaggtgttcgcagagtgcctttctgacagcgctatcttcgtccagtctcccaactgtaaccagcggtatgggtggcatccggctacagtgtgcaagattccaccagggtgcaacctcaaaattttcaacaatcaggaattcgcagccctgttagcacaatccgtgaatcagggcttcgaggccgtgtatcagctcacgaggatgtgcaccatccggatgtcgtttgtcaagggctggggagcagaatataggcgacagaccgtaacgtctaccccctgctggatcgaactgcatcttaatggacctttgcagtggctggacaaagtgttgactcagatgggctcgccttccattcgatgctcttctgtgtcatag

SEQ ID NO: 57042 - protein, 866 aa, Artificial Sequence
  derived and/or modified sequence
MGFPPLLKGQASATRSSLASCSWVVFFLSCLSRHAPEIEGGRRWTELIRTMESRVLLRTFCLIFGLGAVWGLGVDPSLQIDVLTELELGESTTGVRQVPGLHNGTKAFLFQDTPRSIKASTATAEQFFQKLRNKHEFTILVTLKQTHLNSGVILSIHHLDHRYLELESSGHRNEVRLHYRSGSHRPHTEVFPYILADDKWHKLSLAISASHLILHIDCNKIYERVVEKPSTDLPLGTTFWLGQRNNAHGYFKGIMQDVQLLVMPQGFIAQCPDLNRTCPTCNDFHGLVQKIMELQDILAKTSAKLSRAEQRMNRLDQCYCERTCTMKGTTYREFESWIDGCKNCTCLNGTIQCETLICPNPDCPLKSALAYVDGKCCKECKSICQFQGRTYFEGERNTVYSSSGVCVLYECKDQTMKLVESSGCPALDCPESHQITLSHSCCKVCKGYDFCSERHNCMENSICRNLNDRAVCSCRDGFRALREDNAYCEDIDECAEGRHYCRENTMCVNTPGSFMCICKTGYIRIDDYSCTEHDECITNQHNCDENALCFNTVGGHNCVCKPGYTGNGTTCKAFCKDGCRNGGACIAANVCACPQGFTGPSCETDIDECSDGFVQCDSRANCINLPGWYHCECRDGYHDNGMFSPSGESCEDIDECGTGRHSCANDTICFNLDGGYDCRCPHGKNCTGDCIHDGKVKHNGQIWVLENDRCSVCSCQNGFVMCRRMVCDCENPTVDLFCCPECDPRLSSQCLHQNGETLYNSGDTWVQNCQQCRCLQGEVDCWPLPCPDVECEFSILPENECCPRCVTDPCQADTIRNDITKTCLDEMNVVRFTGSSWIKHGTECTLCQCKNGHICCSVDPQCLQEL

SEQ ID NO: 57043 - DNA, 2520 bp, Artificial Sequence
  derived and/or modified sequence
atgtccatcagacgtttgctgatactcattctgaagatcggccggagatggaccgaactaattcgtacaatggagtctagggttctgctccgaactttttgcctgatcttcggcctgggcgccgtttggggactgggggtcgacccctccctgcagatcgacgtcctcacagagctggagcttggagagtctactacgggggtgaggcaagttcccggcctgcataatggcactaaagcattcctattccaggatactccaagaagcataaaagccagcacagcaaccgccgagcagtttttccagaagcttcgcaataaacacgagttcaccatcctcgtgactttgaaacagacacacctgaatagcggggttatacttagcatccatcacttggatcatcgctatctagaactcgaatcctctggacaccggaacgaagtgagactgcactaccggtccggcagtcaccgtccccacacggaagtgtttccatacatcctggccgacgataagtggcataaactgagcctggcaatctccgccagtcacctaatattgcacatcgattgtaacaaaatatacgaaagagtggtggagaaaccatctactgacctgcctctgggaacaacgttttggttagggcagcggaataacgctcatggttattttaaaggcattatgcaggacgtacagttgttggtgatgccccaaggcttcatcgctcaatgtccagacctaaatcgaacctgccctacctgcaacgatttccatggacttgttcagaaaatcatggaacttcaggatatcctcgcaaaaacctcagccaaactgtctcgggccgaacagcggatgaaccggcttgaccagtgctattgtgaacgaacctgcaccatgaaaggtacaacttatcgggaatttgaatcttggatcgacgggtgcaagaactgcacctgtcttaatggaaccattcagtgtgaaacactcatctgcccaaaccctgattgtcctctcaagagcgcgttggcatacgtggacggtaagtgttgcaaggaatgtaaatctatttgtcagttccagggccggacctacttcgaaggggagcgaaacacggtgtattcatcaagtggtgtttgtgtgctgtacgagtgcaaagatcagaccatgaagctggttgaaagcagtggctgtccggccttagactgtccagagagtcatcagatcacactttctcactcttgttgcaaggtgtgcaaaggttatgacttttgtagtgaaagacacaattgcatggagaatagcatctgccggaatctcaacgaccgggccgtgtgtagttgtagagatgggtttcgggcactgcgtgaagacaacgcttactgcgaggatattgatgaatgcgctgaaggaagacactactgccgtgaaaacactatgtgcgtcaacacgccaggcagctttatgtgtatttgcaagactggatacatcaggattgatgattactcctgcactgaacacgatgaatgcattactaatcagcataactgtgacgagaacgctctctgcttcaacactgtgggaggccacaactgtgtgtgtaaacctggatatacaggaaacggcacgacctgtaaagcgttctgtaaagacggatgccggaacgggggcgcatgcatcgctgccaatgtgtgtgcctgtcctcagggctttacagggcccagctgtgaaaccgatatcgacgaatgctccgacggatttgtacagtgtgacagtagagccaactgtattaatctgccaggctggtatcattgtgagtgccgcgatggctaccacgataatggcatgttttctcccagcggagagtcttgtgaggatatcgacgaatgcgggactgggcgtcatagttgcgctaatgataccatttgtttcaaccttgacggcggatatgattgccgatgccctcacggtaagaattgtaccggggattgcatccacgatggaaaggtcaagcataacggtcagatttgggttctggagaacgatagatgttcagtgtgttcatgccagaacggctttgtgatgtgccgccgcatggtctgcgactgtgaaaacccaaccgtagacctcttttgctgtcccgagtgtgatcccaggctgtcgagccaatgtctgcaccagaatggagaaactctgtacaacagcggagacacctgggttcagaactgccagcagtgtagatgcctccaaggtgaagtagactgttggccactcccctgccctgatgtagaatgcgagttctctattctgcctgagaatgaatgttgtccgcggtgcgtgaccgacccatgtcaagccgacacaatccgcaatgacattactaaaacttgcctcgacgagatgaacgttgtccggttcactggatcatcttggattaagcacgggacagaatgcacactgtgccaatgcaagaacggtcacatctgttgtagcgtagaccctcagtgccttcaggaattgtag

SEQ ID NO: 57044 - DNA, 2601 bp, Artificial Sequence
  derived and/or modified sequence
atggggttccctcctttactcaagggacaggcttctgcaacgcgatcttcactggccagttgcagttgggtggttttctttctgtcatgcctatcacggcacgccccagaaatagagggcggtcggagatggaccgagttgatacggaccatggaaagtagggtcctgctgcgtacattttgcctcatatttgggctaggcgctgtgtgggggttgggtgtcgaccccagtttgcagattgacgtcctgacggagctcgaactcggggagtccaccacaggcgttcgacaggttccaggattgcataatggaactaaggcctttctttttcaggataccccccggtcgataaaggcatcaactgcaaccgctgagcaatttttccagaagttaaggaacaagcacgagtttaccattctcgttaccttgaaacagacacaccttaactccggggtgattttgagtattcaccatctagaccaccgatatctagagctcgaatcaagcgggcatcgcaacgaagtaagactacactacagatccggctcccaccgccctcacaccgaagttttcccttacatcctcgccgacgataagtggcataaactctctctggctatttccgcctcccacttgatcttacatattgactgcaacaagatttacgaaagggtggtggagaaaccgtcgaccgacctgccactggggactactttctggctcggtcagagaaacaatgcccatggttattttaaagggatcatgcaggatgtgcagttgctcgttatgccccagggcttcattgcccagtgcccggatctcaaccggacttgccctacctgtaatgacttccacggccttgtgcagaagattatggagctgcaagacatcctcgcaaaaaccagcgccaagctgtcccgtgctgaacagaggatgaataggttggatcagtgctactgcgaacgaacatgtaccatgaagggcaccacgtatcgggagttcgaaagctggatcgacgggtgcaagaattgtacatgtctgaatggtacaatccagtgtgagaccctgatatgccctaaccccgactgccctctgaagtccgcgcttgcatatgtagatgggaaatgttgcaaggaatgcaaaagcatctgtcaatttcagggacggacttacttcgaaggcgagagaaacaccgtttactctagctccggggtgtgtgtgctctatgagtgcaaagatcagaccatgaaactcgtcgaaagcagcggctgcccagctttggattgccctgaaagccaccagattactctcagccactcatgttgtaaagtttgcaaaggctatgacttttgctctgagcggcataattgtatggagaacagcatttgccggaatcttaacgaccgtgcagtgtgcagctgcagggatgggttcagggcattgcgcgaagataacgcttactgcgaggatatcgatgagtgtgctgagggtcggcactattgcagagagaacactatgtgcgttaacaccccaggatcatttatgtgtatctgcaagacaggttatattcgcattgatgactacagctgcacggaacatgatgaatgcataaccaatcagcacaattgtgatgaaaacgccctctgcttcaataccgtcggtggtcacaactgtgtgtgtaaacctggatacacgggcaacggcacaacctgtaaggctttctgtaaggacggatgccgtaacggcggagcatgcattgctgccaacgtatgtgcctgcccacaggggttcaccggtcctagctgcgaaaccgatatcgatgagtgttcggacggatttgtgcaatgtgacagcagagcaaattgtattaacctgcccgggtggtatcactgcgagtgcagagacggataccacgataacggcatgttctcgccgagtggagagtcttgcgaagacatcgatgagtgcggaacaggtcgccactcttgcgcaaacgataccatttgttttaatctggatggaggctatgattgccgatgtccacacggaaaaaactgtaccggggattgcattcacgatgggaaggtcaaacataatggtcagatatgggttttggagaatgataggtgttcggtatgtagctgccagaatggatttgtgatgtgccgaagaatggtttgcgattgtgaaaacccgactgtggatttattctgctgtcccgagtgtgaccccaggctcagcagccagtgcctgcaccaaaatggcgagaccctctacaactccggggacacctgggttcagaactgtcagcaatgtaggtgcctgcagggggaggtggattgttggcccctcccatgtcccgatgtggagtgcgaatttagcatcctgcccgagaatgaatgttgcccccgctgcgtgactgacccttgtcaagcggacacaatccgcaatgatataaccaagacctgtttggacgagatgaacgtggtacgctttaccggctctagttggattaaacacggtacggagtgtacactttgtcagtgtaagaacgggcacatttgctgttccgttgaccctcagtgtctacaggagctttag

SEQ ID NO: 57045 - DNA, 69 bp, Artificial Sequence
  derived and/or modified sequence
atggaaagccgggtgctcttaagaacattttgtctcatctttggcctaggagcggtctggggcctctag

SEQ ID NO: 57046 - DNA, 2520 bp, Artificial Sequence
  derived and/or modified sequence
atgagcatccggcggctgctgatcctgatcctgaagattggaagacgctggacagagctgatccgcaccatggagagccgggtgctgctgcggaccttctgcctgatcttcggcctgggcgctgtgtggggcctgggcgtggaccccagcctgcagattgatgtgctgacagagctggagctgggggagagcaccaccggggtgcggcaggtgcccggcctgcacaacggcaccaaggccttcctgttccaggacacccccaggagcatcaaggccagcacagccacagctgagcagttcttccagaagctgaggaacaagcatgagttcaccatcctggtgaccctgaagcagacccacctgaacagcggggtcatcctgagcatccaccacctggaccaccgctacctggagctggagagcagcggccacagaaatgaggtgcggctgcactaccgcagcggcagccaccggccccacacagaggtgttcccctacatcctggctgatgacaagtggcacaagctgagcctggccatcagcgccagccacctgatcctgcacatcgactgcaacaagatctatgagcgggtggtggagaagcccagcacagacctgcccctgggcaccaccttctggctgggccagagaaataatgcccacggctacttcaagggcatcatgcaggatgtgcagctgctggtgatgccccagggcttcatcgcccagtgcccagacctgaacagaacctgccccacctgcaatgacttccacggcctggtgcagaagatcatggagctgcaggacatcctggccaagaccagcgccaagctgagcagagctgagcagaggatgaaccggctggaccagtgctactgtgagaggacctgcaccatgaagggcaccacctaccgggagtttgagagctggattgatggctgcaagaactgcacctgcctgaatggcaccatccagtgtgagaccctcatctgccccaacccagactgccccctgaagagcgccctggcctacgtggatggcaagtgctgcaaggagtgcaagagcatctgccagttccagggccgcacctactttgaaggagagaggaacacagtgtacagcagcagcggcgtgtgtgtgctgtatgagtgcaaggaccagaccatgaagctggtggagagcagcggctgcccagccctggactgcccagagagccaccagatcaccctgagccacagctgctgcaaggtgtgcaagggctatgacttctgcagcgagcggcacaactgcatggagaacagcatctgcaggaacctgaatgacagagctgtgtgcagctgcagagatggcttccgggccctgcgggaggacaatgcctactgtgaggacattgatgaatgtgccgagggccgccactactgccgggagaacaccatgtgtgtgaacaccccaggcagcttcatgtgcatctgcaagacaggctacatcagaattgatgactacagctgcacagaacatgatgagtgcatcaccaaccagcacaactgtgatgaaaatgccctgtgcttcaacacagtgggcggccacaactgtgtgtgcaagccaggctacacaggaaatggcaccacctgcaaggccttctgcaaggatggctgcagaaatggaggagcctgcatcgccgccaacgtgtgtgcctgcccccagggcttcaccggccccagctgtgaaacagacattgatgaatgttctgatggctttgtgcagtgtgacagccgggccaactgcatcaacctgcccggctggtaccactgtgaatgtagagatggctaccatgacaatggcatgttcagccccagcggggagagctgtgaggacattgatgaatgtggcaccggccgccacagctgtgccaatgacaccatctgcttcaacctggatggcggctatgactgccgctgcccccacggcaagaactgcaccggggactgcatccatgatggcaaggtgaagcacaacggccagatctgggtgctggagaatgaccgctgcagcgtgtgcagctgccagaatggatttgtgatgtgcaggaggatggtgtgtgactgtgagaaccccaccgtggacctcttctgctgcccagaatgtgacccccggctgagcagccagtgcctgcaccagaatggagagaccctgtacaacagcggggacacctgggtgcagaactgccagcagtgccgctgcctgcagggcgaggtggactgctggcccctgccctgcccagatgtggagtgtgagttcagcatcctgcctgaaaatgaatgctgcccccgctgtgtgacagacccctgccaggccgacaccatcagaaatgacatcaccaagacctgcctggatgagatgaatgtggtgcgcttcaccggcagctcctggatcaagcatggaacagagtgcaccctgtgccagtgcaagaatggccacatctgctgcagcgtggacccccagtgcctgcaggagctgtag

SEQ ID NO: 57047 - DNA, 2601 bp, Artificial Sequence
  derived and/or modified sequence
atgggcttcccccccctgctgaagggccaggccagcgccaccaggagcagcctggccagctgctcctgggtggtgttcttcctgagctgcctgagcagacatgcccctgagattgagggcggccgccgctggacagagctgatccgcaccatggagagccgggtgctgctgcggaccttctgcctgatcttcggcctgggcgctgtgtggggcctgggcgtggaccccagcctgcagattgatgtgctgacagagctggagctgggggagagcaccactggagtgcggcaggtgcccggcctgcacaacggcaccaaggccttcctgttccaggacacccccaggagcatcaaggccagcacagccacagctgagcagttcttccagaagctgaggaacaagcatgagttcaccatcctggtgaccctgaagcagacccacctgaacagcggggtcatcctgagcatccaccacctggaccaccgctacctggagctggagagcagcggccacagaaatgaggtgcggctgcactacagaagtggcagccaccggccccacacagaggtgttcccctacatcctggctgatgacaagtggcacaagctgagcctggccatcagcgccagccacctgatcctgcacatcgactgcaacaagatctatgaaagagtggtggagaagcccagcacagacctgcccctgggcaccaccttctggctgggccagaggaacaatgcccacggctacttcaagggcatcatgcaggatgtgcagctgctggtgatgccccagggcttcatcgcccagtgcccagacctgaacagaacctgccccacctgcaatgacttccacggcctggtgcagaagatcatggagctgcaggacatcctggccaagaccagcgccaagctgagcagagctgagcagaggatgaaccggctggaccagtgctactgtgagaggacctgcaccatgaagggcaccacctaccgggagtttgagagctggattgatggctgcaagaactgcacctgcctgaatggcaccatccagtgtgagaccctcatctgccccaacccagactgccccctgaagagcgccctggcctacgtggatggcaagtgctgcaaggagtgcaagagcatctgccagttccagggccgcacctactttgaaggagagaggaacacagtgtacagcagcagtggagtgtgtgtgctgtatgagtgcaaggaccagaccatgaagctggtggagagcagcggctgcccagccctggactgcccagagagccaccagatcaccctgagccacagctgctgcaaggtgtgcaagggctatgacttctgcagcgagcggcacaactgcatggagaacagcatctgcaggaacctgaatgacagagctgtgtgcagctgcagagatggcttccgggccctgagagaagataatgcctactgtgaagatattgatgaatgtgccgagggccgccactactgccgggagaacaccatgtgtgtgaacaccccaggcagcttcatgtgcatctgcaagacaggctacatcagaattgatgactacagctgcacagaacatgatgagtgcatcaccaaccagcacaactgtgatgaaaatgccctgtgcttcaacacagtgggcggccacaactgtgtgtgcaagccaggctacacaggaaatggcaccacctgcaaggccttctgcaaggatggctgcagaaatggaggagcctgcatcgccgccaacgtgtgtgcctgcccccagggcttcaccggccccagctgtgaaacagacattgatgagtgcagtgatggctttgtgcagtgtgacagccgggccaactgcatcaacctgcccggctggtaccactgtgagtgcagagatggctaccatgacaatggcatgttcagccccagcggggagagctgtgaagatattgatgaatgtggcaccggccgccacagctgtgccaatgacaccatctgcttcaacctggatggcggctatgactgccgctgcccccacggcaagaactgcacaggagactgcatccatgatggcaaggtgaagcacaacggccagatctgggtgctggagaatgaccgctgcagcgtgtgcagctgccagaatggatttgtgatgtgcaggaggatggtgtgtgactgtgagaaccccaccgtggacctcttctgctgcccagaatgtgacccccggctgagcagccagtgcctgcaccagaatggagagaccctgtacaacagcggggacacctgggtgcagaactgccagcagtgccgctgcctgcagggcgaggtggactgctggcccctgccctgcccagatgtggagtgtgagttcagcatcctgcctgaaaatgaatgctgcccccgctgtgtgacagacccctgccaggccgacaccatcagaaatgacatcaccaagacctgcctggatgagatgaatgtggtgcgcttcaccggcagctcctggatcaagcacggcacagaatgtaccctgtgccagtgcaagaatggccacatctgctgcagcgtggacccccagtgcctgcaggagctgtag

SEQ ID NO: 57048 - DNA, 69 bp, Artificial Sequence
  derived and/or modified sequence
atggagagccgggtgctgctgcggaccttctgcctgatcttcggcctgggcgctgtgtggggcctgtag

SEQ ID NO: 57049 - DNA, 2520 bp, Artificial Sequence
  derived and/or modified sequence
atgagcatccggcggctgctgatcctgatcctgaagatcggccggaggtggaccgagcttattagaactatggagtcgcgcgtgcttctgcggactttctgtcttatcttcggccttggcgcagtgtgggggctgggcgtggacccttctctccaaatcgatgtgcttaccgagctggaacttggggagagtacaacaggtgttcgtcaggttccaggcctccataatggcactaaggcttttctctttcaggataccccccggtcgattaaggctagtaccgctactgccgaacagttcttccaaaagttacggaacaagcatgaatttacgattctagtgaccttgaagcagactcatcttaatagcggcgtgattctcagcattcatcacctcgaccataggtacctagaactggaaagctctggccatagaaatgaagtgcggcttcactacagatcaggatctcatagaccccacacagaggtcttcccgtatatactcgctgacgacaagtggcacaagttgagcctcgcaattagtgccagtcatctaatactgcacattgactgcaataaaatctacgaaagagtggttgaaaagccatctacagacctcccactaggcacaaccttttggctgggacagaggaataacgcccatggatatttcaaaggaatcatgcaagacgtacaactgctcgttatgcctcaaggattcatagcccagtgcccagatctgaacagaacctgccctacctgtaatgatttccatggtttagtacagaaaattatggagctccaagacatcctagccaagacatctgcgaagctatcaagggctgaacaacgcatgaaccggcttgaccagtgctattgtgagagaacatgcacaatgaagggcacaacatatcgcgagtttgagagttggattgacggttgcaagaattgtacttgcctcaatggcactatccagtgcgaaacactcatttgtcctaatcctgactgccccctgaaaagcgctctggcctacgtagatggtaagtgctgcaaggaatgtaagtcaatctgccagttccaaggtcgcacctactttgaaggcgagcgcaatacagtgtattcgtcgtcaggcgtctgcgttctatacgagtgcaaggatcagacaatgaaactggttgagtcatctgggtgccctgccctggactgtcccgagtctcatcagatcacactatcccattcctgttgcaaggtttgtaagggctacgacttctgctccgaaagacacaactgcatggaaaattcaatctgtcggaatctgaacgatagagctgtgtgtagctgtagggatggtttccgggccctacgggaagacaacgcgtactgtgaggatattgatgagtgtgccgagggcagacattattgtcgggagaacaccatgtgcgtgaacaccccaggaagttttatgtgcatctgtaagactggctatataagaatagatgactatagttgtactgagcacgacgaatgcatcacaaaccagcataattgcgacgagaatgcgctgtgcttcaataccgtcggtggccataattgtgtgtgcaaacccggctatacaggaaacggaacaacgtgtaaagccttttgtaaggatggttgtcgcaatggcggggcgtgcattgccgcaaacgtctgtgcctgtccacagggctttacaggaccaagttgtgaaacggacatagacgaatgctccgatgggtttgtgcaatgtgactccagggctaactgtatcaacttaccaggttggtatcattgtgaatgtcgcgacggttaccatgacaacggcatgtttagtccctccggcgaaagctgcgaggacatcgatgagtgcggaactggtagacattcctgcgctaatgatacgatctgctttaacctggatggcggctatgattgcagatgtccccacggcaagaactgtacgggtgattgtatacacgatggaaaagtcaaacacaatggacagatttgggtacttgaaaacgatcggtgtagcgtgtgctcctgtcagaacggcttcgtaatgtgtcggcggatggtatgcgactgcgagaatcctactgtcgatcttttttgctgtcccgaatgcgacccacgtctgtcatctcagtgtttgcatcagaatggcgagaccctgtataactcaggcgacacctgggtccagaattgccagcagtgccggtgtctccagggggaagtggactgttggccccttccgtgtcccgacgttgagtgcgaatttagcattctgccagaaaacgaatgctgccctaggtgcgtgacagatccttgccaggctgataccatccggaatgacataacaaagacttgtttggacgagatgaatgtggtccgctttaccggctccagctggattaagcatggcacagaatgtaccttgtgccagtgcaagaatgggcacatctgctgctccgtggatccacaatgcctacaggagctctag

SEQ ID NO: 57050 - DNA, 2601 bp, Artificial Sequence
  derived and/or modified sequence
atgggcttcccccccctgctgaagggccaggccagcgccacccggtcttcactcgcctcgtgctcatgggtggttttcttcttaagctgcctgagtcgacatgcccctgaaatagagggggggcgccgatggaccgaactgatccgtaccatggaaagtagggtcttgttacgcaccttttgtctaatttttgggctcggtgctgtctggggtttaggcgtggacccaagtctgcaaatagacgtgctcaccgagctggagctcggagagtctacaactggggtgcggcaggttccaggactgcacaatggcacaaaggcatttctctttcaggacactccccgtagtataaaggccagcaccgctacagctgagcaattcttccagaaattgcggaacaagcacgagttcaccatcctggtgaccctgaaacaaacccacctgaactccggggttatattgagcatacatcatctcgaccaccggtatctcgaactggaatccagtgggcatagaaacgaggtgcggttacattaccggtcaggaagtcacaggccccatacagaagtttttccctacattctcgccgatgataaatggcacaagcttagcctggccatctctgctagccatctcattttgcatatcgattgcaataagatatacgagagggtggttgaaaagccctccacggacctgcctctgggcactaccttttggcttggtcagaggaacaatgctcacggctattttaagggaatcatgcaggacgtgcagcttttggttatgccccaggggttcatagctcaatgtcctgatctcaacaggacctgccctacatgtaatgattttcatggactggttcagaaaatcatggagcttcaagacatactggccaagaccagcgccaagctgagccgtgcggagcaacgaatgaataggctcgaccagtgctactgcgagcgaacgtgcactatgaagggcactacttatcgagagtttgagagctggatagacgggtgcaagaattgcacctgtttgaacggtacgattcagtgtgagacattgatctgccccaatcccgactgtcctctgaaatcagcccttgcttatgtcgacgggaaatgttgcaaggaatgcaagtctatatgccagttccaaggccgaacatactttgagggagagcgtaacaccgtctactcatcttctggcgtctgcgtgctttacgagtgtaaggatcaaaccatgaagctcgtcgagtcttcagggtgccctgcccttgattgcccagaatcgcatcagatcaccctctcccacagctgttgtaaagtctgtaagggttatgacttctgctctgaaaggcacaactgtatggaaaattcgatttgccgaaacttaaacgatcgcgccgtttgctcctgtcgagatggcttccgcgccttaagagaggataacgcatattgcgaggacatagatgaatgtgctgagggacgtcattactgccgcgagaacaccatgtgtgtcaataccccggggtcattcatgtgcatctgtaagactggctacattcgaatcgacgactacagctgtaccgagcatgacgagtgtattactaatcagcacaactgtgacgaaaacgcactctgtttcaatacagttggtggacacaactgcgtgtgtaaacctggttatactggcaacggtactacttgcaaagcgttttgtaaggacggctgccggaacggcggtgcgtgtatagccgccaatgtgtgcgcatgtccccaggggttcaccggcccaagctgtgagactgacattgacgaatgctccgatggatttgtacaatgcgattcaagggcaaattgtatcaatttgcccggctggtaccactgtgaatgtcgggatggataccatgataacggtatgttcagccctagtggcgaaagctgtgaggacatcgatgagtgcgggacgggaaggcatagctgcgctaatgacaccatctgtttcaacctggacggcggctacgattgtaggtgcccgcatggaaaaaactgcaccggtgattgtatccatgacggtaaggtgaagcacaatggacagatctgggtcttggaaaacgacagatgctccgtatgttcctgtcagaacggcttcgtcatgtgtaggagaatggtctgcgactgtgaaaaccctaccgtggacttgttttgttgtcctgagtgcgatccgagactctccagccagtgtcttcaccaaaatggagagaccctgtacaatagtggggacacttgggtccaaaattgtcagcagtgcagatgcttacagggcgaagtcgattgttggcctctcccatgccccgatgtagaatgcgaattttctattctccctgaaaacgagtgttgtccccggtgtgttaccgacccgtgccaggctgacaccatacgaaatgacataacaaaaacatgtttggacgagatgaacgtggtgcggtttacgggatccagttggatcaaacatggcacagagtgcacactatgtcaatgcaagaacggacacatctgctgcagcgtcgacccacagtgccttcaagaactctag

SEQ ID NO: 57051 - DNA, 69 bp, Artificial Sequence
  derived and/or modified sequence
atggagagccgggtgctgctgcggaccttctgcctgatcttcggcctgggtgctgtgtggggcttatag

SEQ ID NO: 57052 - DNA, 2943 bp, Artificial Sequence
  derived and/or modified sequence
agaaggatccatctaacatttactgaaataaggaagatgctttattcaatctaaaagtgaaaaaagaaccttttagacattattattataaaatgtctataagaagacttctcattttaatcctcaaaatagggagacgatggactgagctgatccgcaccatggagtctcgggtcttactgagaacattctgtttgatcttcggtctcggagcagtttgggggcttggtgtggacccttccctacagattgacgtcttaacagagttagaacttggggagtccacgaccggagtgcgtcaggtcccggggctgcataatgggacgaaagcctttctctttcaagatactcccagaagcataaaagcatccactgctacagctgaacagttttttcagaagctgagaaataaacatgaatttactattttggtgaccctaaaacagacccacttaaattcaggagttattctctcaattcaccacttggatcacaggtacctggaactggaaagtagtggccatcggaatgaagtcagactgcattaccgctcaggcagtcaccgccctcacacagaagtgtttccttacattttggctgatgacaagtggcacaagctctccttagccatcagtgcttcccatttgattttacacattgactgcaataaaatttatgaaagggtagtagaaaagccctccacagacttgcctctaggcacaacattttggctaggacagagaaataatgcgcatggatattttaagggtataatgcaagatgtccaattacttgtcatgccccagggatttattgctcagtgcccagatcttaatcgcacctgtccaacttgcaatgacttccatggacttgtgcagaaaatcatggagctacaggatattttagccaaaacatcagccaagctgtctcgagctgaacagcgaatgaatagattggatcagtgctattgtgaaaggacttgcaccatgaagggaaccacctaccgagaatttgagtcctggatagacggctgtaagaactgcacatgcctgaatggaaccatccagtgtgaaactctaatctgcccaaatcctgactgcccacttaagtcggctcttgcgtatgtggatggcaaatgctgtaaggaatgcaaatcgatatgccaatttcaaggacgaacctactttgaaggagaaagaaatacagtctattcctcttctggagtatgtgttctctatgagtgcaaggaccagaccatgaaacttgttgagagttcaggctgtccagctttggattgtccagagtctcatcagataaccttgtctcacagctgttgcaaagtttgtaaaggttatgacttttgttctgaaaggcataactgcatggagaattccatctgcagaaatctgaatgacagggctgtttgtagctgtcgagatggttttagggctcttcgagaggataatgcctactgtgaagacatcgatgagtgtgctgaagggcgccattactgtcgtgaaaatacaatgtgtgtcaacaccccgggttcttttatgtgcatctgcaaaactggatacatcagaattgatgattattcatgtacagaacatgatgagtgtatcacaaatcagcacaactgtgatgaaaatgctttatgcttcaacactgttggaggacacaactgtgtttgcaagccgggctatacagggaatggaacgacatgcaaagcattttgcaaagatggctgtaggaatggaggagcctgtattgccgctaatgtgtgtgcctgcccacaaggcttcactggacccagctgtgaaacggacattgatgaatgctctgatggttttgttcaatgtgacagtcgtgctaattgcattaacctgcctggatggtaccactgtgagtgcagagatggctaccatgacaatgggatgttttcaccaagtggagaatcgtgtgaagatattgatgagtgtgggaccgggaggcacagctgtgccaatgataccatttgcttcaatttggatggcggatatgattgtcgatgtcctcatggaaagaattgcacaggggactgcatccatgatggaaaagttaagcacaatggtcagatttgggtgttggaaaatgacaggtgctctgtgtgctcatgtcagaatggattcgttatgtgtcgacggatggtctgtgactgtgagaatcccacagttgatcttttttgctgccctgaatgtgacccaaggcttagtagtcagtgcctccatcaaaatggggaaactttgtataacagtggtgacacctgggtccagaattgtcaacagtgccgctgcttgcaaggggaagttgattgttggcccctgccttgcccagatgtggagtgtgaattcagcattctcccagagaatgagtgctgcccgcgctgtgtcacagacccttgccaggctgacaccatccgcaatgacatcaccaagacttgcctggacgaaatgaatgtggttcgcttcaccgggtcctcttggatcaaacatggcactgagtgtactctctgccagtgcaagaatggccacatctgttgctcagtggatccacagtgccttcaggaactgtgaagttaactgtctcatgggagatttctgttaaaagaatgttctttcattaaaagaccaaaaagaagttaaaacttaaattgggtgatttgtgggcagctaaatgcagctttgttaatagctgagtgaactttcaattatgaaatttgtggagcttgacaaaatcacaaaaggaaaattactggggcaaaattagacctcaagtctgcctctactgtgtctcacatcaccatgtagaagaatgggcgtacagtatataccgtgacatcctgaaccctggatagaaagcctgagcccattggatctgtgaaagcctctagcttcactggtgcag

SEQ ID NO: 57053 - DNA, 3612 bp, Artificial Sequence
  derived and/or modified sequence
ggcccgcccctccctccccggaggagcagtctctccgcgcgtctcccggagctttctccattgtctctgcctttacaacaggttcgggcggcggggaagacgggggggtgcggggccgccccagcccgggctttcttggggccgccccccttctaccgggtgtgcgagtctttggctgcttttattcggctcgggagctaattccccgacggagccgcgccggggcgagtccgacccctccctccgggccccctccgggccgcgctgccgcctcggccctgcgtgtgggaatgatgtgcgcattggagggtctaagttcttcacgcgcctggggaggcctcccttttctttcttaggcaaccaaagcgtattaatcctactgatcagtaaatccgaggcagcagcaggagagacaaacgttattttcccgcttgattccaagaacctcttcgatttttatttttatttttaaagagggagacgatggactgagctgatccgcaccatggagtctcgggtcttactgagaacattctgtttgatcttcggtctcggagcagtttgggggcttggtgtggacccttccctacagattgacgtcttaacagagttagaacttggggagtccacgaccggagtgcgtcaggtcccggggctgcataatgggacgaaagcctttctctttcaagatactcccagaagcataaaagcatccactgctacagctgaacagttttttcagaagctgagaaataaacatgaatttactattttggtgaccctaaaacagacccacttaaattcaggagttattctctcaattcaccacttggatcacaggtacctggaactggaaagtagtggccatcggaatgaagtcagactgcattaccgctcaggcagtcaccgccctcacacagaagtgtttccttacattttggctgatgacaagtggcacaagctctccttagccatcagtgcttcccatttgattttacacattgactgcaataaaatttatgaaagggtagtagaaaagccctccacagacttgcctctaggcacaacattttggctaggacagagaaataatgcgcatggatattttaagggtataatgcaagatgtccaattacttgtcatgccccagggatttattgctcagtgcccagatcttaatcgcacctgtccaacttgcaatgacttccatggacttgtgcagaaaatcatggagctacaggatattttagccaaaacatcagccaagctgtctcgagctgaacagcgaatgaatagattggatcagtgctattgtgaaaggacttgcaccatgaagggaaccacctaccgagaatttgagtcctggatagacggctgtaagaactgcacatgcctgaatggaaccatccagtgtgaaactctaatctgcccaaatcctgactgcccacttaagtcggctcttgcgtatgtggatggcaaatgctgtaaggaatgcaaatcgatatgccaatttcaaggacgaacctactttgaaggagaaagaaatacagtctattcctcttctggagtatgtgttctctatgagtgcaaggaccagaccatgaaacttgttgagagttcaggctgtccagctttggattgtccagagtctcatcagataaccttgtctcacagctgttgcaaagtttgtaaaggttatgacttttgttctgaaaggcataactgcatggagaattccatctgcagaaatctgaatgacagggctgtttgtagctgtcgagatggttttagggctcttcgagaggataatgcctactgtgaagacatcgatgagtgtgctgaagggcgccattactgtcgtgaaaatacaatgtgtgtcaacaccccgggttcttttatgtgcatctgcaaaactggatacatcagaattgatgattattcatgtacagaacatgatgagtgtatcacaaatcagcacaactgtgatgaaaatgctttatgcttcaacactgttggaggacacaactgtgtttgcaagccgggctatacagggaatggaacgacatgcaaagcattttgcaaagatggctgtaggaatggaggagcctgtattgccgctaatgtgtgtgcctgcccacaaggcttcactggacccagctgtgaaacggacattgatgaatgctctgatggttttgttcaatgtgacagtcgtgctaattgcattaacctgcctggatggtaccactgtgagtgcagagatggctaccatgacaatgggatgttttcaccaagtggagaatcgtgtgaagatattgatgagtgtgggaccgggaggcacagctgtgccaatgataccatttgcttcaatttggatggcggatatgattgtcgatgtcctcatggaaagaattgcacaggggactgcatccatgatggaaaagttaagcacaatggtcagatttgggtgttggaaaatgacaggtgctctgtgtgctcatgtcagaatggattcgttatgtgtcgacggatggtctgtgactgtgagaatcccacagttgatcttttttgctgccctgaatgtgacccaaggcttagtagtcagtgcctccatcaaaatggggaaactttgtataacagtggtgacacctgggtccagaattgtcaacagtgccgctgcttgcaaggggaagttgattgttggcccctgccttgcccagatgtggagtgtgaattcagcattctcccagagaatgagtgctgcccgcgctgtgtcacagacccttgccaggctgacaccatccgcaatgacatcaccaagacttgcctggacgaaatgaatgtggttcgcttcaccgggtcctcttggatcaaacatggcactgagtgtactctctgccagtgcaagaatggccacatctgttgctcagtggatccacagtgccttcaggaactgtgaagttaactgtctcatgggagatttctgttaaaagaatgttctttcattaaaagaccaaaaagaagttaaaacttaaattgggtgatttgtgggcagctaaatgcagctttgttaatagctgagtgaactttcaattatgaaatttgtggagcttgacaaaatcacaaaaggaaaattactggggcaaaattagacctcaagtctgcctctactgtgtctcacatcaccatgtagaagaatgggcgtacagtatataccgtgacatcctgaaccctggatagaaagcctgagcccattggatctgtgaaagcctctagcttcactggtgcagaaaattttcctctagatcagaatcttcaagaatcagttaggttcctcactgcaagaaataaaatgtcaggcagtgaatgaattatattttcagaagtaaagcaaagaagctataacatgttatgtacagtacactctgaaaagaaatctgaaacaagttattgtaatgataaaaataatgcacaggcatggttacttaatattttctaacaggaaaagtcatccctatttccttgttttactgcacttaatattatttggttgaatttgttcagtataagctcgttcttgtgcaaaattaaataaatatttctcttaccttataa

SEQ ID NO: 57054 - DNA, 3279 bp, Artificial Sequence
  derived and/or modified sequence
gctcagttccccttgccttctgctgtatgctggtcccagagagcccgagtccgggtctccacgctttatttggcagggggcgcgcgggttccggagctgtccagcacctcctggccaagttctctgcgctctccgcgcccgggaagctctccgcgccggggaagctctccagcgccccgcccccggcagggaacctctccaccaggacacccggggcttcccaggctcgccatccgtccccaccagtctctacctactttgcccagctccacctcggcagtgcagcgtgttttggtggccttcctccgcacgccctggagggggagtgccctgcaccccggggctgctccggagcccagtgcacgagtgcacatgggcttccctcctttgcttaaagggcaggcgagcgctactcgctccagccttgcctcctgcagctgggtggtcttttttctctcctgtctttcaagacacgcgcccgaaatcgagggagggagacgatggactgagctgatccgcaccatggagtctcgggtcttactgagaacattctgtttgatcttcggtctcggagcagtttgggggcttggtgtggacccttccctacagattgacgtcttaacagagttagaacttggggagtccacgaccggagtgcgtcaggtcccggggctgcataatgggacgaaagcctttctctttcaagatactcccagaagcataaaagcatccactgctacagctgaacagttttttcagaagctgagaaataaacatgaatttactattttggtgaccctaaaacagacccacttaaattcaggagttattctctcaattcaccacttggatcacaggtacctggaactggaaagtagtggccatcggaatgaagtcagactgcattaccgctcaggcagtcaccgccctcacacagaagtgtttccttacattttggctgatgacaagtggcacaagctctccttagccatcagtgcttcccatttgattttacacattgactgcaataaaatttatgaaagggtagtagaaaagccctccacagacttgcctctaggcacaacattttggctaggacagagaaataatgcgcatggatattttaagggtataatgcaagatgtccaattacttgtcatgccccagggatttattgctcagtgcccagatcttaatcgcacctgtccaacttgcaatgacttccatggacttgtgcagaaaatcatggagctacaggatattttagccaaaacatcagccaagctgtctcgagctgaacagcgaatgaatagattggatcagtgctattgtgaaaggacttgcaccatgaagggaaccacctaccgagaatttgagtcctggatagacggctgtaagaactgcacatgcctgaatggaaccatccagtgtgaaactctaatctgcccaaatcctgactgcccacttaagtcggctcttgcgtatgtggatggcaaatgctgtaaggaatgcaaatcgatatgccaatttcaaggacgaacctactttgaaggagaaagaaatacagtctattcctcttctggagtatgtgttctctatgagtgcaaggaccagaccatgaaacttgttgagagttcaggctgtccagctttggattgtccagagtctcatcagataaccttgtctcacagctgttgcaaagtttgtaaaggttatgacttttgttctgaaaggcataactgcatggagaattccatctgcagaaatctgaatgacagggctgtttgtagctgtcgagatggttttagggctcttcgagaggataatgcctactgtgaagacatcgatgagtgtgctgaagggcgccattactgtcgtgaaaatacaatgtgtgtcaacaccccgggttcttttatgtgcatctgcaaaactggatacatcagaattgatgattattcatgtacagaacatgatgagtgtatcacaaatcagcacaactgtgatgaaaatgctttatgcttcaacactgttggaggacacaactgtgtttgcaagccgggctatacagggaatggaacgacatgcaaagcattttgcaaagatggctgtaggaatggaggagcctgtattgccgctaatgtgtgtgcctgcccacaaggcttcactggacccagctgtgaaacggacattgatgaatgctctgatggttttgttcaatgtgacagtcgtgctaattgcattaacctgcctggatggtaccactgtgagtgcagagatggctaccatgacaatgggatgttttcaccaagtggagaatcgtgtgaagatattgatgagtgtgggaccgggaggcacagctgtgccaatgataccatttgcttcaatttggatggcggatatgattgtcgatgtcctcatggaaagaattgcacaggggactgcatccatgatggaaaagttaagcacaatggtcagatttgggtgttggaaaatgacaggtgctctgtgtgctcatgtcagaatggattcgttatgtgtcgacggatggtctgtgactgtgagaatcccacagttgatcttttttgctgccctgaatgtgacccaaggcttagtagtcagtgcctccatcaaaatggggaaactttgtataacagtggtgacacctgggtccagaattgtcaacagtgccgctgcttgcaaggggaagttgattgttggcccctgccttgcccagatgtggagtgtgaattcagcattctcccagagaatgagtgctgcccgcgctgtgtcacagacccttgccaggctgacaccatccgcaatgacatcaccaagacttgcctggacgaaatgaatgtggttcgcttcaccgggtcctcttggatcaaacatggcactgagtgtactctctgccagtgcaagaatggccacatctgttgctcagtggatccacagtgccttcaggaactgtgaagttaactgtctcatgggagatttctgttaaaagaatgttctttcattaaaagaccaaaaagaagttaaaacttaaattgggtgatttgtgggcagctaaatgcagctttgttaatagctgagtgaactttcaattatgaaatttgtggagcttgacaaaatcacaaaaggaaaattactggggcaaaattagacctcaagtctgcctctactgtgtctcacatcaccatgtagaagaatgggcgtacagtatataccgtgacatcctgaaccctggatagaaagcctgagcccattggatctgtg

SEQ ID NO: 57055 - DNA, 3196 bp, Artificial Sequence
  derived and/or modified sequence
ggaggagcagtctctccgcgcgtctcccggagctttctccattgtctctgcctttacaacagagggagacgatggactgagctgatccgcaccatggagtctcgggtcttactgagaacattctgtttgatcttcggtctcggagcagtttgggggcttggtgtggacccttccctacagattgacgtcttaacagagttagaacttggggagtccacgaccggagtgcgtcaggtcccggggctgcataatgggacgaaagcctttctctttcaagatactcccagaagcataaaagcatccactgctacagctgaacagttttttcagaagctgagaaataaacatgaatttactattttggtgaccctaaaacagacccacttaaattcaggagttattctctcaattcaccacttggatcacaggtacctggaactggaaagtagtggccatcggaatgaagtcagactgcattaccgctcaggcagtcaccgccctcacacagaagtgtttccttacattttggctgatgacaagtggcacaagctctccttagccatcagtgcttcccatttgattttacacattgactgcaataaaatttatgaaagggtagtagaaaagccctccacagacttgcctctaggcacaacattttggctaggacagagaaataatgcgcatggatattttaagggtataatgcaagatgtccaattacttgtcatgccccagggatttattgctcagtgcccagatcttaatcgcacctgtccaacttgcaatgacttccatggacttgtgcagaaaatcatggagctacaggatattttagccaaaacatcagccaagctgtctcgagctgaacagcgaatgaatagattggatcagtgctattgtgaaaggacttgcaccatgaagggaaccacctaccgagaatttgagtcctggatagacggctgtaagaactgcacatgcctgaatggaaccatccagtgtgaaactctaatctgcccaaatcctgactgcccacttaagtcggctcttgcgtatgtggatggcaaatgctgtaaggaatgcaaatcgatatgccaatttcaaggacgaacctactttgaaggagaaagaaatacagtctattcctcttctggagtatgtgttctctatgagtgcaaggaccagaccatgaaacttgttgagagttcaggctgtccagctttggattgtccagagtctcatcagataaccttgtctcacagctgttgcaaagtttgtaaaggttatgacttttgttctgaaaggcataactgcatggagaattccatctgcagaaatctgaatgacagggctgtttgtagctgtcgagatggttttagggctcttcgagaggataatgcctactgtgaagacatcgatgagtgtgctgaagggcgccattactgtcgtgaaaatacaatgtgtgtcaacaccccgggttcttttatgtgcatctgcaaaactggatacatcagaattgatgattattcatgtacagaacatgatgagtgtatcacaaatcagcacaactgtgatgaaaatgctttatgcttcaacactgttggaggacacaactgtgtttgcaagccgggctatacagggaatggaacgacatgcaaagcattttgcaaagatggctgtaggaatggaggagcctgtattgccgctaatgtgtgtgcctgcccacaaggcttcactggacccagctgtgaaacggacattgatgaatgctctgatggttttgttcaatgtgacagtcgtgctaattgcattaacctgcctggatggtaccactgtgagtgcagagatggctaccatgacaatgggatgttttcaccaagtggagaatcgtgtgaagatattgatgagtgtgggaccgggaggcacagctgtgccaatgataccatttgcttcaatttggatggcggatatgattgtcgatgtcctcatggaaagaattgcacaggggactgcatccatgatggaaaagttaagcacaatggtcagatttgggtgttggaaaatgacaggtgctctgtgtgctcatgtcagaatggattcgttatgtgtcgacggatggtctgtgactgtgagaatcccacagttgatcttttttgctgccctgaatgtgacccaaggcttagtagtcagtgcctccatcaaaatggggaaactttgtataacagtggtgacacctgggtccagaattgtcaacagtgccgctgcttgcaaggggaagttgattgttggcccctgccttgcccagatgtggagtgtgaattcagcattctcccagagaatgagtgctgcccgcgctgtgtcacagacccttgccaggctgacaccatccgcaatgacatcaccaagacttgcctggacgaaatgaatgtggttcgcttcaccgggtcctcttggatcaaacatggcactgagtgtactctctgccagtgcaagaatggccacatctgttgctcagtggatccacagtgccttcaggaactgtgaagttaactgtctcatgggagatttctgttaaaagaatgttctttcattaaaagaccaaaaagaagttaaaacttaaattgggtgatttgtgggcagctaaatgcagctttgttaatagctgagtgaactttcaattatgaaatttgtggagcttgacaaaatcacaaaaggaaaattactggggcaaaattagacctcaagtctgcctctactgtgtctcacatcaccatgtagaagaatgggcgtacagtatataccgtgacatcctgaaccctggatagaaagcctgagcccattggatctgtgaaagcctctagcttcactggtgcagaaaattttcctctagatcagaatcttcaagaatcagttaggttcctcactgcaagaaataaaatgtcaggcagtgaatgaattatattttcagaagtaaagcaaagaagctataacatgttatgtacagtacactctgaaaagaaatctgaaacaagttattgtaatgataaaaataatgcacaggcatggttacttaatattttctaacaggaaaagtcatccctatttccttgttttactgcacttaatattatttggttgaatttgttcagtataagctcgttcttgtgcaaaattaaataaatatttctcttacctt

SEQ ID NO: 57056 - DNA, 2520 bp, Artificial Sequence
  derived and/or modified sequence
atgtcaattagaaggctattaatcctgatcttgaaaatcgggcgacgatggaccgagttaattcgtaccatggaaagccgcgtgcttctgcgaactttctgcctgatctttggtctgggggcagtctgggggttaggggtggatccatccctacaaatcgacgtgctcactgaattagaactcggggagtcaaccacaggtgtgcgacaggtgccgggtctgcacaacgggaccaaagccttcctgttccaggacacacccagatcgatcaaggccagtaccgccacagccgagcaatttttccaaaagctcaggaataaacatgagttcacaatcttggtaacactgaagcaaactcatctcaactcaggggtaattctctcgattcaccatctcgatcaccgctacctagaattggagtctagcggacataggaatgaggtcaggctccactatcggagcggtagccatcgcccacacacagaggtatttccatacattttagctgacgacaaatggcacaagctaagcttagccataagcgcaagccacttaatcctgcacatcgattgtaacaaaatttatgagcgggtggtggaaaagccaagtacagatctacctctgggcacaacattctggttgggtcaaagaaacaacgcccacggatatttcaagggaatcatgcaggatgtccagctgctggtgatgccacaagggttcatcgctcagtgtcccgatctgaataggacctgccccacctgcaacgatttccatgggttagttcagaagatcatggaactgcaggatattttggcgaagactagtgccaagttgagccgggcagagcagcgcatgaatcggcttgaccagtgctattgcgaaaggacatgcacaatgaagggcacaacttatagagagtttgaatcttggatcgatggctgtaaaaattgtacatgcctaaacgggaccattcagtgcgagacactaatttgtccaaaccccgactgtccactgaaatctgctctcgcctatgtggacgggaagtgctgcaaagagtgcaaatctatctgtcagttccaggggagaacatattttgaaggagaacgtaatactgtctatagctcatcaggtgtctgcgttctgtacgaatgtaaggaccagacgatgaaattggtggagtcatccggctgtcccgcacttgactgtccagaatcacaccaaataacccttagccactcctgttgtaaagtttgcaagggctacgacttctgttccgaaaggcacaattgtatggaaaattcgatctgtcggaatctgaacgacagagccgtctgctcttgcagggatgggttccgggctttaagagaagataatgcctactgcgaggacatcgacgagtgcgcagagggaaggcactattgccgtgaaaataccatgtgcgttaataccccgggatcctttatgtgcatctgcaagactggctacattcgaatcgatgattactcctgcacggagcacgatgagtgtattactaatcaacacaactgtgacgaaaatgcgctttgttttaatactgtggggggtcataactgcgtatgcaagccgggatatacaggcaatggcaccacctgtaaggctttttgtaaggacggctgtcgtaacggtggcgcatgtatcgcagcaaacgtctgcgcctgtcctcaaggatttacaggcccaagttgcgaaactgatattgatgaatgttcagatgggttcgtgcagtgcgatagtagagctaactgtattaatctccctggatggtatcattgtgagtgcagagatggctatcacgataacggcatgttctccccaagcggcgagagttgtgaagatatagatgagtgcggaaccggccgacacagttgcgccaatgatactatctgtttcaacctggatggcggatatgactgcagatgcccccatggtaaaaattgcaccggggactgcatccatgatggcaaggtgaaacacaatggtcagatttgggttctggaaaatgacaggtgcagtgtgtgctcctgccaaaacgggttcgtgatgtgcaggaggatggtttgcgattgtgagaatccaaccgtagacttgttttgttgtcccgagtgcgacccgaggctgagctcacagtgtttgcatcagaatggtgagacgctatacaattcaggcgacacctgggtacagaattgccagcagtgtagatgtctgcagggagaggttgactgctggcccctcccctgccctgacgttgaatgcgaattcagtatattacccgaaaatgagtgctgtccgaggtgcgtgactgacccttgccaggcagataccattcgaaatgatattaccaagacttgtttggacgaaatgaatgtcgtgcgcttcacagggagtagctggattaagcacggcaccgaatgcacactctgtcagtgtaagaatggccacatctgctgctctgtggatcctcagtgcttgcaggagttatag

SEQ ID NO: 57057 - DNA, 2601 bp, Artificial Sequence
  derived and/or modified sequence
atggggtttcccccactactgaaggggcaggcctctgctactcggagcagcctggcctcatgcagctgggtagtcttttttctgagctgtctcagtagacatgccccagagattgagggaggccgtcggtggaccgagctgatccggactatggaatcccgcgtgctccttcggacattctgcctgatttttggtctgggtgcagtatggggtcttggagtcgatccgtccctgcaaattgacgtgcttacagagctggagttgggcgagagcaccacaggggtaaggcaagtgccagggttacacaatggaactaaggcattcttgtttcaggatactcccagatccataaaagcgtctaccgcaacagccgaacagtttttccaaaagcttcggaacaagcacgagttcacaattctggttacacttaagcagacgcatctgaattctggcgttattttatcaattcaccacctggaccaccgctatctcgagctcgaatcaagtggccatagaaatgaggttaggctgcattacaggtccggatctcaccggcctcacacagaggtgttcccttacattctggctgacgataaatggcacaagttgagcttggctatcagcgcatctcatttgattttgcacatcgattgcaataagatctacgagcgcgttgttgagaaaccatctaccgatctgccactagggacgactttttggctcggacagcggaataacgctcacgggtacttcaagggcattatgcaggacgtgcaattgttggtaatgccccaaggttttatcgcccagtgcccggacctcaacaggacttgcccaacctgtaacgatttccatgggctcgtccagaagatcatggagctgcaggatattttggccaaaactagcgctaaactgagccgcgctgaacagaggatgaaccgactagatcagtgctactgtgaaaggacatgtaccatgaaaggtacgacataccgggaatttgaatcttggatcgacggctgcaagaattgtacgtgcttgaacggcaccatccagtgtgagaccctgatttgtcctaaccccgactgtcccctgaaatccgctctggcttacgtggatggtaagtgttgcaaggagtgtaaaagtatctgccagttccaggggcgaacatactttgagggagagcggaacactgtctacagctcttccggagtttgcgtcctctatgagtgcaaagaccagacgatgaagcttgttgagtcttccggctgcccggctctcgactgtcctgaaagccatcaaatcaccctgtctcactcctgctgtaaggtctgtaagggttacgacttttgctctgagcggcacaactgtatggaaaatagtatctgtcgcaatctaaacgacagggccgtatgctcttgccgcgatggcttccgcgcacttagagaagacaacgcatactgcgaggacatcgacgaatgtgctgagggtcggcactattgtagagaaaacacgatgtgcgtgaacaccccaggctcttttatgtgcatctgtaagacaggctatattaggattgatgactatagctgcactgaacacgacgagtgtatcaccaatcagcacaattgcgacgaaaatgctctctgcttcaatacggtgggtgggcacaattgtgtttgcaaaccaggttacactggcaacggcactacttgtaaggccttttgtaaggacggctgtcgcaatggtggcgcttgtatagcagccaacgtctgtgcctgtccccagggctttaccggaccttcttgcgaaaccgatatcgatgaatgcagcgatgggttcgtacagtgcgactccagagccaattgtattaatctgcctgggtggtaccattgcgaatgccgcgacggataccacgataatggcatgttctctccgtctggagaaagctgcgaagacatagatgagtgcggcaccggcagacatagctgtgctaatgacacgatctgcttcaacctggacggcggatacgattgccgatgcccacacggaaagaattgcaccggggactgcatacatgatgggaaagtgaaacacaacggccagatctgggtattggaaaatgaccgctgtagtgtgtgctcttgtcagaatggcttcgtgatgtgtcgacgaatggtctgtgactgcgagaacccaactgtggacttattctgttgccccgagtgtgacccaagacttagttcgcagtgcttacatcaaaatggtgaaacgctgtacaacagcggagacacgtgggtgcaaaactgccagcaatgtaggtgtctccagggtgaagtcgattgctggccactcccctgtcccgacgtggaatgcgaattttcgatcctgcccgagaacgaatgctgtccccgatgcgtcaccgacccatgtcaagcagacactatcagaaatgacatcaccaaaacctgtctcgacgaaatgaacgtggtacggtttacggggtcttcttggatcaagcatggaaccgagtgcacgctctgtcagtgcaaaaatggccatatttgctgttccgttgaccctcaatgcctacaggaactctag

SEQ ID NO: 57058 - DNA, 69 bp, Artificial Sequence
  derived and/or modified sequence
atggaatctcgcgtactgctgcgcacgttctgcctgatcttcgggctcggagccgtgtggggtctctag

SEQ ID NO: 57059 - DNA, 2520 bp, Artificial Sequence
  derived and/or modified sequence
atgtcaatccgaaggctgctgattctgatcctgaagatcggccgaaggtggactgagctgattagaacgatggaatccagagtactgcttcggaccttctgtttaatctttgggttgggcgcggtatggggccttggcgtggatccaagtctgcaaatagacgttctgaccgaactggaactgggggaatctaccactggggtgaggcaggtgccaggtctacacaacgggacgaaagctttcctattccaagatactccgcgaagcataaaagcgtcgacagccaccgctgaacagttcttccagaaacttcgcaacaaacacgaattcaccattctggtcaccctgaaacagacacacctgaattccggagtgatcctgtccattcaccatctcgatcaccggtacttggaactggaaagtagcggccatcgcaatgaggtgcgcctccactacagatcaggatctcacagaccacataccgaagtctttccctatattctagcagatgataagtggcataaattatcactggccatttccgctagccatctgattttgcacattgactgtaacaagatttatgagcgcgtagtcgagaagccatcaacagacttgccgctgggaacaaccttttggctgggacagcgcaataacgcccatggctattttaagggtattatgcaggacgtccagttgctggttatgcctcagggttttatcgcgcagtgcccagatctcaatagaacctgtccaacctgcaacgactttcatggtctggtgcagaagatcatggaactgcaagacattctggcaaagacatccgccaagctgtcccgcgctgagcagaggatgaaccgcctggaccaatgctactgtgaacgcacctgcacaatgaagggtacgacatacagagagttcgagagctggattgacggctgtaaaaattgcacatgtctgaacggcacaatccagtgcgagacattgatttgccctaatccggattgtcccctgaagagcgccttggcctacgtggatgggaaatgttgtaaagaatgcaagagcatttgtcaattccagggccgcacctatttcgagggggaaagaaatacagtgtactcttcttccggagtttgtgtcctctacgaatgtaaagatcagacaatgaagctcgtcgagagtagcggttgccccgcccttgattgcccagaatcacatcagattaccctgtcgcattcttgttgtaaagtgtgcaaaggctatgacttctgctccgaaaggcacaactgcatggaaaatagtatatgtagaaaccttaacgatcgggccgtgtgctcatgtcgagatggctttcgagccctccgcgaagacaatgcatattgtgaagacatcgatgaatgtgcggagggacgccactattgcagggaaaacaccatgtgtgtaaataccccgggatcttttatgtgtatatgcaagaccggctacataagaattgatgattactcctgcacagaacatgatgaatgtatcaccaaccagcacaactgtgatgaaaacgccctatgctttaacacagttggcggccataattgcgtctgcaaacccggatataccggtaacgggaccacttgtaaagctttctgtaaagatggttgcagaaatgggggagcttgtatcgctgcgaatgtgtgtgcttgcccacagggttttaccggaccgtcttgtgaaaccgacattgatgagtgctccgacgggtttgtgcagtgtgactcacgcgctaactgcattaacctgcccggctggtaccactgtgagtgtcgggacggctaccacgataacggaatgtttagcccaagtggggagagttgcgaggatattgatgagtgcgggactggccgccattcatgcgccaacgataccatctgctttaatctggatgggggctacgattgcaggtgtccacacggcaagaactgcacaggagactgcattcacgacggtaaagtgaagcataatggccaaatttgggtcttggagaatgatcgatgctcagtttgttcctgccaaaatggattcgtcatgtgtagacgtatggtttgcgactgtgaaaaccccactgtggatctcttttgttgtcctgagtgcgatccgcgtctctccagtcagtgtcttcaccagaacggagagaccctctacaatagcggagacacctgggttcagaactgccagcagtgtaggtgcctacagggtgaagtggactgctggccattaccctgtccagacgtggagtgcgaattctctatcctcccggaaaatgagtgctgtcctcgctgcgttacagatccctgtcaggcggataccatccgcaacgatatcactaaaacatgtctggacgagatgaatgttgtcaggttcacaggaagttcctggatcaaacacggaacggagtgtacactgtgccaatgcaaaaatggacacatttgctgttcggttgatccgcagtgcttgcaggaattgtag

SEQ ID NO: 57060 - DNA, 2601 bp, Artificial Sequence
  derived and/or modified sequence
atggggttccctcctctgttaaagggacaggcctcagctacaagatcctctctagcctcttgcagttgggtggtcttttttctgtcttgcctgtcgagacacgcccccgaaattgagggggggcgccggtggactgaattgataaggactatggagtccagagtactgcttcgcactttttgtctgatcttcggactgggagccgtgtggggcttgggcgtggacccttctctccagattgacgttctcaccgaactggagctcggggagtccactacaggggtgagacaggtccctggcctgcacaacggaactaaggctttcctcttccaggacacacctcgatccattaaggccagcacagcaacagccgaacagttctttcagaagctacggaataaacatgaattcacgattttggtcacgttgaaacagacacacctgaatagcggtgtaattctcagcatccaccatctggaccacagatatttggaactggagagtagcggccaccgcaacgaggtacgattacactaccggagcggaagccacaggccacacacagaagtgtttccatatattcttgctgacgataagtggcacaagctgtctctcgcgatttctgctagccatctgattctccatatcgattgtaacaagatctatgagcgcgtggtcgagaagccatcaacagatctccctctgggaaccactttctggctcggtcaacgtaacaatgctcatggatactttaaaggcattatgcaggatgtgcaactgctggttatgccacagggtttcatcgcccaatgtccagacctcaaccggacctgcccaacttgcaacgacttccacgggctcgtccaaaaaataatggagctccaggatatcttagccaaaacaagcgccaagttgtcccgcgctgaacagcgtatgaatcggcttgatcaatgctactgtgaacgcacctgcactatgaaggggacgacttatcgcgaatttgaatcttggatagatggatgcaagaactgtacgtgcctgaacggaacaattcagtgcgagacactgatctgccctaacccagactgcccactgaaatccgccctggcttacgttgacggcaagtgctgcaaggaatgtaagtcaatctgtcagttccagggccggacatacttcgaaggagagagaaatactgtctattcttcttccggcgtgtgtgttctgtacgagtgcaaggatcaaacaatgaagctggtagaaagctccggatgtcccgctttggactgccccgagagccaccaaattaccctctcccattcctgttgtaaggtctgtaagggctatgacttctgtagtgagcgacacaactgtatggagaactcaatttgccgcaacctcaatgacagggcagtatgttcctgcagggatggttttcgcgccttaagggaagacaatgcttattgcgaggacatcgatgagtgcgctgaaggcagacactactgtagggagaacaccatgtgcgtgaataccccaggttcgttcatgtgcatttgtaagactgggtatattaggatcgatgattatagctgcacggaacatgatgaatgtatcacaaatcagcataattgtgacgagaacgccttatgctttaatacagtggggggacacaactgcgtctgtaagccgggatacaccggaaacggtaccacgtgtaaggctttctgtaaggatgggtgccgcaatggtggtgcttgcattgctgctaacgtttgcgcttgcccacaaggttttaccggaccttcatgcgaaacggatattgacgagtgctctgacgggtttgtgcaatgtgactctcgcgcaaattgcataaacttgccaggatggtaccattgtgagtgcagagacggataccatgataatgggatgttttccccctccggagaaagctgtgaagacatcgatgaatgtgggaccgggcgccattcatgtgcaaacgacactatttgcttcaacttagacgggggatatgattgccgatgccctcacgggaagaactgtactggtgattgcatccacgacgggaaggtcaagcataatgggcaaatttgggttctagaaaacgaccgatgttctgtttgttcatgccagaatggcttcgtcatgtgccgccggatggtatgcgattgtgagaaccctaccgttgatctgttctgttgtcccgagtgcgatcctaggctgtcctctcagtgtctccaccagaatggcgagacactatacaattccggtgacacatgggtccaaaactgccagcagtgtcggtgtctacagggagaagtagattgctggcctttgccatgcccagacgttgagtgcgaattttctatattgccagagaatgaatgttgtcccagatgtgtgaccgatccttgccaggctgacacgatacgcaatgacataacaaaaacatgcctagacgagatgaacgtagtccggttcactggatctagctggattaaacacggcacggaatgtaccctctgccagtgcaagaatggacatatatgttgcagcgtggatccacagtgtttgcaggagctttag

SEQ ID NO: 57061 - DNA, 69 bp, Artificial Sequence
  derived and/or modified sequence
atggaatcgcgtgtgcttctgcgaaccttttgtttaatctttggacttggcgccgtgtgggggttgtag

SEQ ID NO: 57062 - DNA, 2520 bp, Artificial Sequence
  derived and/or modified sequence
atgagtattcggcggctgctcattctgatcctgaaaattggacgacggtggaccgagcttatcaggacaatggaatctagagtgctactgcgaactttttgtctcatattcggtttaggtgcagtttggggtctaggcgtggatccctccttacagatagacgtcctcactgaactagagctgggagaaagtaccaccggcgtacgacaggtgccagggctgcacaacggcacaaaagccttcctgttccaggacaccccccgaagcatcaaggcctctacagctacggccgaacagtttttccagaagttaagaaataagcacgaattcactattttggtcacacttaagcaaacacacctcaactcgggagtcatcctttcaattcatcacctggaccataggtacctggagttagaatcctctggtcaccgcaacgaggtgcggctgcactatagaagcggcagtcaccgcccccacaccgaagtttttccatacatactggcagacgataaatggcataaactatccctcgctatctccgcatcccacctgattcttcatatagactgcaataagatctacgagcgcgtcgtggagaagccctctaccgatctcccactcggaactacattttggttaggacagagaaacaacgcccatggctattttaagggaattatgcaggatgtacaacttttagtcatgccccaagggttcattgctcaatgccccgatctcaaccgaacctgtccgacatgcaatgacttccatgggctcgtgcagaaaattatggaactgcaggatatactggccaaaacctccgcaaaactaagccgggctgaacagaggatgaatagattagatcagtgttattgcgaacgtacatgcactatgaaggggacaacctatcgagaattcgagagctggatagacggttgtaaaaactgcacttgtctcaatggaaccatccaatgtgaaaccttgatctgccctaaccctgattgccctctcaaaagcgcgttggcctatgtggatggaaaatgttgcaaagagtgcaagagcatctgccaatttcaaggaagaacttacttcgaaggtgaacggaatactgtctactcaagttctggtgtctgtgtattgtacgagtgtaaggatcagaccatgaagctcgtcgagagttctggctgcccggccctagattgtcctgaaagccaccagattacgctgtcccattcctgctgtaaagtctgtaaaggatatgacttctgctccgaacgccacaattgtatggaaaactcaatttgccggaacttaaatgaccgtgctgtatgttcctgcagggacggcttccgcgctctgagagaagacaatgcctattgtgaagatatcgacgaatgtgcggagggaagacattattgtcgggagaacactatgtgtgtaaatacccccggcagctttatgtgtatctgtaaaaccggctatataagaatcgatgactatagctgcactgagcacgacgagtgcatcacaaatcaacacaattgcgatgagaatgccttatgtttcaacaccgtcggaggtcacaattgcgtgtgtaaacctggatacacaggaaatggtactacttgcaaggcattttgtaaagatggttgccgcaacggaggggcttgtatagcagccaacgtatgcgcctgtccccaaggttttaccggtccatcatgtgagactgatatcgatgagtgttccgacggcttcgttcagtgcgatagccgcgcaaattgtatcaatcttccagggtggtaccactgtgagtgtcgggacggctaccacgataacggaatgtttagcccaagtggggagagttgcgaggatattgatgagtgcgggactggccgccattcatgcgccaacgataccatctgctttaatctggatgggggctacgattgcaggtgtccacacggcaagaactgcacaggagactgcattcacgacggtaaagtgaagcataatggccaaatttgggtcttggagaatgatcgatgctcagtttgttcctgccaaaatggattcgtcatgtgtagacgtatggtttgcgattgtgaaaatccaacggtggatctgttttgctgccccgaatgtgatcccagactgtcctctcaatgcttgcaccagaatggggagaccttgtataacagcggtgacacatgggtccagaattgccaacagtgcagatgccttcagggggaagtagattgttggcctttaccctgccccgatgtcgaatgcgaattctcgattctgccagagaatgaatgttgcccacgatgtgttacagatccgtgtcaggctgacacgatccgcaacgatatcactaaaacatgtttagatgagatgaatgttgtccggtttacgggaagtagttggattaagcatggtacggaatgtacactttgccagtgtaaaaacggacatatttgctgcagtgtcgatccacagtgtcttcaggagctgtag

SEQ ID NO: 57063 - DNA, 2601 bp, Artificial Sequence
  derived and/or modified sequence
atggggttccctccgcttttgaaaggccaggcatccgctaccaggtcaagtcttgcctcctgtagttgggtagtctttttcctgtcttgtcttagtagacatgcgcctgaaattgaaggtgggcggcgatggacagagctgattcggactatggagtctcgcgtattgctgaggaccttttgtctaattttcggactgggtgctgtgtgggggttgggagtggacccttcactgcagattgacgtgctcaccgagttagagttaggagagagcactacaggagtccgccaggtcccaggcctccacaatggcacaaaagcattcctatttcaggataccccacgcagcatcaaggcttctaccgccaccgctgagcagttctttcagaaattacgcaataaacacgaattcacaatcctcgtgaccctgaagcaaacacacctaaactccggcgttattctgtctatccaccatctcgaccaccgctatttagagttggagtcttccggacaccggaatgaggtgcgcttgcattatagaagcggctctcatagaccccatactgaggtatttccatatatccttgcagacgataagtggcacaagctttcacttgctatctcagcttcgcatcttattctgcatatcgactgtaacaagatatatgagcgggtcgtggaaaagccttcaacagatctcccactcggaactacattttggcttggacagcgtaataatgctcacggctattttaaagggattatgcaggatgttcagctcttagtaatgcctcaggggtttattgcacagtgtcccgatcttaaccgaacttgtcccacatgcaacgattttcacggactggtccagaagattatggagctgcaggatatcctggcgaaaaccagtgctaagctcagcagagcggaacagaggatgaatagattggatcaatgctattgtgaacggacttgcaccatgaagggtaccacatatcgcgaatttgaatcttggatcgatggatgtaaaaattgcacatgtttaaacgggactatccagtgcgagacactaatttgccctaatcctgactgccctctgaagtctgccctcgcttatgtggatgggaaatgttgcaaagaatgtaaatccatatgtcaattccagggtcgaacgtattttgagggagagaggaatactgtctactctagctctggagtatgcgtgctgtacgaatgtaaggaccagacaatgaaacttgtagaatcttcaggctgcccagcactggactgccctgaatcccaccagatcactctctcgcacagctgttgtaaagtgtgtaaaggctacgacttctgttccgaacgacataattgtatggagaactccatttgcaggaatcttaatgacagagccgtgtgtagttgtcgcgacggctttagagcacttcgagaggacaatgcatattgcgaagacatagacgagtgtgccgagggcaggcactactgtcgggaaaacaccatgtgcgtaaatacgcctggaagctttatgtgtatatgtaagaccggttacattagaatcgacgattattcctgcacggagcacgatgaatgtatcaccaatcaacataactgtgacgaaaacgcactctgtttcaatacggtgggaggccacaactgcgtctgcaagcctggatacactggtaacggaacgacatgcaaagccttttgtaaagacggatgtcggaacgggggcgcctgtattgccgccaatgtgtgcgcttgtccacagggcttcactggccctagctgtgaaactgatattgatgagtgtagcgatggtttcgtacagtgtgactcaagggccaattgcatcaatttaccgggttggtatcattgtgagtgtagagacggataccacgacaacggtatgtttagcccttccggggaaagttgcgaagacattgatgagtgtggcacaggcagacacagctgtgccaacgacactatctgtttcaacctggacggaggttacgactgtagatgtccccatggcaagaattgcacgggagattgcattcatgacggaaaggtaaaacataacggtcagatttgggtgttggaaaacgacagatgttccgtgtgtagctgccagaacggcttcgtgatgtgccggagaatggtgtgtgactgcgagaatcccaccgtagacctgttttgctgccctgaatgcgatcctagactgtccagtcaatgtcttcaccaaaacggcgagaccctctataactcgggcgacacctgggttcagaactgtcaacaatgtcgctgccttcagggggaagtagactgctggcccttaccctgtcccgacgtggagtgtgagtttagtatcctccctgaaaacgaatgttgtcctagatgtgtaaccgatccgtgccaggcagataccattcgtaatgatattaccaaaacttgcttggatgagatgaacgtggtgagatttactggatccagttggataaaacacggaacagaatgtacactgtgtcaatgtaaaaatggacatatctgctgttcagtcgacccccagtgtctccaagaactgtag

SEQ ID NO: 57064 - DNA, 2520 bp, Artificial Sequence
  derived and/or modified sequence
atgagcatcagaagactgctgatcctgatcctgaagatcggcagaagatggaccgagctgatcagaaccatggagagcagagtgctgctgagaaccttctgcctgatcttcggcctgggcgccgtgtggggcctgggcgtggaccccagcctgcagatcgacgtgctgaccgagctggagctgggcgagagcaccaccggcgtgagacaggtgcccggcctgcacaacggcaccaaggccttcctgttccaggacacccccagaagcatcaaggccagcaccgccaccgccgagcagttcttccagaagctgagaaacaagcacgagttcaccatcctggtgaccctgaagcagacccacctgaacagcggcgtgatcctgagcatccaccacctggaccacagatacctggagctggagagcagcggccacagaaacgaggtgagactgcactacagaagcggcagccacagaccccacaccgaggtgttcccctacatcctggccgacgacaagtggcacaagctgagcctggccatcagcgccagccacctgatcctgcacatcgactgcaacaagatctacgagagagtggtggagaagcccagcaccgacctgcccctgggcaccaccttctggctgggccagagaaacaacgcccacggctacttcaagggcatcatgcaggacgtgcagctgctggtgatgccccagggcttcatcgcccagtgccccgacctgaacagaacctgccccacctgcaacgacttccacggcctggtgcagaagatcatggagctgcaggacatcctggccaagaccagcgccaagctgagcagagccgagcagagaatgaacagactggaccagtgctactgcgagagaacctgcaccatgaagggcaccacctacagagagttcgagagctggatcgacggctgcaagaactgcacctgcctgaacggcaccatccagtgcgagaccctgatctgccccaaccccgactgccccctgaagagcgccctggcctacgtggacggcaagtgctgcaaggagtgcaagagcatctgccagttccagggcagaacctacttcgagggcgagagaaacaccgtgtacagcagcagcggcgtgtgcgtgctgtacgagtgcaaggaccagaccatgaagctggtggagagcagcggctgccccgccctggactgccccgagagccaccagatcaccctgagccacagctgctgcaaggtgtgcaagggctacgacttctgcagcgagagacacaactgcatggagaacagcatctgcagaaacctgaacgacagagccgtgtgcagctgcagagacggcttcagagccctgagagaggacaacgcctactgcgaggacatcgacgagtgcgccgagggcagacactactgcagagagaacaccatgtgcgtgaacacccccggcagcttcatgtgcatctgcaagaccggctacatcagaatcgacgactacagctgcaccgagcacgacgagtgcatcaccaaccagcacaactgcgacgagaacgccctgtgcttcaacaccgtgggcggccacaactgcgtgtgcaagcccggctacaccggcaacggcaccacctgcaaggccttctgcaaggacggctgcagaaacggcggcgcctgcatcgccgccaacgtgtgcgcctgcccccagggcttcaccggccccagctgcgagaccgacatcgacgagtgcagcgacggcttcgtgcagtgcgacagcagagccaactgcatcaacctgcccggctggtaccactgcgagtgcagagacggctaccacgacaacggcatgttcagccccagcggcgagagctgcgaggacatcgacgagtgcggcaccggcagacacagctgcgccaacgacaccatctgcttcaacctggacggcggctacgactgcagatgcccccacggcaagaactgcaccggcgactgcatccacgacggcaaggtgaagcacaacggccagatctgggtgctggagaacgacagatgcagcgtgtgcagctgccagaacggcttcgtgatgtgcagaagaatggtgtgcgactgcgagaaccccaccgtggacctgttctgctgccccgagtgcgaccccagactgagcagccagtgcctgcaccagaacggcgagaccctgtacaacagcggcgacacctgggtgcagaactgccagcagtgcagatgcctgcagggcgaggtggactgctggcccctgccctgccccgacgtggagtgcgagttcagcatcctgcccgagaacgagtgctgccccagatgcgtgaccgacccctgccaggccgacaccatcagaaacgacatcaccaagacctgcctggacgagatgaacgtggtgagattcaccggcagcagctggatcaagcacggcaccgagtgcaccctgtgccagtgcaagaacggccacatctgctgcagcgtggacccccagtgcctgcaggagctgtag

SEQ ID NO: 57065 - DNA, 2601 bp, Artificial Sequence
  derived and/or modified sequence
atgggcttcccccccctgctgaagggccaggccagcgccaccagaagcagcctggccagctgcagctgggtggtgttcttcctgagctgcctgagcagacacgcccccgagatcgagggcggcagaagatggaccgagctgatcagaaccatggagagcagagtgctgctgagaaccttctgcctgatcttcggcctgggcgccgtgtggggcctgggcgtggaccccagcctgcagatcgacgtgctgaccgagctggagctgggcgagagcaccaccggcgtgagacaggtgcccggcctgcacaacggcaccaaggccttcctgttccaggacacccccagaagcatcaaggccagcaccgccaccgccgagcagttcttccagaagctgagaaacaagcacgagttcaccatcctggtgaccctgaagcagacccacctgaacagcggcgtgatcctgagcatccaccacctggaccacagatacctggagctggagagcagcggccacagaaacgaggtgagactgcactacagaagcggcagccacagaccccacaccgaggtgttcccctacatcctggccgacgacaagtggcacaagctgagcctggccatcagcgccagccacctgatcctgcacatcgactgcaacaagatctacgagagagtggtggagaagcccagcaccgacctgcccctgggcaccaccttctggctgggccagagaaacaacgcccacggctacttcaagggcatcatgcaggacgtgcagctgctggtgatgccccagggcttcatcgcccagtgccccgacctgaacagaacctgccccacctgcaacgacttccacggcctggtgcagaagatcatggagctgcaggacatcctggccaagaccagcgccaagctgagcagagccgagcagagaatgaacagactggaccagtgctactgcgagagaacctgcaccatgaagggcaccacctacagagagttcgagagctggatcgacggctgcaagaactgcacctgcctgaacggcaccatccagtgcgagaccctgatctgccccaaccccgactgccccctgaagagcgccctggcctacgtggacggcaagtgctgcaaggagtgcaagagcatctgccagttccagggcagaacctacttcgagggcgagagaaacaccgtgtacagcagcagcggcgtgtgcgtgctgtacgagtgcaaggaccagaccatgaagctggtggagagcagcggctgccccgccctggactgccccgagagccaccagatcaccctgagccacagctgctgcaaggtgtgcaagggctacgacttctgcagcgagagacacaactgcatggagaacagcatctgcagaaacctgaacgacagagccgtgtgcagctgcagagacggcttcagagccctgagagaggacaacgcctactgcgaggacatcgacgagtgcgccgagggcagacactactgcagagagaacaccatgtgcgtgaacacccccggcagcttcatgtgcatctgcaagaccggctacatcagaatcgacgactacagctgcaccgagcacgacgagtgcatcaccaaccagcacaactgcgacgagaacgccctgtgcttcaacaccgtgggcggccacaactgcgtgtgcaagcccggctacaccggcaacggcaccacctgcaaggccttctgcaaggacggctgcagaaacggcggcgcctgcatcgccgccaacgtgtgcgcctgcccccagggcttcaccggccccagctgcgagaccgacatcgacgagtgcagcgacggcttcgtgcagtgcgacagcagagccaactgcatcaacctgcccggctggtaccactgcgagtgcagagacggctaccacgacaacggcatgttcagccccagcggcgagagctgcgaggacatcgacgagtgcggcaccggcagacacagctgcgccaacgacaccatctgcttcaacctggacggcggctacgactgcagatgcccccacggcaagaactgcaccggcgactgcatccacgacggcaaggtgaagcacaacggccagatctgggtgctggagaacgacagatgcagcgtgtgcagctgccagaacggcttcgtgatgtgcagaagaatggtgtgcgactgcgagaaccccaccgtggacctgttctgctgccccgagtgcgaccccagactgagcagccagtgcctgcaccagaacggcgagaccctgtacaacagcggcgacacctgggtgcagaactgccagcagtgcagatgcctgcagggcgaggtggactgctggcccctgccctgccccgacgtggagtgcgagttcagcatcctgcccgagaacgagtgctgccccagatgcgtgaccgacccctgccaggccgacaccatcagaaacgacatcaccaagacctgcctggacgagatgaacgtggtgagattcaccggcagcagctggatcaagcacggcaccgagtgcaccctgtgccagtgcaagaacggccacatctgctgcagcgtggacccccagtgcctgcaggagctgtag

SEQ ID NO: 57066 - DNA, 69 bp, Artificial Sequence
  derived and/or modified sequence
atggagagcagagtgctgctgagaaccttctgcctgatcttcggcctgggcgccgtgtggggcctgtag

SEQ ID NO: 57067 - RNA, 69 nt, Artificial Sequence
  derived and/or modified sequence
auggaaucgcgugugcuucugcgaaccuuuuguuuaaucuuuggacuuggcgccguguggggguuguag

SEQ ID NO: 57068 - protein, 22 aa, Artificial Sequence
  derived and/or modified sequence
MESRVLLRTFCLIFGLGAVWGL

SEQ ID NO: 57069 - DNA, 2451 bp, Artificial Sequence
  derived and/or modified sequence
atggaatcgcgcgtactacttcgcaccttctgtttgatcttcggattaggagctgtatggggcctgggcgtggatcctagcttacaaatcgatgtgttgaccgaacttgagttgggcgagtcaaccaccggtgttcggcaggtgcctggtttgcacaacggcacaaaagcattcctctttcaggatacgcctcggtccatcaaagcttctactgccaccgccgagcagtttttccaaaaactcagaaataagcacgaatttacaatcctagtcacactcaaacagacccaccttaattcaggcgtgatcttgagcatccatcacctggatcataggtacctggaacttgaatcttccgggcaccggaacgaggtcagactgcattacagaagcggctcccatcgcccacacaccgaagtgtttccctacatcttggctgatgataaatggcataaactgagcctcgccatttccgctagccatttaattctacacattgactgcaacaagatatacgaaagagtggtggagaagcctagtacagacctcccccttgggactacattctggctggggcaaaggaacaatgcacacggctacttcaagggcattatgcaggacgtgcagctacttgtgatgccccaggggttcatcgcgcagtgtccggacttaaatcgcacttgccctacctgtaacgacttccatggcctcgtgcaaaagatcatggagctgcaggacatcctggctaagacctcagccaagctttctagagcagaacaacggatgaataggctggaccagtgttactgcgaacgaacatgcacaatgaagggtacaacatatagagagtttgaatcttggatcgatgggtgtaagaattgtacatgcctcaacgggaccattcaatgcgagacactgatttgtccaaatccggattgtcccctcaagtccgccttggcctatgtggacggtaaatgttgcaaggaatgtaagtctatttgccaatttcagggaaggacctactttgagggcgagcggaacactgtatatagtagcagcggcgtgtgtgtgctctacgaatgcaaggaccaaactatgaagttagttgagtcctctggatgtcctgcattggactgccccgaatctcaccagatcaccctgtcgcactcatgttgcaaggtttgcaaggggtacgacttctgctccgaacgacataactgcatggagaacagcatctgtagaaacctgaatgaccgagccgtttgtagctgtagggatggattcagggctctgagggaggataacgcttactgtgaagatatcgatgaatgtgcagaaggacgtcactactgtcgcgagaacaccatgtgcgtcaatacccctggcagcttcatgtgcatctgcaaaacaggatacattaggattgacgattactcctgtacagaacacgacgagtgtatcactaaccaacacaattgcgacgaaaacgctctctgttttaacacagtggggggccacaactgtgtatgtaagccaggctacactggtaacggcacgacgtgcaaggccttttgtaaagacggatgtcggaacgggggcgcatgcattgcagccaatgtttgcgcttgtcctcagggctttaccggtccatcttgcgaaacagacatcgatgagtgctcagacggatttgtacagtgcgattccagggctaactgtattaacctgcctggctggtatcattgtgaatgccgtgatgggtaccacgataacgggatgttcagcccaagcggcgagagctgtgaggatatcgacgagtgcggtaccgggcgtcatagctgtgccaacgacacaatctgcttcaacctggacggcggatacgattgtcgttgcccacatggcaagaactgcacaggagactgcatccacgacggcaaggtgaagcacaacgggcagatatgggttttggagaatgaccgctgctccgtatgctcttgtcagaacggcttcgttatgtgtcgccggatggtttgcgactgtgaaaatccaactgtggatcttttttgttgtcccgagtgtgacccaaggttaagctcccaatgtctccatcagaatggagagacgttatacaactccggcgatacttgggtgcaaaactgtcagcagtgtagatgtctgcagggcgaagttgactgctggcctctcccatgtcctgatgtggaatgcgagttttcaatcctgcccgagaacgagtgttgccctaggtgtgtgaccgacccctgccaggctgataccattcgcaacgatataaccaagacatgtctcgacgagatgaatgtcgtgagatttaccggaagttcatggataaagcatgggactgagtgcaccttatgtcagtgtaagaacgggcacatctgctgctcagtggacccccaatgtctccaagagttatag

SEQ ID NO: 57070 - DNA, 2451 bp, Artificial Sequence
  derived and/or modified sequence
atggagtcaagggtactcttaaggacattctgcttaatattcggactgggggcggtctggggcctcggtgtcgatccaagcctgcagatcgatgttctcacagagctggagctgggcgagtctacaacaggcgtgagacaagtccctggtttacataatgggactaaagcatttctcttccaagatacgcctcggtccattaaggcatcaacagctacagctgaacagttctttcagaagttgcggaacaaacacgaatttactattttggtcactctgaagcagacccatctcaatagcggagtcattctgagcatacaccatctggaccataggtacttggagctcgaatcgtccggccacaggaatgaggttcggctgcattacaggtccgggagccataggcctcatacggaggtcttcccctacatcctggctgacgataagtggcacaagttaagtctggctatttcagcaagtcacctcattctccatattgattgtaataagatctatgagcgagtggttgaaaagccctctaccgacctgccattaggtacaacattctggctgggtcagagaaacaacgctcacggttattttaagggaataatgcaagacgtgcaactgctggtaatgcctcagggctttatcgcacagtgtcctgacttaaatcgtacttgccccacctgcaacgatttccacggactcgtgcaaaagattatggagctgcaggatatactggccaagacaagcgccaagctctcaagagcggaacagagaatgaatcgactggatcaatgttactgtgagagaacatgcactatgaagggcaccacctatcgtgaatttgagtcatggatcgacggctgcaaaaattgtacctgcctcaacggaactatacagtgcgagacattgatatgtcctaatcccgactgccctctgaaatcagctcttgcttatgtggatggtaagtgctgcaaagagtgcaagagtatttgtcagttccaggggcgaacctacttcgagggcgaaagaaacacagtgtactctagctctggcgtatgtgtgctgtatgaatgcaaagaccagaccatgaagctggttgaatccagtggctgccccgcccttgactgtccagaaagccaccagattactttgagccattcctgctgcaaggtctgcaagggctatgacttctgttcagagcgtcataactgcatggaaaattcaatctgtagaaacctgaacgatcgggctgtgtgcagctgcagggatggttttcgcgctctacgggaagacaacgcgtattgcgaagatatcgatgagtgtgccgaaggccgccactattgtagagagaatactatgtgcgtgaatacaccgggaagtttcatgtgcatatgcaaaactggatatatccgaatcgatgattactcttgtacagaacacgatgagtgcataaccaatcagcataattgcgacgagaacgccctctgtttcaacaccgtgggtgggcacaactgtgtgtgcaagcccgggtacacaggcaatgggacaacatgcaaagctttctgcaaggatggttgccggaacggaggagcttgcatagcagccaatgtctgtgcgtgccctcaggggtttactggaccatcctgtgagacagatatcgatgaatgctccgacggctttgtacaatgcgactctcgggcaaattgcattaatctcccaggatggtatcattgcgagtgcagagacggttatcatgacaacggcatgttttcaccttcaggagagtcatgtgaagacattgatgagtgcggcacagggcgccactcttgtgctaacgacactatctgcttcaatctggatggcggttatgattgccgctgcccacacggcaaaaattgtacgggagattgtatccatgatggaaaggtgaaacataacggtcagatttgggtcctcgagaacgatagatgttcagtctgctcttgccagaatggatttgtgatgtgtaggagaatggtatgtgattgcgagaatccgacagtcgacctgttctgctgtcctgagtgcgacccccggctgagctcacagtgtttacaccagaatggcgagactctgtataatagtggggacacgtgggtccagaattgtcaacaatgccgctgtctccaaggtgaggtggactgttggccccttccatgccctgacgtggagtgcgagtttagtatcctgcccgagaacgaatgttgcccccgttgtgtgacggatccctgtcaggccgatacaattaggaacgacataacaaaaacctgcctggacgagatgaatgtggtaagatttacagggagtagctggatcaagcatggaactgaatgtactctgtgtcagtgcaagaacgggcacatatgctgtagcgtcgaccctcaatgtttgcaagagctctag

SEQ ID NO: 57071 - DNA, 966 bp, Artificial Sequence
  derived and/or modified sequence
atggaaagccgcgtgctccttcgcaccttctgcctcatcttcgggcttggggcggtgtggggtctaggcgttgatccctcacttcagatcgacgtcttaacagagctggagctgggtgaaagcactaccggcgtccggcaagtgccgggcctgcataacgggacgaaagcttttttgttccaggatactccccggtctatcaaagcatctactgcaacggcagagcagttcttccagaaactcagaaacaaacatgagttcaccatacttgtgaccctgaagcagacacacctgaactccggcgtgatactatcaattcaccacttagaccaccgctacctggaactcgagagttctgggcatcgtaacgaggtccgactgcattatcggagcggtagccaccgaccgcatactgaagtctttccttacatcttagctgacgacaagtggcacaaactgagtctggccattagtgcatcccatctgatcctgcacattgattgtaataagatttacgagcgggttgtggagaaaccttctactgacctgccactgggcaccacattctggctgggacagagaaataatgcccacgggtactttaagggcattatgcaagatgttcagctgctcgtcatgccccaaggattcattgcccagtgtcccgacctgaatcggacctgtccgacgtgcaacgactttcacggcctcgttcaaaaaatcatggaattacaggacatcctggccaaaacgagcgccaagttgagcagggccgaacagcgcatgaatcggctggaccagtgctactgtgagaggacctgtacgatgaagggcactacctatagagagttcgaaagttggattgacggatgtaagaactgcacatgtctgaatggaacaatacagtgcgagacgctgatctgccctaatcccgattgcccattaaagtcagctctcgcttactag

SEQ ID NO: 57072 - DNA, 2451 bp, Artificial Sequence
  derived and/or modified sequence
atggagagccgggtgctgctgcggaccttctgcctgatcttcggcctgggcgctgtgtggggcctgggcgtggaccccagcctgcagattgatgtgctgacagagctggagctgggggagagcaccactggagtgcggcaggtgcccggcctgcacaacggcaccaaggccttcctgttccaggacacccccaggagcatcaaggccagcacagccacagctgagcagttcttccagaagctgaggaacaagcatgagttcaccatcctggtgaccctgaagcagacccacctgaacagcggggtcatcctgagcatccaccacctggaccaccgctacctggagctggagagcagcggccacagaaatgaggtgcggctgcactacagaagtggcagccaccggccccacacagaggtgttcccctacatcctggctgatgacaagtggcacaagctgagcctggccatcagcgccagccacctgatcctgcacatcgactgcaacaagatctatgaaagagtggtggagaagcccagcacagacctgcccctgggcaccaccttctggctgggccagaggaacaatgcccacggctacttcaagggcatcatgcaggatgtgcagctgctggtgatgccccagggcttcatcgcccagtgcccagacctgaacagaacctgccccacctgcaatgacttccacggcctggtgcagaagatcatggagctgcaggacatcctggccaagaccagcgccaagctgagcagagctgagcagaggatgaaccggctggaccagtgctactgtgagaggacctgcaccatgaagggcaccacctaccgggagtttgagagctggattgatggctgcaagaactgcacctgcctgaatggcaccatccagtgtgagaccctcatctgccccaacccagactgccccctgaagagcgccctggcctacgtggatggcaagtgctgcaaggagtgcaagagcatctgccagttccagggccgcacctactttgaaggagagaggaacacagtgtacagcagcagtggagtgtgtgtgctgtatgagtgcaaggaccagaccatgaagctggtggagagcagcggctgcccagccctggactgcccagagagccaccagatcaccctgagccacagctgctgcaaggtgtgcaagggctatgacttctgcagcgagcggcacaactgcatggagaacagcatctgcaggaacctgaatgacagagctgtgtgcagctgcagagatggcttccgggccctgagagaagataatgcctactgtgaagatattgatgaatgtgccgagggccgccactactgccgggagaacaccatgtgtgtgaacaccccaggcagcttcatgtgcatctgcaagacaggctacatcagaattgatgactacagctgcacagaacatgatgagtgcatcaccaaccagcacaactgtgatgaaaatgccctgtgcttcaacacagtgggcggccacaactgtgtgtgcaagccaggctacacaggaaatggcaccacctgcaaggccttctgcaaggatggctgcagaaatggaggagcctgcatcgccgccaacgtgtgtgcctgcccccagggcttcaccggccccagctgtgaaacagacattgatgagtgcagtgatggctttgtgcagtgtgacagccgggccaactgcatcaacctgcccggctggtaccactgtgagtgcagagatggctaccatgacaatggcatgttcagccccagcggggagagctgtgaagatattgatgaatgtggcaccggccgccacagctgtgccaatgacaccatctgcttcaacctggatggcggctatgactgccgctgcccccacggcaagaactgcacaggagactgcatccatgatggcaaggtgaagcacaacggccagatctgggtgctggagaatgaccgctgcagcgtgtgcagctgccagaatggatttgtgatgtgcaggaggatggtgtgtgactgtgagaaccccaccgtggacctcttctgctgcccagaatgtgacccccggctgagcagccagtgcctgcaccagaatggagagaccctgtacaacagcggggacacctgggtgcagaactgccagcagtgccgctgcctgcagggcgaggtggactgctggcccctgccctgcccagatgtggagtgtgagttcagcatcctgcctgaaaatgaatgctgcccccgctgtgtgacagacccctgccaggccgacaccatcagaaatgacatcaccaagacctgcctggatgagatgaatgtggtgcgcttcaccggcagctcctggatcaagcacggcacagaatgtaccctgtgccagtgcaagaatggccacatctgctgcagcgtggacccccagtgcctgcaggagctgtag

SEQ ID NO: 57073 - DNA, 966 bp, Artificial Sequence
  derived and/or modified sequence
atggagagccgggtgctgctgcggaccttctgcctgatcttcggcctgggcgctgtgtggggcctgggcgtggaccccagcctgcagattgatgtgctgacagagctggagctgggggagagcaccactggagtgcggcaggtgcccggcctgcacaacggcaccaaggccttcctgttccaggacacccccaggagcatcaaggccagcacagccacagctgagcagttcttccagaagctgaggaacaagcatgagttcaccatcctggtgaccctgaagcagacccacctgaacagcggggtcatcctgagcatccaccacctggaccaccgctacctggagctggagagcagcggccacagaaatgaggtgcggctgcactacagaagtggcagccaccggccccacacagaggtgttcccctacatcctggctgatgacaagtggcacaagctgagcctggccatcagcgccagccacctgatcctgcacatcgactgcaacaagatctatgaaagagtggtggagaagcccagcacagacctgcccctgggcaccaccttctggctgggccagaggaacaatgcccacggctacttcaagggcatcatgcaggatgtgcagctgctggtgatgccccagggcttcatcgcccagtgcccagacctgaacagaacctgccccacctgcaatgacttccacggcctggtgcagaagatcatggagctgcaggacatcctggccaagaccagcgccaagctgagcagagctgagcagaggatgaaccggctggaccagtgctactgtgagaggacctgcaccatgaagggcaccacctaccgggagtttgagagctggattgatggctgcaagaactgcacctgcctgaatggcaccatccagtgtgagaccctcatctgccccaacccagactgccccctgaagagcgccctggcctactag

SEQ ID NO: 57074 - DNA, 2451 bp, Artificial Sequence
  derived and/or modified sequence
atggagagccgggtgctgctgcggaccttctgcctgatcttcggcctcggcgcagtgtggggtttaggcgtcgaccctagcctccagatcgacgtccttactgagctcgagctaggagagtccactacaggagtccggcaggtccccggactccataacggcactaaggcctttttgtttcaggatactccgagatctatcaaagcttccacagccactgctgagcaattcttccaaaaattaagaaataagcacgaatttactatactcgtgacacttaaacagacccacttaaactcaggtgttatcttgtccatccaccacctcgatcaccgatatctggaactggagagcagcggccaccggaatgaagtaaggctgcattacagatccggaagccaccggccacatactgaggtcttcccgtacatcctcgccgacgataagtggcacaaactgagcctggcaatctcagccagtcaccttattctacacatcgactgcaacaaaatctacgaaagggtggtggagaaaccgagcaccgacctccctttaggcactacattttggctgggccagaggaacaacgcacatggatactttaaaggaattatgcaggatgtccagctactggtgatgccccaaggcttcatcgcccagtgcccggacttaaatcgtacctgcccaacctgtaacgactttcacggtttggtgcagaaaattatggaacttcaggacatcttggcgaagacttccgctaaactcagccgcgcagagcagcgtatgaatcgtttggaccagtgttactgcgaacgaacatgtactatgaagggcaccacctaccgggagtttgaaagctggatagacgggtgcaagaactgcacatgtctgaatggcaccatccagtgcgagactctaatttgtccaaatccagattgtccactgaaaagcgccttggcatacgttgacgggaagtgttgtaaagaatgcaagtcgatctgccagttccaggggagaacttacttcgaaggagagcgtaacacagtgtattcttcatccggtgtttgcgtcctctacgagtgtaaggaccaaacgatgaagttggtggagagctccggctgcccagctctcgattgtccagagtctcatcagatcacgctaagccattcctgctgcaaggtctgcaagggctacgacttttgttctgaacggcataactgcatggagaattccatctgtcgaaacctaaatgacagagccgtatgtagctgccgagatgggttccgtgcactgcgagaggataatgcgtattgtgaagatattgacgaatgtgccgaggggcgccattactgcagagagaacacaatgtgcgtgaatacccccggctcattcatgtgcatctgcaagacggggtatattcggatagacgactactcatgtaccgagcacgatgagtgcattaccaaccagcataattgtgatgagaatgcactctgtttcaacactgtcggcgggcacaattgcgtttgcaaacccggatacaccggcaacgggacaacatgtaaagcattctgcaaggatggctgccgcaatggcggagcctgtattgccgcaaacgtgtgcgcctgccctcaaggatttactggtcctagctgcgaaacagatatcgatgaatgtagtgatgggtttgtccagtgcgattcccgggcaaattgtattaatctacctggctggtatcactgcgagtgcagagatggatatcatgacaacggcatgttctctccttccggggagtcatgtgaggacatcgacgaatgcggcacggggcggcattcctgcgctaatgatacgatttgttttaatctggacgggggctacgactgtaggtgtccgcacggaaagaactgtacaggcgactgtatccatgacggtaaggtgaagcacaacggccagatctgggtgctggaaaacgatcgctgctcagtatgctcctgccagaacggcttcgttatgtgccgacgtatggtctgtgattgcgagaaccctactgtagacctcttctgctgtcccgaatgtgacccaagactttcctctcagtgtttgcatcagaacggtgaaacactctacaattcaggggatacttgggtgcagaattgccaacagtgcagatgcttacagggcgaggtggactgctggcctctgccatgcccggacgtggagtgtgaattctccattctgcccgagaatgagtgctgccccaggtgtgttacagacccttgccaggccgatacaattcgcaatgacattaccaaaacatgtttagacgaaatgaacgtggttcggtttacgggctcttcttggattaagcacggaaccgaatgtaccctctgtcaatgtaagaacgggcacatttgctgttccgtggacccacagtgtcttcaggagctctag

SEQ ID NO: 57075 - DNA, 2451 bp, Artificial Sequence
  derived and/or modified sequence
atggagagccgggtgctgctgcggaccttctgcctgatcttcggccttggtgcagtgtgggggctgggggttgatccttctcttcagatcgatgtgctgactgagctagagctcggtgagtctacaaccggggtcaggcaggtacccgggctgcacaatggcacaaaggcttttttgttccaagataccccacggtccattaaggcgagcacagccaccgcagagcaattctttcagaagctgaggaataaacacgaatttacgatactggtcaccctgaaacaaacccaccttaattctggtgtcattctatctattcatcacttagatcatagatatctcgagttggagtccagcggacatcggaatgaggtgcgcctccattatcggagcgggtctcaccgcccacataccgaagttttcccatacatactggctgatgataagtggcacaagctgtctctcgcgatttccgcgagccacctaatcttgcatattgattgtaacaagatctacgaacgggttgttgaaaaaccctcgaccgatttgccccttggaaccacattctggctcgggcaacgcaataacgctcacggctactttaagggtatcatgcaagacgtacagctgctggtcatgcctcaggggtttattgctcagtgtccagatctcaatcgcacatgtcccacctgcaacgatttccacggtttggtacagaagataatggaactgcaggacatcctggctaagacttctgctaaactaagtagagccgagcaacgcatgaacagattggaccagtgttattgcgaaaggacctgtacaatgaaaggtacaacatacagagagttcgagtcatggattgacgggtgtaagaactgtacctgtctgaatggaacgatacagtgtgaaacactcatctgtccaaatcccgactgtccccttaagtccgccctcgcgtatgttgacgggaagtgttgcaaggaatgcaaaagcatctgtcagtttcagggcagaacctatttcgagggcgagcggaacaccgtgtactccagttccggtgtgtgcgtgctctacgagtgcaaggaccaaaccatgaaactggtagagagctctggctgcccagccctcgactgtccagaatctcatcagatcaccctcagccacagctgttgtaaggtgtgcaagggctatgacttctgctctgaaagacataactgtatggagaattctatctgcaggaacctgaacgatcgggctgtgtgttcttgcagagacgggttccgcgcactgagggaggataacgcatattgtgaggacatagatgagtgcgccgaaggccggcattactgtagagaaaatacaatgtgtgtaaacactccaggcagctttatgtgcatttgcaaaacagggtatattaggatcgacgactattcctgcacagagcatgatgagtgtattaccaatcagcacaattgtgacgaaaatgctctttgtttcaacacagttggtggtcacaactgcgtgtgcaagcctgggtatacggggaatggaaccacgtgcaaggcattttgcaaagatggctgtaggaatggtggcgcttgtatcgctgccaacgtatgcgcctgcccccagggcttcacaggtccctcttgtgagacagacattgatgagtgcagcgatgggttcgttcagtgcgacagtagggccaattgtataaatctgcctgggtggtaccactgcgaatgtcgggacgggtatcatgacaatgggatgtttagcccatcaggggaatcctgcgaagacatcgatgagtgcgggacggggaggcactcttgtgctaatgacactatatgctttaacctggacggggggtacgattgtcggtgtccccacggaaagaattgcactggcgattgtatccacgatggcaaagttaaacacaacggtcagatatgggtattagagaacgatcgctgctctgtttgctcttgccaaaacggatttgtgatgtgcagaagaatggtgtgtgactgtgagaatccaacagtggacttattttgttgccctgaatgcgatcccaggctaagctcccagtgcctccatcagaatggggagactttatataacagcggagacacatgggtgcaaaattgccagcagtgccggtgtctccagggcgaggtggattgttggccactgccctgcccggatgtcgagtgcgaattttctattttacctgagaatgagtgctgccccagatgcgtgaccgacccttgtcaagcagataccatacgtaacgacattactaaaacttgtcttgatgagatgaatgtggtgagattcaccggaagcagttggattaaacatggcaccgaatgtacactctgccaatgtaaaaacggccacatatgttgtagcgtcgatccgcagtgtctccaggagctctag

SEQ ID NO: 57076 - DNA, 966 bp, Artificial Sequence
  derived and/or modified sequence
atggagagccgggtgctgctgcggaccttctgcctgatcttcggcctgggggctgtgtggggactcggcgtggatccctctctgcagatcgacgtactgacagaactcgaactcggcgagtccacaacgggggtgcggcaagtacccggcctacataatgggacaaaagcatttctatttcaggatacccctcgatctatcaaagccagcacagccacagcagagcagttttttcagaagctgaggaacaagcacgagtttaccatcctggtgaccctcaagcaaacacatctgaatagtggagtaatactgagcattcaccatctcgaccaccggtacttggagcttgagtccagtggccacaggaatgaggtccggctacattaccggtctggttctcatcgcccccatactgaggtgttcccatacatccttgcagatgacaagtggcacaagctgtctctggccatctcggcgagtcacctgattcttcacatcgattgtaataaaatctatgagagagtggtggaaaaaccaagtacagacctacctctggggaccacattttggctggggcagaggaacaacgcccacggttacttcaagggaattatgcaagatgtgcaacttttggtgatgccacaggggttcattgctcagtgtccagacctgaatcggacctgtcccacctgtaatgactttcacggactggtgcagaaaatcatggaactccaggatatcctagctaaaaccagtgcaaagctcagtcgggctgaacagcgtatgaacagactcgatcagtgctattgcgaacgcacatgtacaatgaagggcacaacatatcgcgagttcgaatcatggatcgatggatgcaagaattgcacctgcctgaatggcacaattcaatgtgagactctaatctgtccaaaccctgactgccccttgaagagcgctctggcatactag

SEQ ID NO: 57077 - DNA, 2451 bp, Artificial Sequence
  derived and/or modified sequence
atggagtcgcgcgtgcttttaagaacgttttgcctcatattcggtctgggcgctgtgtggggactcggagtagatccaagtctgcagatcgacgttctcacggaacttgagctgggcgagagcactactggcgtgcgccaagtacccggacttcacaacgggaccaaggctttcctctttcaggacactccacggagcatcaaggcctccaccgccaccgctgagcagttctttcaaaagctccggaataagcatgagtttacaatcctggttactttgaagcaaactcacctgaatagtggggtgatcctgtcaatccatcacctcgaccaccgttatctggagcttgagtcgagtggccaccgcaacgaggtgcgactgcactacagatcagggagccatagaccccacaccgaagtttttccatatatcctggcagatgataagtggcacaagctgagtcttgccatttcagcctcacacttgatccttcatatcgactgcaataagatctacgaaagggtggtggagaagccgtccaccgacctgcccctgggcaccacattctggctggggcagcgaaacaatgcacacgggtacttcaagggaattatgcaggacgtgcagttgctcgtgatgcctcaaggattcatcgcccagtgcccagatctgaatcggacatgcccaacctgtaacgactttcacgggctggttcagaagattatggaacttcaggacattctcgctaaaacctcagccaagctctcacgggcagagcagcgaatgaacaggctagatcagtgttattgtgagcgcacttgtacaatgaagggtactacatacagagaatttgagtcatggatcgacggctgcaaaaactgcacctgcctaaacggcacaatccagtgcgaaactctcatttgtccaaacccagattgccctctgaaatctgccctcgcttatgtggacggaaagtgttgcaaggagtgcaaaagcatttgtcagttccaggggcgaacatacttcgaaggcgagaggaatactgtgtactcaagcagcggcgtttgcgtgctgtacgagtgcaaggaccagaccatgaaactagtggagtcttctgggtgccctgcactcgactgtccagagtcacatcaaattacgctttcccacagttgctgtaaggtctgtaaggggtacgatttctgcagcgaacggcataattgtatggagaattcaatttgcaggaatctcaatgatcgtgccgtctgttcttgtcgggatggcttcagggcgctcagagaggacaatgcatactgcgaggatatagacgagtgtgctgagggtaggcactactgtcgcgagaatacaatgtgcgtgaatactcctggctctttcatgtgtatttgcaagactggatatattcggatcgacgactattcatgcaccgaacacgatgaatgcatcactaatcagcacaattgtgacgagaacgccttgtgttttaacactgttgggggtcataactgcgtgtgcaagcccggttacacaggcaacggaaccacatgtaaagctttttgcaaagacggctgtagaaacggaggtgcgtgcatcgctgctaacgtgtgtgcttgcccccagggattcacgggccctagttgcgagactgatattgacgaatgtagcgacggttttgttcaatgcgattctagagctaattgtatcaacctgcctggttggtatcactgcgagtgccgcgatggttaccatgacaatggaatgttcagcccttctggggagtcttgtgaggatattgacgaatgtggaaccgggagacactcctgtgccaacgacactatatgttttaatttggatgggggttacgattgcagatgcccccatgggaagaactgcacgggcgattgcattcacgatggaaaggtaaaacataacggacagatatgggtgcttgaaaacgacagatgctcggtgtgctcctgccagaatggattcgtaatgtgtcgcagaatggtgtgcgactgcgaaaatcctactgtcgacctgttttgttgtccagaatgtgatccacgccttagcagtcagtgtcttcatcaaaatggcgagaccctctacaactctggcgacacctgggtccagaattgtcagcagtgccgctgcctgcagggtgaagttgattgttggccactcccttgtccggacgttgaatgtgagttttcaatcctgcccgagaacgaatgctgcccacgctgcgtgacagacccgtgccaggccgacaccatccgcaatgacataaccaaaacctgtctggatgagatgaatgtagtgagattcaccggtagtagctggattaagcacgggaccgaatgtacactctgccagtgtaaaaacgggcatatttgctgctccgttgacccacagtgtctgcaggaactgtag

SEQ ID NO: 57078 - DNA, 2451 bp, Artificial Sequence
  derived and/or modified sequence
atggaatccagggtcttgttgaggactttttgcctcatctttggactgggggctgtgtgggggcttggcgtggatcctagcctacaaatcgatgtactgactgaactcgaactgggtgagagcacaaccggtgtgagacaggtgccaggacttcacaatggtacgaaggcctttctcttccaagatacaccacgatctattaaggcctccaccgccactgccgaacagtttttccagaagttacgcaataagcacgagtttactatccttgtgactctgaagcagacccatctgaactcaggtgtcatcttgagtatacaccatctggatcataggtacctcgagctggaaagttcaggacatcggaacgaggtaaggctgcactacaggtcaggctcacatcgccctcacacagaagtgtttccctacatcttagctgacgataagtggcacaagctgtctcttgctatatccgcttctcatctgatacttcacatcgattgtaataaaatttatgaaagggttgtggaaaaaccttcaacagatttacccctagggacaaccttttggctggggcagagaaataacgcacacggctattttaaggggattatgcaagacgtgcaattgctcgttatgccacaggggttcattgctcagtgccccgatttgaatcgcacatgccccacttgcaacgacttccacggccttgtccagaagattatggaactgcaggatattcttgccaagacatctgcaaaactcagtagagccgagcagcgcatgaaccgcttggatcagtgttattgtgaacgcacatgcacgatgaagggtaccacttaccgcgagtttgagagctggattgatggctgtaagaattgtacctgcctaaacggaacaatccagtgtgaaacgctgatctgtcctaatccagactgccctctgaagtccgccctggcctacgtggacggcaaatgttgcaaggagtgcaagtccatatgccagttccagggccgtacgtatttcgaaggagagcgcaatacagtctactcatccagcggcgtgtgcgttctgtatgaatgtaaagaccagaccatgaaactggttgagagttcaggttgtcccgctcttgattgtcctgagtctcaccaaattacgctgtcgcattcatgctgcaaggtctgtaaaggatacgacttttgttctgagcgtcacaattgtatggagaattccatctgccgcaatctcaatgatagggcggtttgttcgtgccgagatggatttcgtgcgttaagagaggacaatgcctactgtgaggatattgacgagtgcgcagagggacggcattattgccgggagaacacaatgtgtgtcaatactcccggatccttcatgtgtatatgcaagacgggatatattcgcattgacgactattcttgtactgaacatgatgaatgcatcacaaaccagcataactgtgatgagaatgccctatgtttcaacacagtcgggggacacaattgcgtgtgtaaacctgggtatactggcaacggtactacatgcaaggcgttctgcaaggacggatgtagaaatgggggagcatgcattgctgccaatgtgtgtgcttgcccccaagggttcactggccctagctgtgagacggacattgacgaatgttcggatggcttcgtgcaatgcgacagtagagccaactgtatcaacctgccaggctggtatcattgcgagtgtcgggacgggtaccatgacaacgggatgtttagcccctccggagaatcctgcgaagatattgatgagtgcggcaccggacggcactcttgtgcaaatgatacaatctgcttcaatcttgatggtgggtacgattgccgctgtccgcatgggaaaaattgcaccggcgactgtattcatgacggaaaagtgaaacataatggtcagatttgggtgctcgaaaatgatcggtgttccgtgtgttcctgtcagaatggctttgttatgtgtaggcggatggtgtgtgactgcgagaaccccacggttgacctgttctgttgccctgaatgcgatccaagattaagtagccagtgcctgcaccagaatggtgagaccttatataactcaggcgacacatgggtgcagaactgtcagcagtgtcggtgcctacagggagaagtcgattgctggcctctgccgtgccctgacgtggagtgtgaattctctatcttgcctgaaaatgagtgttgtccacgatgcgtcacagatccctgccaggccgacactatccgcaacgacattactaaaacctgcctggacgagatgaacgttgtcaggttcaccggaagcagctggattaaacacggcacggagtgcaccctttgccagtgcaaaaacgggcacatatgttgttcagtcgatccgcaatgcctccaggaattgtag

SEQ ID NO: 57079 - DNA, 966 bp, Artificial Sequence
  derived and/or modified sequence
atggaatcacgagttcttttacggacattttgtcttattttcgggcttggagcagtttggggactgggagtggatcccagcctgcagattgatgtgctaacagaactggaactcggcgaaagtactacaggtgtgcggcaggtgcccggactacataacggaaccaaggcctttctgtttcaagatactcctagatcgattaaagcctccacggccacggccgagcagttctttcagaaactaagaaataagcatgagttcacaatcttggttacactcaagcaaactcacctcaattctggcgtgattctctccatccatcacttagaccaccgctacctcgaacttgagagctctggacatcgcaacgaagtcaggctgcactaccgatccggatcccatagaccgcataccgaggtgttcccttatattttagctgacgacaaatggcacaagttatctttagctatttcagcatcccatttgatcctgcacatcgactgtaataagatctatgaacgagttgtcgaaaaaccgtctacagatttgcctctgggaacaactttctggctcggccagaggaataacgctcacgggtacttcaagggaatcatgcaggacgtgcagctgctagtgatgccccaaggttttattgcacagtgtccggacttgaatcgtacttgccccacatgcaacgacttccatggtctagtccagaagatcatggaactgcaggatatcttagccaaaacttcagctaagctgtcccgggcagagcagaggatgaataggcttgaccagtgctattgcgagcgcacatgtaccatgaaaggtacaacctatcgcgaatttgagtcctggatcgatggctgtaagaattgtacctgcctaaacggcacaatacagtgcgagactttaatctgccccaaccctgattgccccctcaaatccgccctcgcttactag

SEQ ID NO: 57080 - DNA, 2451 bp, Artificial Sequence
  derived and/or modified sequence
atggaatctagggtcctacttcgcaccttttgcttaattttcggcctgggagccgtgtggggactgggagtggatccatcactacaaatcgacgtgttgactgaacttgaactcggtgaatccaccactggcgttaggcaggtccctggactgcataacggtaccaaagccttcctttttcaggatacaccgcgctcaatcaaagcttcgaccgccacagcagagcagtttttccagaagctccggaataagcacgaattcactattttagtcacccttaagcagacccacctcaactcaggtgtcattctctctatccatcacctggatcaccggtatctggaactcgagtcatccgggcaccggaacgaggtgcgcctacactaccgatccgggagccaccgccctcacacagaggtctttccttatattctggccgatgataagtggcataaactcagtctggccatctcagcctctcatttgatcctgcacattgactgcaacaaaatttacgaacgcgtagtggagaaacctagcacggatctgcctcttggaactacattctggttgggacagcgcaacaatgcacacgggtatttcaagggcattatgcaggacgtgcagctcctggtcatgcctcaggggtttatagcccagtgccctgatctgaatcgaacatgtcctacctgcaatgacttccatgggcttgtgcagaaaatcatggaacttcaggacatcctggccaaaactagcgccaaattatctcgggctgagcagaggatgaaccggttggatcagtgctactgcgagcgcacctgtactatgaaaggaacaacatatagagagttcgagagttggatcgatggatgcaagaactgcacctgcttgaacggtaccattcaatgcgagacacttatttgtcctaatccagactgtccccttaagtcagcattagcatacgtggacggcaagtgttgtaaggaatgtaaatcaatctgccagttccagggacgaacctactttgagggagaaagaaatacagtgtatagcagctcaggtgtttgcgtgctctacgagtgcaaggaccagacaatgaaactggtagaaagttcagggtgtccagctcttgattgcccggaatcccatcaaataaccctgtctcattcttgctgcaaggtgtgtaagggctacgacttttgttctgaacgccacaattgtatggaaaacagtatatgccgcaacttgaatgatcgcgcggtctgctcctgtcgcgacggctttcgtgccctgcgtgaggacaatgcatactgtgaggacatcgatgaatgcgcagaagggagacattactgcagggagaacactatgtgcgtcaatacacccgggagttttatgtgcatatgtaagaccggatacattcgcatcgacgattactcctgcaccgaacatgatgagtgtataacaaaccagcacaattgcgacgaaaatgccctgtgcttcaacactgtgggtggtcacaattgcgtgtgtaagcccggttacactggaaacggcacaacgtgcaaggccttttgcaaggacggatgcaggaacggtggggcatgtatcgcagccaatgtgtgcgcctgtccccagggtttcaccggtccatcatgtgagaccgacatcgatgaatgctccgatggattcgtgcaatgcgacagtcgggctaactgcataaacctgcccggctggtatcactgtgagtgtcgcgatggctaccatgacaacgggatgttcagcccatctggggaatcctgtgaagacattgatgagtgcgggactggaagacattcgtgtgccaacgacaccatctgcttcaacttggatgggggctacgattgtaggtgccctcatggaaagaactgcactggagattgtatccatgatggtaaggtcaagcacaatggacagatctgggtgctggaaaacgatagatgctcagtttgctcttgccagaacggcttcgtgatgtgcagaagaatggtgtgcgattgcgagaaccccactgtcgatctgttctgctgtcccgagtgtgaccctcgactaagcagtcagtgtttgcaccagaatggagagactctgtacaatagcggcgacacgtgggtccaaaactgtcaacagtgtcgctgtctgcagggtgaggttgattgttggccacttccctgccccgatgtggaatgtgagttttcaatcctgcccgagaatgagtgttgtcctcgctgcgtgaccgacccatgccaggccgacactatcaggaacgatattaccaaaacatgtctcgatgaaatgaatgtcgtgcggtttactggctccagttggataaaacacggtaccgaatgcacattgtgccaatgcaaaaacggtcacatatgctgctcagtcgaccctcagtgtttgcaggaattatag

SEQ ID NO: 57081 - DNA, 2451 bp, Artificial Sequence
  derived and/or modified sequence
atggaatctcgcgtcctgctaagaacattctgtttgatcttcggacttggtgcagtgtggggattgggtgtagacccctctctgcaaattgatgtcctcacagagctggagctgggggagagtacaaccggtgtcaggcaagtgccaggattgcacaacggtacgaaagcttttctttttcaggatacacccagaagcataaaggcctcgactgcgacagccgagcagttcttccaaaagctgaggaacaagcatgagttcacaattctggtgaccctcaagcagacgcacctgaacagtggcgtgatcctttcaatccatcacctcgaccaccgttacctcgagctggaaagttccgggcacagaaatgaggtgcgcctgcactatagaagcggcagtcatagaccacacaccgaagtcttcccgtatatcctggccgacgataaatggcataagttgtcactggcaatcagtgcttctcatctgattcttcacatcgactgcaataagatctacgaaagagtagtcgaaaaaccttctaccgatcttcctctcgggactactttctggttagggcagcgaaacaatgcacacggatattttaaaggcattatgcaggacgtgcagctcttggtcatgccacagggctttatcgcacaatgtcccgacctgaaccgtacgtgcccaacatgtaatgatttccacgggctcgtccagaaaataatggaactgcaggatatcttggccaagacctccgcaaaacttagccgtgctgagcagcgcatgaatagactggatcaatgctattgtgaacgcacttgcaccatgaagggaacaacctatcgcgagttcgaaagctggattgacgggtgtaaaaattgcacatgcttgaacgggacaattcagtgtgagaccctcatttgcccgaatccggactgtcctcttaagagcgcccttgcttacgtagatggaaaatgctgcaaagagtgcaagagtatatgtcagtttcaggggcgcacatattttgagggggagcgtaacactgtgtactcctcgtcaggcgtctgtgtcttgtacgaatgtaaggatcagacaatgaagctagtcgagtcgtctggatgtcccgcattagattgtcccgagtcacaccaaatcaccctctcacatagctgctgtaaggtgtgcaagggatatgatttctgtagtgaaaggcataattgcatggaaaactcaatctgtcgtaatctcaacgaccgcgccgtttgttcatgtcgtgatggattcagagccttgcgtgaagacaatgcgtactgcgaagatatcgacgagtgcgctgaaggcaggcactactgcagagagaatactatgtgcgtcaatacgcctgggagcttcatgtgcatttgtaagaccggctatatccgaattgacgattactcatgcaccgagcatgacgaatgcataacaaatcaacataattgtgatgaaaatgctctttgtttcaacactgttggaggtcacaactgtgtgtgtaaacccggatatactggaaatggtactacatgcaaagcattctgtaaagatggctgtcgtaatggcggggcctgtatcgccgccaatgtatgcgcctgcccacagggtttcacaggtccatcttgcgaaacggacatcgacgagtgttctgatggcttcgttcagtgcgactcgcgcgcaaactgtatcaacctcccaggctggtatcactgtgagtgccgagatggctatcatgataacggtatgttttcaccatccggagagtcttgtgaggatattgatgagtgtggcacaggcagacattcatgcgctaatgatacaatctgttttaatctcgatggcggatacgattgcaggtgcccgcatggaaagaattgcactggggattgcattcatgatgggaaggtcaagcacaatggtcagatatgggtgctagagaatgatcgctgctctgtgtgtagctgccagaatggattcgtaatgtgccgcaggatggtgtgcgattgtgaaaatccgaccgtggatctcttttgttgccccgagtgtgacccgcgcctgtccagccagtgcctgcaccaaaacggcgagactttgtataactctggagacacttgggtgcagaactgccagcaatgcagatgtcttcaaggtgaagtcgactgttggccgctgccttgcccagatgtagaatgcgaattctcaatcctgcctgaaaatgaatgttgcccccgctgcgtgacagacccttgccaagccgacactatcagaaatgacatcacaaagacatgtctggacgagatgaacgtggttcgctttacaggcagctcttggattaagcacgggacagagtgtactttgtgtcagtgcaagaatggccacatttgctgcagtgtcgatccacagtgtctccaggaattgtag

SEQ ID NO: 57082 - DNA, 966 bp, Artificial Sequence
  derived and/or modified sequence
atggaatctcgcgtgctactcaggaccttctgcctgatcttcgggctcggagccgtgtgggggctgggagtggaccccagcttacagatcgacgtcctcactgagttggagctcggagagtccacaactggggttagacaagtccccggcttacataacgggacaaaggcatttctctttcaagatacacccagaagtataaaggcatccacagccacagcagagcagttcttccaaaaactaagaaacaagcacgaatttactatactcgtcaccctgaagcaaactcacttaaacagcggagtcattctttccattcaccacttggaccacaggtacctggaactcgaatctagcggtcaccgcaatgaggtcaggctgcactatcgatccgggtcccatcggccacataccgaagtcttcccatacattcttgccgatgataagtggcacaaactcagtctcgccatctctgcctcccacctgattctgcacatcgattgcaacaaaatttacgagagagtggttgaaaagccgtccactgacctgcctctgggcacgactttttggttgggtcaaaggaacaacgctcatggttactttaaaggaatcatgcaggatgttcagctgctggtgatgccacaaggtttcatcgcccagtgtcccgaccttaatcggacttgtcctacatgtaatgattttcatggtctggttcaaaaaattatggagttgcaagatatcctcgctaaaacctccgccaaactctctagagctgagcaacgaatgaatcgactggatcaatgctactgtgaacggacgtgcaccatgaaaggaacaacttatcgggagtttgagtcgtggatcgatggctgtaagaattgtacctgcctgaacggaacaatacagtgtgaaactctgatctgccctaaccctgattgccctctgaagtctgcgttggcctattag

SEQ ID NO: 57083 - DNA, 2451 bp, Artificial Sequence
  derived and/or modified sequence
atggaatctagggtcctacttcgcaccttttgcttaattttcggcctgggagccgtgtggggactgggagtggatccatcactacaaatcgacgtgttgactgaacttgaactcggtgaatccaccactggcgttaggcaggtccctggactgcataacggtaccaaagccttcctttttcaggatacaccgcgctcaatcaaagcttcgaccgccacagcagagcagtttttccagaagctccggaataagcacgaattcactattttagtcacccttaagcagacccacctcaactcaggggttatactgtcaattcatcacttggatcacagatatctggaactcgagtcaagcggacaccggaacgaggtcaggctgcactatcgaagcggaagccaccgtccccatacagaagtcttcccttatatactggcagatgacaaatggcataaacttagtcttgcaatttcagcttcccacctcatccttcatatcgactgcaataagatctacgagagagtcgtggagaaaccctcgacggacttgcccctcggcacaaccttctggctgggacagcgcaacaacgcacacggatacttcaaggggatcatgcaggatgtccagctgctggtcatgcctcagggcttcattgcgcagtgcccggatctcaatcgtacttgtcccacctgcaacgactttcatggactggtccagaagatcatggagctgcaagacatactcgccaaaacgtcagccaaactgtccagagccgaacagagaatgaatagactagaccaatgttactgtgagcgaacctgcacaatgaaaggtacaacgtatcgagaattcgaatcttggatagatggatgcaaaaactgcacatgcctgaacggaaccattcaatgtgaaactttgatctgcccaaaccctgattgccctctaaagtccgcccttgcatacgttgacgggaagtgctgtaaggaatgcaaaagtatttgccaatttcaaggccgaacatacttcgagggcgagcgaaacactgtatactcatcaagcggggtgtgtgtcctatacgaatgtaaggatcagacgatgaaactcgtggaaagctctgggtgcccggcacttgattgtccagaaagtcaccaaatcacactgtcccattcttgttgcaaagtttgtaagggatatgacttttgttcagaacgccataattgcatggagaattcgatatgtaggaatcttaatgatcgagcggtttgttcatgtcgggacgggtttagagcccttagagaggataacgcgtactgtgaggatattgatgagtgcgctgaaggccggcactattgcagagaaaacacaatgtgcgtcaacacccccggaagcttcatgtgcatttgcaaaacagggtatattaggatcgatgactacagttgtactgagcacgacgaatgcatcacaaaccagcacaactgtgacgaaaatgccctatgctttaataccgttggaggccataactgcgtgtgcaaaccaggttacacaggtaacggcaccacctgcaaagctttttgcaaagatggttgtaggaacggaggcgcatgtatagccgctaacgtctgcgcctgcccacagggcttcactgggccaagctgcgaaaccgatatcgacgagtgctcagacggatttgtccagtgtgatagtagggctaattgcattaatctccctggatggtaccactgcgaatgtcgagatggctaccatgacaatggcatgttctctccttcaggtgagtcctgcgaagacatagacgagtgcgggactggacggcatagctgcgctaatgacacaatctgcttcaatctggacggaggttacgactgtcggtgtccgcacggaaagaactgcacaggtgattgtattcatgacgggaaggttaaacataatggacaaatctgggtactggagaatgaccgatgcagcgtgtgtagctgtcaaaacggtttcgtgatgtgtaggagaatggtttgtgattgtgagaacccaacggttgacttattttgctgtcccgagtgtgaccctcgcctttcatcacaatgtttgcaccagaatggagagactctgtacaatagtggagacacctgggttcagaattgtcaacaatgcaggtgcttacagggagaagtggattgctggcctctgccctgccccgatgtcgagtgcgagttcagcatcttgccagagaacgagtgttgcccccggtgtgtaacagacccgtgccaagcagacaccattcgcaacgatattacgaaaacatgtctggatgagatgaacgtcgttcgctttaccggaagcagctggatcaagcatggaactgagtgtacattgtgtcagtgtaagaacggtcacatatgctgctcagtcgaccctcagtgtttgcaggaattatag

SEQ ID NO: 57084 - DNA, 2451 bp, Artificial Sequence
  derived and/or modified sequence
atggaatcccgggtactcctgcgcactttctgcctaatttttggactgggtgcagtgtggggcctgggagtagatccaagcctgcaaatcgatgtcttaaccgagttagaacttggagaaagcactaccggagttaggcaagtacctggtctccataacgggaccaaagcatttctctttcaagacactccccgatcaatcaaggccagtacagccacagctgaacaattcttccagaaactcagaaacaagcacgaatttactatcctggtaacgctgaagcagacgcacctgaactcaggtgtaatactatccattcaccacctggatcatcgatatctggaactggagagtagtggacatcgtaacgaggtgcggttgcactaccgaagcggatctcacagacctcacactgaagtatttccctatatcttggctgacgataaatggcacaagctgagcctagcaatttctgcatcccacttgattttacatattgactgcaacaaaatctacgaaagagtggttgagaagccctccaccgatttgcctctgggtacaacattctggttggggcaacgcaataatgcccatggatactttaaaggcatcatgcaagacgtacagctccttgttatgccccagggttttatagcacagtgtccggatctgaaccgcacctgtccaacttgcaacgacttccacggcctggttcagaagattatggaattacaagatattctggccaaaacgtcagctaagcttagcagagccgagcaaagaatgaatagattagaccaatgttattgcgaaagaacctgcacaatgaaggggaccacttatcgtgagttcgaatcatggattgatggttgcaagaattgcacctgtcttaatggaactatccagtgcgaaacccttatctgccccaacccagactgcccattaaaatctgcgctggcctacgtcgatggaaagtgttgtaaagaatgcaaaagcatatgccagttccagggccgcacatactttgaaggcgaacgcaatacagtgtactcctctagtggcgtttgtgtgctgtacgaatgtaaggatcagaccatgaagcttgtcgaatcttccggctgtcctgcgctggattgccccgaatctcatcagatcaccttaagccatagttgttgcaaagtttgcaagggctacgacttttgtagtgaacggcacaattgtatggaaaatagcatctgccggaacctcaacgatagagccgtgtgcagttgtagagatggtttcagagcattaagggaggacaatgcttactgtgaggacatagatgaatgtgcagaaggacgtcactactgtagagagaacaccatgtgcgtgaacactccaggatcttttatgtgtatatgtaagaccggatacattcgaatcgacgactactcatgtaccgagcacgacgaatgtatcaccaatcaacataattgcgatgagaacgctctttgcttcaatactgttggagggcataattgtgtctgcaaacccggttacactggaaacggaaccacctgcaaagcattctgtaaggatggctgccgtaacgggggtgcctgcatcgccgccaacgtctgtgcatgcccacaaggatttaccggaccttcctgcgagaccgatatcgatgagtgctccgatggatttgtgcaatgcgattctagggcaaactgcattaatctgcccggatggtaccattgtgagtgtagagatggataccacgacaatgggatgttcagccccagcggtgaaagttgtgaggatattgacgagtgcggaacaggaagacacagctgcgcaaacgatacgatttgctttaatttggatggtgggtatgactgtcggtgtcctcacggcaaaaattgcaccggcgattgcatccatgacggaaaggttaagcacaatggccagatttgggtcttggagaacgacagatgttcagtttgcagctgtcagaacggattcgtgatgtgtagacgaatggtgtgcgactgtgaaaacccgactgttgacttgttctgttgccccgagtgcgatccacgactgagttcccagtgtctgcaccagaacggggagaccttatataattctggcgatacctgggtgcagaattgtcagcaatgccgatgtcttcagggtgaagtcgactgctggccacttccttgtccagatgtggagtgcgaattttcaatactgcccgagaacgaatgttgtcctcgctgcgtgacagacccctgccaggctgacaccatccgcaacgatattaccaaaacgtgcctggatgaaatgaatgtcgtgcggttcaccgggagctcatggattaagcatggcactgaatgtacactatgtcaatgtaaaaatggccatatttgttgctcagtcgatcctcaatgcctccaagaactttag

SEQ ID NO: 57085 - DNA, 966 bp, Artificial Sequence
  derived and/or modified sequence
atggaatctcgcgtactgctacggactttttgtttgattttcggtctgggcgctgtatgggggcttggcgtggatccttcattacaaatcgatgtgctaacggagctggagttgggcgaatctacaactggagttaggcaagttcctggtctgcacaatggaacgaaggcctttctcttccaagacacaccacggagcattaaagcatccaccgcaactgccgagcagttctttcaaaagctgcgaaacaagcacgaattcactattcttgtcaccctgaagcagacacacctcaattcaggggttattctctccattcaccatctggaccatagatacctggaactcgagagcagcgggcatagaaacgaagtccgcttacattatagatcagggagccaccgaccccacacagaggtattcccatacatcctggctgacgataaatggcataagttgtccctggctatatcagcaagtcatcttatccttcatatcgattgcaataagatctacgaacgcgtggtagaaaagcccagtacagatcttcccctgggaaccactttctggttaggccaaagaaacaacgcacacggatattttaaaggaatcatgcaggatgttcagctgctggtgatgccacaaggtttcatcgcccagtgtcccgaccttaatcggacttgtcctacatgtaatgattttcatggtctggttcaaaaaattatggagttgcaagatatcctcgctaaaacctccgccaaactctctagagctgagcaacgaatgaatcgactggatcaatgctactgtgaacggacgtgcaccatgaaaggaacaacttatcgggagtttgagtcgtggatcgatggctgtaagaattgtacctgcctgaacggaacaattcagtgtgaaacccttatctgccctaaccccgactgtcctctcaaatctgctctcgcctactag

SEQ ID NO: 57086 - DNA, 2451 bp, Artificial Sequence
  derived and/or modified sequence
atggagagcagagtgctgctgagaaccttctgcctgatcttcggcctgggcgccgtgtggggcctgggcgtggaccccagcctgcagatcgacgtgctgaccgagctggagctgggcgagagcaccaccggcgtgagacaggtgcccggcctgcacaacggcaccaaggccttcctgttccaggacacccccagaagcatcaaggccagcaccgccaccgccgagcagttcttccagaagctgagaaacaagcacgagttcaccatcctggtgaccctgaagcagacccacctgaacagcggcgtgatcctgagcatccaccacctggaccacagatacctggagctggagagcagcggccacagaaacgaggtgagactgcactacagaagcggcagccacagaccccacaccgaggtgttcccctacatcctggccgacgacaagtggcacaagctgagcctggccatcagcgccagccacctgatcctgcacatcgactgcaacaagatctacgagagagtggtggagaagcccagcaccgacctgcccctgggcaccaccttctggctgggccagagaaacaacgcccacggctacttcaagggcatcatgcaggacgtgcagctgctggtgatgccccagggcttcatcgcccagtgccccgacctgaacagaacctgccccacctgcaacgacttccacggcctggtgcagaagatcatggagctgcaggacatcctggccaagaccagcgccaagctgagcagagccgagcagagaatgaacagactggaccagtgctactgcgagagaacctgcaccatgaagggcaccacctacagagagttcgagagctggatcgacggctgcaagaactgcacctgcctgaacggcaccatccagtgcgagaccctgatctgccccaaccccgactgccccctgaagagcgccctggcctacgtggacggcaagtgctgcaaggagtgcaagagcatctgccagttccagggcagaacctacttcgagggcgagagaaacaccgtgtacagcagcagcggcgtgtgcgtgctgtacgagtgcaaggaccagaccatgaagctggtggagagcagcggctgccccgccctggactgccccgagagccaccagatcaccctgagccacagctgctgcaaggtgtgcaagggctacgacttctgcagcgagagacacaactgcatggagaacagcatctgcagaaacctgaacgacagagccgtgtgcagctgcagagacggcttcagagccctgagagaggacaacgcctactgcgaggacatcgacgagtgcgccgagggcagacactactgcagagagaacaccatgtgcgtgaacacccccggcagcttcatgtgcatctgcaagaccggctacatcagaatcgacgactacagctgcaccgagcacgacgagtgcatcaccaaccagcacaactgcgacgagaacgccctgtgcttcaacaccgtgggcggccacaactgcgtgtgcaagcccggctacaccggcaacggcaccacctgcaaggccttctgcaaggacggctgcagaaacggcggcgcctgcatcgccgccaacgtgtgcgcctgcccccagggcttcaccggccccagctgcgagaccgacatcgacgagtgcagcgacggcttcgtgcagtgcgacagcagagccaactgcatcaacctgcccggctggtaccactgcgagtgcagagacggctaccacgacaacggcatgttcagccccagcggcgagagctgcgaggacatcgacgagtgcggcaccggcagacacagctgcgccaacgacaccatctgcttcaacctggacggcggctacgactgcagatgcccccacggcaagaactgcaccggcgactgcatccacgacggcaaggtgaagcacaacggccagatctgggtgctggagaacgacagatgcagcgtgtgcagctgccagaacggcttcgtgatgtgcagaagaatggtgtgcgactgcgagaaccccaccgtggacctgttctgctgccccgagtgcgaccccagactgagcagccagtgcctgcaccagaacggcgagaccctgtacaacagcggcgacacctgggtgcagaactgccagcagtgcagatgcctgcagggcgaggtggactgctggcccctgccctgccccgacgtggagtgcgagttcagcatcctgcccgagaacgagtgctgccccagatgcgtgaccgacccctgccaggccgacaccatcagaaacgacatcaccaagacctgcctggacgagatgaacgtggtgagattcaccggcagcagctggatcaagcacggcaccgagtgcaccctgtgccagtgcaagaacggccacatctgctgcagcgtggacccccagtgcctgcaggagctgtag

SEQ ID NO: 57087 - DNA, 966 bp, Artificial Sequence
  derived and/or modified sequence
atggagagcagagtgctgctgagaaccttctgcctgatcttcggcctgggcgccgtgtggggcctgggcgtggaccccagcctgcagatcgacgtgctgaccgagctggagctgggcgagagcaccaccggcgtgagacaggtgcccggcctgcacaacggcaccaaggccttcctgttccaggacacccccagaagcatcaaggccagcaccgccaccgccgagcagttcttccagaagctgagaaacaagcacgagttcaccatcctggtgaccctgaagcagacccacctgaacagcggcgtgatcctgagcatccaccacctggaccacagatacctggagctggagagcagcggccacagaaacgaggtgagactgcactacagaagcggcagccacagaccccacaccgaggtgttcccctacatcctggccgacgacaagtggcacaagctgagcctggccatcagcgccagccacctgatcctgcacatcgactgcaacaagatctacgagagagtggtggagaagcccagcaccgacctgcccctgggcaccaccttctggctgggccagagaaacaacgcccacggctacttcaagggcatcatgcaggacgtgcagctgctggtgatgccccagggcttcatcgcccagtgccccgacctgaacagaacctgccccacctgcaacgacttccacggcctggtgcagaagatcatggagctgcaggacatcctggccaagaccagcgccaagctgagcagagccgagcagagaatgaacagactggaccagtgctactgcgagagaacctgcaccatgaagggcaccacctacagagagttcgagagctggatcgacggctgcaagaactgcacctgcctgaacggcaccatccagtgcgagaccctgatctgccccaaccccgactgccccctgaagagcgccctggcctactag

SEQ ID NO: 57088 - protein, 815 aa, Artificial Sequence
  derived and/or modified sequence
METGLGAPLFKAWLLISVWGLGVDPSLQIDVLTELELGESTTGVRQVPGLHNGTKAFLFQDTPRSIKASTATAEQFFQKLRNKHEFTILVTLKQTHLNSGVILSIHHLDHRYLELESSGHRNEVRLHYRSGSHRPHTEVFPYILADDKWHKLSLAISASHLILHIDCNKIYERVVEKPSTDLPLGTTFWLGQRNNAHGYFKGIMQDVQLLVMPQGFIAQCPDLNRTCPTCNDFHGLVQKIMELQDILAKTSAKLSRAEQRMNRLDQCYCERTCTMKGTTYREFESWIDGCKNCTCLNGTIQCETLICPNPDCPLKSALAYVDGKCCKECKSICQFQGRTYFEGERNTVYSSSGVCVLYECKDQTMKLVESSGCPALDCPESHQITLSHSCCKVCKGYDFCSERHNCMENSICRNLNDRAVCSCRDGFRALREDNAYCEDIDECAEGRHYCRENTMCVNTPGSFMCICKTGYIRIDDYSCTEHDECITNQHNCDENALCFNTVGGHNCVCKPGYTGNGTTCKAFCKDGCRNGGACIAANVCACPQGFTGPSCETDIDECSDGFVQCDSRANCINLPGWYHCECRDGYHDNGMFSPSGESCEDIDECGTGRHSCANDTICFNLDGGYDCRCPHGKNCTGDCIHDGKVKHNGQIWVLENDRCSVCSCQNGFVMCRRMVCDCENPTVDLFCCPECDPRLSSQCLHQNGETLYNSGDTWVQNCQQCRCLQGEVDCWPLPCPDVECEFSILPENECCPRCVTDPCQADTIRNDITKTCLDEMNVVRFTGSSWIKHGTECTLCQCKNGHICCSVDPQCLQEL

SEQ ID NO: 57089 - protein, 577 aa, Artificial Sequence
  derived and/or modified sequence
METGLGAPLFKAWLLISVWGLGVDPSLQIDVLTELELGESTTGVRQVPGLHNGTKAFLFQDTPRSIKASTATAEQFFQKLRNKHEFTILVTLKQTHLNSGVILSIHHLDHRYLELESSGHRNEVRLHYRSGSHRPHTEVFPYILADDKWHKLSLAISASHLILHIDCNKIYERVVEKPSTDLPLGTTFWLGQRNNAHGYFKGIMQDVQLLVMPQGFIAQCPDLNRTCPTCNDFHGLVQKIMELQDILAKTSAKLSRAEQRMNRLDQCYCERTCTMKGTTYREFESWIDGCKNCTCLNGTIQCETLICPNPDCPLKSALAYVDGKCCKECKSICQFQGRTYFEGERNTVYSSSGVCVLYECKDQTMKLVESSGCPALDCPESHQITLSHSCCKVCKGYDFCSERHNCMENSICRNLNDRAVCSCRDGFRALREDNAYCEDIDECAEGRHYCRENTMCVNTPGSFMCICKTGYIRIDDYSCTEHDECITNQHNCDENALCFNTVGGHNCVCKPGYTGNGTTCKAFCKDGCRNGGACIAANVCACPQGFTGPSCETDIDECSDGFVQCDSRANCICLVPL

SEQ ID NO: 57090 - protein, 110 aa, Artificial Sequence
  derived and/or modified sequence
METGLGAPLFKAWLLISVWGLGVDPSLQIDVLTELELGESTTGVRQVPGLHNGTKAFLFQDTPRSIKASTATAEQFFQKLRNKHEFTILVTLKQTHLNSGVILSIHHLDH

SEQ ID NO: 57091 - DNA, 2448 bp, Artificial Sequence
  derived and/or modified sequence
atggaaactgggttgggcgcacccctgttcaaggcgtggctgttaatttcagtctggggcctgggggttgatccctctctgcaaatcgacgtgctcacagaattagaattgggagaaagcaccacaggcgtccgccaggttccggggttacacaacggaacgaaggcatttctgttccaggacacccctcgcagcataaaggcttcgaccgccactgccgaacagttttttcagaaattgagaaacaaacacgagtttaccatactggtcacattgaagcagacgcatctgaactcaggcgtgattctctcaatacaccatcttgatcaccggtatctggaactggaatctagcggacatcggaatgaggtgcggcttcattatcggtccggatcccaccgaccgcacactgaagtgttcccctacatcctcgccgatgacaagtggcacaagttatccctcgcgatctctgccagccaccttattttgcacatcgactgcaacaaaatctatgaacgagttgtggagaagccaagcactgatttgcctctcggcactaccttttggctggggcagagaaataacgcacacggatatttcaaaggtatcatgcaggatgtgcaattgctggttatgccgcagggctttattgcacagtgtcctgacctgaaccgaacttgtccaacttgcaatgacttccacgggctagttcagaaaatcatggagctgcaggatatactggcgaaaacttctgctaaacttagcagggccgaacagaggatgaaccgcctcgaccagtgctattgtgaacgcacctgcaccatgaaagggactacgtacagagaatttgagtcttggattgacggctgcaaaaattgtacttgcctgaatggaaccatccagtgcgagacattgatttgccctaacccagattgtccactaaaatctgcactggcttacgtggacggaaagtgttgcaaggagtgcaaatccatctgtcagttccagggccgtacatatttcgaaggtgagagaaacacggtgtattctagctcaggggtgtgcgtgctgtatgagtgcaaggatcagaccatgaaactagttgagagctccgggtgtcccgcactcgactgtcccgagagtcatcagatcacactatctcatagttgctgtaaagtgtgcaaggggtacgatttttgttctgaacgccataactgcatggagaattcgatttgcagaaatctgaatgatcgggctgtgtgcagctgtagagatggctttagagccctgagagaagataacgcatattgcgaggacattgatgaatgcgccgaaggccggcattactgccgtgagaacactatgtgtgtgaatactccgggtagtttcatgtgcatttgcaagaccgggtacattcgcatagatgattattcctgcaccgagcatgatgagtgtatcaccaaccagcacaattgcgacgaaaatgctctttgttttaacaccgtcggtgggcataactgtgtatgcaagcctggctacaccggaaacggtactacttgtaaggctttttgtaaggacgggtgccggaacggcggggcctgcatagccgctaatgtatgcgcatgtccacagggattcaccgggccttcctgcgagaccgatatcgatgagtgttccgatgggttcgtgcaatgcgattccagggctaattgtataaatttgccaggctggtatcactgcgagtgcagggacggttaccacgataacggaatgtttagccctagcggcgaaagttgtgaggatatcgatgagtgcggaacaggaaggcactcctgcgccaatgacacaatatgtttcaatcttgacggagggtacgattgcagatgtccacacggtaagaattgcaccggagactgtattcacgacggcaaggtgaagcacaacggccagatctgggtcctggagaacgatcggtgcagcgtttgtagctgccagaatgggttcgtaatgtgtcgcagaatggtatgtgactgtgagaacccgaccgttgatctgttttgttgccctgaatgtgaccctagactgagctcccagtgccttcaccagaatggcgagactttgtacaatagcggcgacacctgggtgcagaactgccagcaatgcaggtgtctgcaaggtgaggtggactgttggccgctgccgtgccccgacgttgaatgtgaattctctattctgccagaaaacgagtgctgtcccaggtgtgtaactgatccctgtcaggctgacactattcggaacgacattactaaaacatgcctggacgagatgaatgtggtgagattcacaggaagctcctggatcaaacacggtactgaatgtaccctgtgccaatgcaagaacggtcatatttgttgttctgtcgatccacagtgtcttcaggagctctag

SEQ ID NO: 57092 - DNA, 1734 bp, Artificial Sequence
  derived and/or modified sequence
atggaaacaggactgggcgctccgttgtttaaggcatggttacttatctctgtgtgggggctgggagtggacccttcactccagattgatgtcctcactgagctggaactaggtgagtccacaactggggtgaggcaggtgcccggactacataacgggactaaagccttcttgtttcaggatacacctagatcgattaaagcctcaaccgccactgctgagcagtttttccaaaaactgcgaaacaagcacgagttcacaatcctggtgacgctaaagcaaacccacctgaacagtggcgtcatcctgagcattcaccacctggaccaccggtacctggaactggagtcctcaggacatcgcaatgaagtgcgcctccactatcggagcgggtcccaccgcccacacactgaggttttcccatatatcctggcagatgataagtggcataagctatcactggctatctccgcctcccacctcatactccatatcgactgtaataaaatttacgagagagtggtcgaaaagcctagtactgatctccctttgggcacaaccttttggttggggcagcgcaacaatgcccacgggtacttcaaagggattatgcaggatgtacagctgctggttatgccccaaggcttcattgcccaatgccccgatcttaaccggacatgcccaacctgtaacgattttcacgggctggtacagaagatcatggagctgcaagacatcctagccaaaacctcagcgaagctgagtagggcggaacagagaatgaacagactggaccagtgctactgtgagcgtacctgcacaatgaaaggcactacgtatagagagttcgagtcatggatagatgggtgtaagaactgcacgtgcctgaatggcacaattcaatgtgaaacactgatctgccctaatccagattgccctctgaaatcggcactggcctacgtggatgggaagtgttgcaaggaatgcaagagtatctgtcagtttcaaggcaggacttatttcgaaggggagcggaacacggtgtattccagtagtggggtctgcgtactatatgagtgcaaggaccagactatgaagctggtagagtcttcgggctgccccgccctcgattgccccgagtcccatcaaatcacactctcacactcatgttgcaaggtgtgcaaagggtatgatttttgtagcgagcgtcacaactgcatggagaatagtatttgtcgaaacctcaacgatcgagccgtctgcagctgccgggatggattccgtgctctcagggaggacaatgcctattgtgaggatattgacgagtgtgcagaaggcagacactattgccgggagaacacaatgtgtgtcaacacccctgggagcttcatgtgtatctgtaaaaccgggtacattcggatcgatgactacagttgcacagaacatgatgagtgtatcactaaccagcataattgcgatgaaaatgccctgtgtttcaataccgtggggggccataattgcgtctgtaagcctggatacacggggaatggcaccacttgcaaagccttttgtaaggacggctgccgtaacggcggcgcctgcatcgcagcaaacgtctgcgcctgcccccagggctttaccggtcccagctgcgaaacagatatcgacgaatgttctgacgggttcgttcaatgcgattctcgagccaactgtatttgtctcgtgccactgtag

SEQ ID NO: 57093 - DNA, 333 bp, Artificial Sequence
  derived and/or modified sequence
atggaaacaggcctaggagcccctctgttcaaggcatggctacttattagcgtttgggggctgggcgtggatccctcgctgcagattgatgtcctgacggaactggaacttggagagtcaactaccggcgtaaggcaagtgccaggcctgcataatggtactaaagcattcctttttcaggataccccaaggagcattaaggcttccaccgcgacagcggagcaattctttcagaaactccgtaataagcacgaatttaccatcctggtcacgttgaaacagacccatttgaattccggagttattctgtcaatccatcacctagaccactag

SEQ ID NO: 57094 - DNA, 2448 bp, Artificial Sequence
  derived and/or modified sequence
atggaaactggactgggcgcgcctctatttaaagcatggttacttatctccgtgtggggcctcggtgtggatccatccctgcaaatcgatgttctgaccgagctggaactgggggagtccaccaccggcgttagacaggtgcctggacttcataatggaaccaaggcgtttctgttccaggatactccacgatccataaaggcgagcactgcaactgcggaacagttcttccagaagctacggaataagcatgagtttacaatcctggtgacactgaaacagactcatttgaatagtggagttatactgtccatccaccacttagaccaccggtatctggagctagagagcagtggacacagaaacgaggtaaggttgcactatcggtcaggttctcatcggccccacaccgaagtgtttccctatattttggccgacgacaagtggcataaattgtcccttgcaatctcagcttcacaccttattctccatattgactgtaataaaatatatgaaagagtagtggagaagccttctactgacttgcccctaggaacgaccttttggcttggccagagaaataatgcgcatggctatttcaagggaattatgcaggatgtgcagctgctggtcatgcctcaagggttcatagcacagtgcccagatctgaaccgtacatgtcctacctgcaatgacttccacggactcgtgcagaagatcatggagctgcaggatatactggctaaaacttctgctaagctgagtcgagccgagcagcggatgaatcgcctcgatcagtgctactgcgaacgcacctgtacaatgaaaggcactacttatagagaatttgaatcctggatcgatggatgcaaaaactgtacttgcctgaatggcacaattcaatgtgaaactctgatttgcccaaatccggattgccctctgaagtctgcactggcttatgttgatggtaaatgctgtaaggagtgtaagtctatttgtcagttccagggtcgcacatacttcgagggggagagaaatactgtttatagcagcagcggagtctgcgtgctttacgaatgcaaagatcagacaatgaaactcgttgaatcaagtggttgcccagccctggattgtcccgagtcccaccagatcacactcagtcatagttgctgtaaggtttgtaaaggatatgacttctgctcagagcggcacaattgcatggaaaactccatctgccggaacctcaacgacagagccgtatgtagctgcagagacggttttagagcgcttcgggaagataacgcatattgtgaagacattgatgagtgcgctgaaggacgacactattgcagggagaataccatgtgcgttaacacacccgggtcatttatgtgcatctgcaagaccggatatattcggatcgacgactacagctgcacagagcacgatgagtgtatcactaatcagcataactgcgatgaaaacgctctgtgctttaataccgtcgggggccacaactgtgtttgcaagcccggatacaccggaaatggaactacttgtaaggcgttttgcaaggatggatgtagaaacggcggtgcttgcatcgcggcaaacgtgtgtgcctgccctcaggggttcacaggaccttcctgtgagaccgacatagacgagtgttctgatggctttgtgcaatgtgactctcgcgctaactgtataaaccttccgggctggtaccactgcgaatgtagagatggttatcacgacaacgggatgtttagcccatcaggtgagtcgtgtgaagacattgatgagtgcggcacgggccgacatagttgtgccaatgatacgatctgctttaacctcgatgggggatatgattgtcggtgtccacacggcaaaaattgcaccggcgattgtatacatgatggaaaggttaaacataacggtcagatttgggtgctggagaacgatcggtgttccgtgtgttcctgtcagaacgggttcgtgatgtgccgacggatggtttgcgactgcgagaatccgactgtcgacctgttttgttgtcccgaatgcgacccgagactgtcatctcagtgcctgcatcagaatggagagacgctgtacaactctggcgatacctgggtgcagaattgtcaacagtgcaggtgtcttcaaggggaggtcgactgttggccactcccatgtcccgacgtggagtgcgaatttagcatcctgccggagaacgagtgctgccccaggtgcgtcaccgacccttgccaggccgatacaatacgcaacgacattaccaaaacctgtcttgatgagatgaacgtggtccggttcactgggtctagctggatcaaacatggcacggagtgcacgctgtgtcagtgtaagaatggtcatatctgttgctctgtcgatccgcaatgtttacaggaactgtag

SEQ ID NO: 57095 - DNA, 2448 bp, Artificial Sequence
  derived and/or modified sequence
atggagaccggcctgggcgcccccctcttcaaggcctggctgctgatctctgtgtggggcctgggcgtggaccccagcctgcagattgatgtgctgacagagctggagctgggggagagcaccaccggggtgcggcaggtgcccggcctgcacaacggcaccaaggccttcctgttccaggacacccccaggagcatcaaggccagcacagccacagctgagcagttcttccagaagctgaggaacaagcatgagttcaccatcctggtgaccctgaagcagacccacctgaacagcggggtcatcctgagcatccaccacctggaccaccgctacctggagctggagagcagcggccacagaaatgaggtgcggctgcactaccgcagcggcagccaccggccccacacagaggtgttcccctacatcctggctgatgacaagtggcacaagctgagcctggccatcagcgccagccacctgatcctgcacatcgactgcaacaagatctatgagcgggtggtggagaagcccagcacagacctgcccctgggcaccaccttctggctgggccagagaaataatgcccacggctacttcaagggcatcatgcaggatgtgcagctgctggtgatgccccagggcttcatcgcccagtgcccagacctgaacagaacctgccccacctgcaatgacttccacggcctggtgcagaagatcatggagctgcaggacatcctggccaagaccagcgccaagctgagcagagctgagcagaggatgaaccggctggaccagtgctactgtgagaggacctgcaccatgaagggcaccacctaccgggagtttgagagctggattgatggctgcaagaactgcacctgcctgaatggcaccatccagtgtgagaccctcatctgccccaacccagactgccccctgaagagcgccctggcctacgtggatggcaagtgctgcaaggagtgcaagagcatctgccagttccagggccgcacctactttgaaggagagaggaacacagtgtacagcagcagcggcgtgtgtgtgctgtatgagtgcaaggaccagaccatgaagctggtggagagcagcggctgcccagccctggactgcccagagagccaccagatcaccctgagccacagctgctgcaaggtgtgcaagggctatgacttctgcagcgagcggcacaactgcatggagaacagcatctgcaggaacctgaatgacagagctgtgtgcagctgcagagatggcttccgggccctgcgggaggacaatgcctactgtgaggacattgatgaatgtgccgagggccgccactactgccgggagaacaccatgtgtgtgaacaccccaggcagcttcatgtgcatctgcaagacaggctacatcagaattgatgactacagctgcacagaacatgatgagtgcatcaccaaccagcacaactgtgatgaaaatgccctgtgcttcaacacagtgggcggccacaactgtgtgtgcaagccaggctacacaggaaatggcaccacctgcaaggccttctgcaaggatggctgcagaaatggaggagcctgcatcgccgccaacgtgtgtgcctgcccccagggcttcaccggccccagctgtgaaacagacattgatgaatgttctgatggctttgtgcagtgtgacagccgggccaactgcatcaacctgcccggctggtaccactgtgaatgtagagatggctaccatgacaatggcatgttcagccccagcggggagagctgtgaggacattgatgaatgtggcaccggccgccacagctgtgccaatgacaccatctgcttcaacctggatggcggctatgactgccgctgcccccacggcaagaactgcaccggggactgcatccatgatggcaaggtgaagcacaacggccagatctgggtgctggagaatgaccgctgcagcgtgtgcagctgccagaatggatttgtgatgtgcaggaggatggtgtgtgactgtgagaaccccaccgtggacctcttctgctgcccagaatgtgacccccggctgagcagccagtgcctgcaccagaatggagagaccctgtacaacagcggggacacctgggtgcagaactgccagcagtgccgctgcctgcagggcgaggtggactgctggcccctgccctgcccagatgtggagtgtgagttcagcatcctgcctgaaaatgaatgctgcccccgctgtgtgacagacccctgccaggccgacaccatcagaaatgacatcaccaagacctgcctggatgagatgaatgtggtgcgcttcaccggcagctcctggatcaagcatggaacagagtgcaccctgtgccagtgcaagaatggccacatctgctgcagcgtggacccccagtgcctgcaggagctgtag

SEQ ID NO: 57096 - DNA, 1734 bp, Artificial Sequence
  derived and/or modified sequence
atggagaccggcctgggcgcccccctcttcaaggcctggctgctgatctctgtgtggggcctgggcgtggaccccagcctgcagattgatgtgctgacagagctggagctgggggagagcaccaccggggtgcggcaggtgcccggcctgcacaacggcaccaaggccttcctgttccaggacacccccaggagcatcaaggccagcacagccacagctgagcagttcttccagaagctgaggaacaagcatgagttcaccatcctggtgaccctgaagcagacccacctgaacagcggggtcatcctgagcatccaccacctggaccaccgctacctggagctggagagcagcggccacagaaatgaggtgcggctgcactaccgcagcggcagccaccggccccacacagaggtgttcccctacatcctggctgatgacaagtggcacaagctgagcctggccatcagcgccagccacctgatcctgcacatcgactgcaacaagatctatgagcgggtggtggagaagcccagcacagacctgcccctgggcaccaccttctggctgggccagagaaataatgcccacggctacttcaagggcatcatgcaggatgtgcagctgctggtgatgccccagggcttcatcgcccagtgcccagacctgaacagaacctgccccacctgcaatgacttccacggcctggtgcagaagatcatggagctgcaggacatcctggccaagaccagcgccaagctgagcagagctgagcagaggatgaaccggctggaccagtgctactgtgagaggacctgcaccatgaagggcaccacctaccgggagtttgagagctggattgatggctgcaagaactgcacctgcctgaatggcaccatccagtgtgagaccctcatctgccccaacccagactgccccctgaagagcgccctggcctacgtggatggcaagtgctgcaaggagtgcaagagcatctgccagttccagggccgcacctactttgaaggagagaggaacacagtgtacagcagcagcggcgtgtgtgtgctgtatgagtgcaaggaccagaccatgaagctggtggagagcagcggctgcccagccctggactgcccagagagccaccagatcaccctgagccacagctgctgcaaggtgtgcaagggctatgacttctgcagcgagcggcacaactgcatggagaacagcatctgcaggaacctgaatgacagagctgtgtgcagctgcagagatggcttccgggccctgcgggaggacaatgcctactgtgaggacattgatgaatgtgccgagggccgccactactgccgggagaacaccatgtgtgtgaacaccccaggcagcttcatgtgcatctgcaagacaggctacatcagaattgatgactacagctgcacagaacatgatgagtgcatcaccaaccagcacaactgtgatgaaaatgccctgtgcttcaacacagtgggcggccacaactgtgtgtgcaagccaggctacacaggaaatggcaccacctgcaaggccttctgcaaggatggctgcagaaatggaggagcctgcatcgccgccaacgtgtgtgcctgcccccagggcttcaccggccccagctgtgaaacagacattgatgaatgttctgatggctttgtgcagtgtgacagccgggccaactgcatctgcctggtgcccctgtag

SEQ ID NO: 57097 - DNA, 333 bp, Artificial Sequence
  derived and/or modified sequence
atggagaccggcctgggcgcccccctcttcaaggcctggctgctgatctctgtgtggggcctgggcgtggaccccagcctgcagattgatgtgctgacagagctggagctgggggagagcaccaccggggtgcggcaggtgcccggcctgcacaacggcaccaaggccttcctgttccaggacacccccaggagcatcaaggccagcacagccacagctgagcagttcttccagaagctgaggaacaagcatgagttcaccatcctggtgaccctgaagcagacccacctgaacagcggggtcatcctgagcatccaccacctggaccactag

SEQ ID NO: 57098 - DNA, 2448 bp, Artificial Sequence
  derived and/or modified sequence
atggagaccggcctgggcgcccccctgttcaaggcctggctgctgatcagcgtatggggccttggggttgatcctagccttcagatcgatgtgttaacggagttggaactcggggagtccaccacaggagtgagacaggttcccggcttacacaacggaactaaggcctttctcttccaagataccccccgctccattaaggcgagcactgctaccgccgagcagtttttccagaagctcagaaacaagcacgagttcacaatactagtcaccctgaagcagacacatctgaacagtggggtcattctgagtattcaccacctggaccaccgatacctcgagctggagtcaagtgggcacaggaatgaggtcagattgcactatagaagcggatctcataggccccataccgaggtttttccatacatactggccgacgacaagtggcataaactgtctctggccatttctgctagccacctcatactgcatatcgattgcaacaagatctatgagcgtgttgtggaaaaacctagcactgacttaccactcggaaccactttctggctgggtcagcggaataatgctcatggctatttcaagggcatcatgcaggacgtccagctgctcgtgatgccacagggattcatcgcacagtgccccgatcttaacaggacatgcccaacatgtaatgacttccacggcctggtgcagaaaattatggaactgcaggatattctggccaagacatccgccaagctttctcgtgctgagcagaggatgaatcgcctagaccagtgttattgtgagcgtacctgcacaatgaaggggactacctatcgcgagttcgaatcctggatcgatggctgcaaaaactgcacttgccttaacggaacgatccaatgcgagacgctaatatgccccaaccctgactgccccctaaaaagtgcgctggcctacgtcgacggaaaatgttgtaaggaatgtaaatccatctgtcagtttcagggcaggacctacttcgagggagagcggaacacagtctattcttcttccggcgtctgtgtactatacgaatgcaaagatcagaccatgaagctggtcgagtctagcggatgcccggcattggactgtcccgaaagccaccagatcacactttcgcactcctgttgcaaagtgtgtaagggctacgacttctgttccgaacgtcataactgcatggaaaacagtatttgtcgtaatctgaacgatagggcggtgtgcagctgccgagacggatttcgagcattgcgcgaagacaacgcctattgcgaagatatcgatgagtgcgccgaaggcagacactactgtcgcgaaaacacaatgtgcgttaacacacctggctcatttatgtgtatctgcaaaacaggttatatcagaatcgacgactactcctgcaccgagcatgatgagtgtatcacgaatcagcacaattgcgacgagaacgcactctgtttcaatacagtgggaggccacaattgcgtttgcaaaccggggtacactggtaatggaacgacttgtaaggctttttgcaaggatggctgccgcaacggcggcgcctgtatcgctgcaaatgtgtgcgcctgtcctcagggatttacaggaccatcttgcgagactgatattgatgagtgcagcgacgggttcgtgcaatgcgattctcgagccaattgcattaatcttccaggttggtatcactgcgaatgtcgggatggctaccatgacaacggcatgttctccccctcaggggaatcttgcgaggacatcgatgaatgtggcaccggccgccactcgtgcgccaatgacacaatctgcttcaacctagatggtggttatgactgcagatgtccacacggcaagaactgcactggtgattgtatccatgatgggaaggtgaaacataatgggcagatctgggtcctggaaaatgaccgatgttccgtatgctcctgccagaacggattcgttatgtgtcggcggatggtctgcgactgcgagaacccgaccgttgacctcttctgctgcccagaatgcgacccaagattatcctcacagtgcctacaccaaaacggtgaaactttgtataactccggcgatacttgggtgcagaactgtcaacagtgcagatgtctgcaaggggaggtagattgttggccactgccttgccctgatgttgagtgtgagtttagcattttgcccgaaaacgagtgctgtcctcggtgcgttactgacccctgtcaagctgacaccattcgcaatgacattacaaaaacctgcctggacgagatgaacgtggtgagattcaccggaagttcctggattaaacacggaaccgaatgcaccctttgccagtgcaagaacgggcatatttgctgcagcgtagatcctcaatgtctgcaagagttatag

SEQ ID NO: 57099 - DNA, 1734 bp, Artificial Sequence
  derived and/or modified sequence
atggagaccggcctgggcgcccccctgttcaaggcctggctgctgatcagcgtatgggggctgggcgtggatccttcccttcagatcgacgttcttactgagctggagctgggcgagagtacaaccggcgttagacaggtgcctggcctgcataacggcactaaagcatttctgttccaggataccccgagatccatcaaggcatctactgcgaccgccgagcaattcttccagaagttgagaaataaacacgaattcactatcctggtgaccctgaagcagacgcacctgaattctggcgtcattctaagcattcaccatctggaccatagatacttggagctggagtcttcaggacatcgaaacgaagtgcggctgcactataggtctggcagccaccgaccgcacacagaggttttcccctatattctcgctgacgacaagtggcacaagcttagcctcgctatatctgcgtcccacttgatcctccatatcgactgtaacaagatctacgaacgagttgtcgaaaagcctagtacggacctgcccttgggtactactttttggctgggtcagcgaaataacgcgcacggatacttcaaagggatcatgcaagatgtgcagctactggtgatgccccagggctttatcgcacagtgtcctgatctgaatagaacgtgcccgacgtgtaacgattttcacggcctggtgcagaaaatcatggaactgcaggacatccttgccaagactagtgccaaactgagtagagccgaacagcgcatgaatagactcgaccagtgctattgcgaacgaacctgtacaatgaagggaactacatacagggaatttgaatcatggatagacggatgtaagaactgcacctgtcttaatggtacaatacagtgtgaaaccctgatctgcccaaaccctgactgtccacttaaaagtgcgttagcatacgtggacggaaaatgctgtaaagaatgcaagtcgatctgccagttccagggaaggacttacttcgaaggcgagaggaataccgtatactcatcgtcaggagtatgcgtgttgtacgaatgcaaagatcagaccatgaagctggtggaaagctccggttgccctgcactggattgtccagaatctcaccagatcactctgtcacactcttgctgcaaggtgtgcaaaggctacgatttctgttccgaacgccacaactgcatggaaaattcaatctgtcgaaacttaaatgaccgcgctgtttgcagctgccgggacggcttccgcgctctgcgggaggacaatgcatactgtgaggacatagatgaatgtgctgagggccgacactactgcagggaaaataccatgtgcgtaaacacccccggctcatttatgtgcatttgcaagactggttatatcaggatagacgattactcgtgcactgaacacgacgaatgcatcacaaatcagcacaactgtgacgaaaacgcactgtgtttcaacaccgtgggcgggcataactgcgtttgtaagccaggctacaccggcaatggaactacttgtaaggccttttgtaaggacgggtgtagaaatggcggtgcctgtattgccgcaaacgtctgcgcctgcccacaaggatttaccggacccagttgtgaaaccgatatcgacgaatgctcagatggattcgtgcagtgtgactcacgcgctaactgcatatgtctggttcctctctag

SEQ ID NO: 57100 - DNA, 333 bp, Artificial Sequence
  derived and/or modified sequence
atggagaccggcctgggcgcccccctgttcaaggcctggctgctgatctctgtgtggggtcttggggtcgatccctctctgcaaatcgatgtgctcactgagttggaactgggggaatctacaactggggttaggcaagtgcctggcctgcataacggcacgaaagcattcttgttccaagatacgccccgctcgattaaggcttccacagccactgcggagcaattctttcagaagctgcgcaataaacatgaatttaccatactggtgaccctcaagcagacacacctcaactctggagtgatcctctcaatccaccaccttgaccattag

SEQ ID NO: 57101 - DNA, 2448 bp, Artificial Sequence
  derived and/or modified sequence
atggagaccggcctgggcgcccccctgttcaaggcctggctgctgatcagtgtgtggggcctgggtgtggacccgagcttgcagatcgacgtgcttaccgaactggaacttggcgagagcacgactggggtgcgtcaggtgcctggtttgcacaatggcaccaaagcattcttatttcaggacacccccagatcgatcaaggcctctaccgcaacagctgagcaatttttccagaaacttcgtaataagcacgagttcacaattctggttactctgaaacagacccatctgaattccggggtgatcttgtccatccaccacctcgaccacagatacttagagttagaatctagcggacaccgaaacgaggttcggcttcactaccgctctgggagtcaccgccctcataccgaagtttttccatacatacttgctgatgacaagtggcacaaattgagcctggccatcagtgcgagccacctgatactgcacatcgactgtaacaagatttacgaacgcgtggtggaaaaaccgagtacggacctcccactgggaactacattttggctggggcaaagaaacaatgcgcatggctactttaagggcatcatgcaagacgtgcagctgctcgtcatgcctcagggattcattgcacagtgtcccgacctaaatcggacatgccccacttgtaatgattttcacggtctggtgcagaagatcatggaactgcaggatatccttgctaagacaagcgcaaagttatccagagccgagcagcggatgaaccgtttggaccaatgttactgtgaaaggacatgtactatgaaagggaccacttacagagaatttgagtcctggattgacggctgtaagaattgtacatgtctcaacggcacgatccaatgtgagacactcatctgtcccaatcctgactgcccgcttaaaagcgcactggcttacgtggatggcaaatgctgtaaagaatgtaaaagcatatgccagttccagggacgcacctatttcgagggcgagcgaaatacagtctacagttcatccggcgtgtgcgttctgtatgagtgtaaggatcagactatgaaacttgtcgaaagttctggttgtcctgccttggactgccccgaaagccatcagatcactctctcacattcgtgttgtaaggtctgcaaggggtacgatttctgctctgaaaggcataattgcatggaaaacagtatctgccgaaacttgaatgacagggccgtctgcagctgtcgagatggattccgagccttaagagaggacaatgcctattgcgaagatattgacgagtgtgccgaaggccgccactactgtagggagaataccatgtgcgtaaacacccctgggtcctttatgtgcatctgcaaaaccggctacatccggatagatgattacagctgcactgagcatgacgagtgcatcactaaccagcacaactgcgatgaaaacgctctttgtttcaatacagtaggaggccataattgcgtttgtaaaccaggctataccgggaatggtacaacatgcaaggctttctgtaaggacggatgccggaacggcggggcttgtatcgctgccaatgtgtgcgcctgccctcagggatttaccggtccgtcctgcgaaaccgatatcgacgaatgttccgatgggttcgtccagtgtgatagcagagcaaactgtatcaatctgcctggctggtaccactgcgaatgccgagacgggtaccacgataatgggatgttctcgccctcgggtgaatcctgtgaagatatcgacgagtgcggtacgggtcgacacagctgtgcaaacgacaccatttgcttcaacctggatggaggatatgactgtcgatgccctcacggcaagaactgtaccggcgattgtattcatgacgggaaggtgaagcacaacggacagatctgggtactagaaaacgaccggtgctccgtttgtagctgccaaaacggatttgtgatgtgcaggcgtatggtttgcgattgcgagaatcctactgtcgatttgttttgctgtcccgagtgtgatccccgactgtcctcccagtgcctgcaccagaacggagagacgttgtataatagtggagatacctgggtgcaaaattgtcagcagtgtaggtgtctccagggcgaggtggactgctggcctttgccatgccctgatgttgagtgcgaatttagtatacttcctgagaatgaatgctgcccaagatgcgtgaccgatccctgccaggccgacaccatccggaatgatattaccaaaacctgcctggacgaaatgaacgtggtcaggttcactggctcatcttggatcaagcatggaaccgaatgtacgctctgccagtgcaagaatgggcatatatgctgctctgttgatccccaatgtttgcaggagctttag

SEQ ID NO: 57102 - DNA, 3203 bp, Artificial Sequence
  derived and/or modified sequence
gtgcttgccttggagaccgcgaggcggatcacgcccctagtccagggtcggagggctgagggggaactttgcagagagaagggtttaaaggaggtcatggaaacgggactgggtgctccgctatttaaagcttggctgctgatctcagtttgggggcttggtgtggacccttccctacagattgacgtcttaacagagttagaacttggggagtccacgaccggagtgcgtcaggtcccggggctgcataatgggacgaaagcctttctctttcaagatactcccagaagcataaaagcatccactgctacagctgaacagttttttcagaagctgagaaataaacatgaatttactattttggtgaccctaaaacagacccacttaaattcaggagttattctctcaattcaccacttggatcacaggtacctggaactggaaagtagtggccatcggaatgaagtcagactgcattaccgctcaggcagtcaccgccctcacacagaagtgtttccttacattttggctgatgacaagtggcacaagctctccttagccatcagtgcttcccatttgattttacacattgactgcaataaaatttatgaaagggtagtagaaaagccctccacagacttgcctctaggcacaacattttggctaggacagagaaataatgcgcatggatattttaagggtataatgcaagatgtccaattacttgtcatgccccagggatttattgctcagtgcccagatcttaatcgcacctgtccaacttgcaatgacttccatggacttgtgcagaaaatcatggagctacaggatattttagccaaaacatcagccaagctgtctcgagctgaacagcgaatgaatagattggatcagtgctattgtgaaaggacttgcaccatgaagggaaccacctaccgagaatttgagtcctggatagacggctgtaagaactgcacatgcctgaatggaaccatccagtgtgaaactctaatctgcccaaatcctgactgcccacttaagtcggctcttgcgtatgtggatggcaaatgctgtaaggaatgcaaatcgatatgccaatttcaaggacgaacctactttgaaggagaaagaaatacagtctattcctcttctggagtatgtgttctctatgagtgcaaggaccagaccatgaaacttgttgagagttcaggctgtccagctttggattgtccagagtctcatcagataaccttgtctcacagctgttgcaaagtttgtaaaggttatgacttttgttctgaaaggcataactgcatggagaattccatctgcagaaatctgaatgacagggctgtttgtagctgtcgagatggttttagggctcttcgagaggataatgcctactgtgaagacatcgatgagtgtgctgaagggcgccattactgtcgtgaaaatacaatgtgtgtcaacaccccgggttcttttatgtgcatctgcaaaactggatacatcagaattgatgattattcatgtacagaacatgatgagtgtatcacaaatcagcacaactgtgatgaaaatgctttatgcttcaacactgttggaggacacaactgtgtttgcaagccgggctatacagggaatggaacgacatgcaaagcattttgcaaagatggctgtaggaatggaggagcctgtattgccgctaatgtgtgtgcctgcccacaaggcttcactggacccagctgtgaaacggacattgatgaatgctctgatggttttgttcaatgtgacagtcgtgctaattgcattaacctgcctggatggtaccactgtgagtgcagagatggctaccatgacaatgggatgttttcaccaagtggagaatcgtgtgaagatattgatgagtgtgggaccgggaggcacagctgtgccaatgataccatttgcttcaatttggatggcggatatgattgtcgatgtcctcatggaaagaattgcacaggggactgcatccatgatggaaaagttaagcacaatggtcagatttgggtgttggaaaatgacaggtgctctgtgtgctcatgtcagaatggattcgttatgtgtcgacggatggtctgtgactgtgagaatcccacagttgatcttttttgctgccctgaatgtgacccaaggcttagtagtcagtgcctccatcaaaatggggaaactttgtataacagtggtgacacctgggtccagaattgtcaacagtgccgctgcttgcaaggggaagttgattgttggcccctgccttgcccagatgtggagtgtgaattcagcattctcccagagaatgagtgctgcccgcgctgtgtcacagacccttgccaggctgacaccatccgcaatgacatcaccaagacttgcctggacgaaatgaatgtggttcgcttcaccgggtcctcttggatcaaacatggcactgagtgtactctctgccagtgcaagaatggccacatctgttgctcagtggatccacagtgccttcaggaactgtgaagttaactgtctcatgggagatttctgttaaaagaatgttctttcattaaaagaccaaaaagaagttaaaacttaaattgggtgatttgtgggcagctaaatgcagctttgttaatagctgagtgaactttcaattatgaaatttgtggagcttgacaaaatcacaaaaggaaaattactggggcaaaattagacctcaagtctgcctctactgtgtctcacatcaccatgtagaagaatgggcgtacagtatataccgtgacatcctgaaccctggatagaaagcctgagcccattggatctgtgaaagcctctagcttcactggtgcagaaaattttcctctagatcagaatcttcaagaatcagttaggttcctcactgcaagaaataaaatgtcaggcagtgaatgaattatattttcagaagtaaagcaaagaagctataacatgttatgtacagtacactctgaaaagaaatctgaaacaagttattgtaatgataaaaataatgcacaggcatggttacttaatattttctaacaggaaaagtcatccctatttccttgttttactgcacttaatattatttggttgaatttgttcagtataagctcgttcttgtgcaaaattaaataaatatttctcttaccttataacac

SEQ ID NO: 57103 - DNA, 2321 bp, Artificial Sequence
  derived and/or modified sequence
attgtctctgcctttacaacagagggagacgatggactgagctgatccgcaccatggagtctcgggtcttactgagaacattctgtttgatcttcggtctcggagcagaccgcgaggcggatcacgcccctagtccagggtcggagggctgagggggaactttgcagagagaagggtttaaaggaggtcatggaaacgggactgggtgctccgctatttaaagcttggctgctgatctcagtttgggggcttggtgtggacccttccctacagattgacgtcttaacagagttagaacttggggagtccacgaccggagtgcgtcaggtcccggggctgcataatgggacgaaagcctttctctttcaagatactcccagaagcataaaagcatccactgctacagctgaacagttttttcagaagctgagaaataaacatgaatttactattttggtgaccctaaaacagacccacttaaattcaggagttattctctcaattcaccacttggatcacaggtacctggaactggaaagtagtggccatcggaatgaagtcagactgcattaccgctcaggcagtcaccgccctcacacagaagtgtttccttacattttggctgatgacaagtggcacaagctctccttagccatcagtgcttcccatttgattttacacattgactgcaataaaatttatgaaagggtagtagaaaagccctccacagacttgcctctaggcacaacattttggctaggacagagaaataatgcgcatggatattttaagggtataatgcaagatgtccaattacttgtcatgccccagggatttattgctcagtgcccagatcttaatcgcacctgtccaacttgcaatgacttccatggacttgtgcagaaaatcatggagctacaggatattttagccaaaacatcagccaagctgtctcgagctgaacagcgaatgaatagattggatcagtgctattgtgaaaggacttgcaccatgaagggaaccacctaccgagaatttgagtcctggatagacggctgtaagaactgcacatgcctgaatggaaccatccagtgtgaaactctaatctgcccaaatcctgactgcccacttaagtcggctcttgcgtatgtggatggcaaatgctgtaaggaatgcaaatcgatatgccaatttcaaggacgaacctactttgaaggagaaagaaatacagtctattcctcttctggagtatgtgttctctatgagtgcaaggaccagaccatgaaacttgttgagagttcaggctgtccagctttggattgtccagagtctcatcagataaccttgtctcacagctgttgcaaagtttgtaaaggttatgacttttgttctgaaaggcataactgcatggagaattccatctgcagaaatctgaatgacagggctgtttgtagctgtcgagatggttttagggctcttcgagaggataatgcctactgtgaagacatcgatgagtgtgctgaagggcgccattactgtcgtgaaaatacaatgtgtgtcaacaccccgggttcttttatgtgcatctgcaaaactggatacatcagaattgatgattattcatgtacagaacatgatgagtgtatcacaaatcagcacaactgtgatgaaaatgctttatgcttcaacactgttggaggacacaactgtgtttgcaagccgggctatacagggaatggaacgacatgcaaagcattttgcaaagatggctgtaggaatggaggagcctgtattgccgctaatgtgtgtgcctgcccacaaggcttcactggacccagctgtgaaacggacattgatgaatgctctgatggttttgttcaatgtgacagtcgtgctaattgcatttgcctggtaccactgtgagtgcagagatggctaccatgacaatgggatgttttcaccaagtggagaatcgtgtgaagatattgatgagtgtgggaccgggaggcacagctgtgccaatgataccatttgcttcaatttggatggcggatatgattgtcgatgtcctcatggaaagaattgcacaggggactgcatccatgatggaaaagttaagcacaatggtcagatttgggtgttggaaaatgacaggtgctctgtgtgctcatgtcagaatggattcgttatgtgtcgacggatggtctgtgactgtgagaatcccacagttgatcttttttgctgccctgaatgtgacccaaggcttagtagtcagtgcctccatcaaaatggggaaactttgtataacagtggtgacacct

SEQ ID NO: 57104 - DNA, 586 bp, Artificial Sequence
  derived and/or modified sequence
gagtggccgcagagctggggctggggaaagggatggctcccgcctcggggcagcatgggctggctggggaagcctcgcttttcccggacccaaagtaggtctggagtgggaagcttggagtaagggggcgggtttggatatggattttttttttttctgtgcttgccttggagaccgcgaggcggatcacgcccctagtccagggtcggagggctgagggggaactttgcagagagaagggtttaaaggaggtcatggaaacgggactgggtgctccgctatttaaagcttggctgctgatctcagtttgggggcttggtgtggacccttccctacagattgacgtcttaacagagttagaacttggggagtccacgaccggagtgcgtcaggtcccggggctgcataatgggacgaaagcctttctctttcaagatactcccagaagcataaaagcatccactgctacagctgaacagttttttcagaagctgagaaataaacatgaatttactattttggtgaccctaaaacagacccacttaaattcaggagttattctctcaattcaccacttggatcacag

SEQ ID NO: 57105 - DNA, 3036 bp, Artificial Sequence
  derived and/or modified sequence
attgtctctgcctttacaacagagggagacgatggactgagctgatccgcaccatggagtctcgggtcttactgagaacattctgtttgatcttcggtctcggagcagaccgcgaggcggatcacgcccctagtccagggtcggagggctgagggggaactttgcagagagaagggtttaaaggaggtcatggaaacgggactgggtgctccgctatttaaagcttggctgctgatctcagtttgggggcttggtgtggacccttccctacagattgacgtcttaacagagttagaacttggggagtccacgaccggagtgcgtcaggtcccggggctgcataatgggacgaaagcctttctctttcaagatactcccagaagcataaaagcatccactgctacagctgaacagttttttcagaagctgagaaataaacatgaatttactattttggtgaccctaaaacagacccacttaaattcaggagttattctctcaattcaccacttggatcacaggtacctggaactggaaagtagtggccatcggaatgaagtcagactgcattaccgctcaggcagtcaccgccctcacacagaagtgtttccttacattttggctgatgacaagtggcacaagctctccttagccatcagtgcttcccatttgattttacacattgactgcaataaaatttatgaaagggtagtagaaaagccctccacagacttgcctctaggcacaacattttggctaggacagagaaataatgcgcatggatattttaagggtataatgcaagatgtccaattacttgtcatgccccagggatttattgctcagtgcccagatcttaatcgcacctgtccaacttgcaatgacttccatggacttgtgcagaaaatcatggagctacaggatattttagccaaaacatcagccaagctgtctcgagctgaacagcgaatgaatagattggatcagtgctattgtgaaaggacttgcaccatgaagggaaccacctaccgagaatttgagtcctggatagacggctgtaagaactgcacatgcctgaatggaaccatccagtgtgaaactctaatctgcccaaatcctgactgcccacttaagtcggctcttgcgtatgtggatggcaaatgctgtaaggaatgcaaatcgatatgccaatttcaaggacgaacctactttgaaggagaaagaaatacagtctattcctcttctggagtatgtgttctctatgagtgcaaggaccagaccatgaaacttgttgagagttcaggctgtccagctttggattgtccagagtctcatcagataaccttgtctcacagctgttgcaaagtttgtaaaggttatgacttttgttctgaaaggcataactgcatggagaattccatctgcagaaatctgaatgacagggctgtttgtagctgtcgagatggttttagggctcttcgagaggataatgcctactgtgaagacatcgatgagtgtgctgaagggcgccattactgtcgtgaaaatacaatgtgtgtcaacaccccgggttcttttatgtgcatctgcaaaactggatacatcagaattgatgattattcatgtacagaacatgatgagtgtatcacaaatcagcacaactgtgatgaaaatgctttatgcttcaacactgttggaggacacaactgtgtttgcaagccgggctatacagggaatggaacgacatgcaaagcattttgcaaagatggctgtaggaatggaggagcctgtattgccgctaatgtgtgtgcctgcccacaaggcttcactggacccagctgtgaaacggacattgatgaatgctctgatggttttgttcaatgtgacagtcgtgctaattgcattaacctgcctggatggtaccactgtgagtgcagagatggctaccatgacaatgggatgttttcaccaagtggagaatcgtgtgaagatattgatgagtgtgggaccgggaggcacagctgtgccaatgataccatttgcttcaatttggatggcggatatgattgtcgatgtcctcatggaaagaattgcacaggggactgcatccatgatggaaaagttaagcacaatggtcagatttgggtgttggaaaatgacaggtgctctgtgtgctcatgtcagaatggattcgttatgtgtcgacggatggtctgtgactgtgagaatcccacagttgatcttttttgctgccctgaatgtgacccaaggcttagtagtcagtgcctccatcaaaatggggaaactttgtataacagtggtgacacctgggtccagaattgtcaacagtgccgctgcttgcaaggggaagttgattgttggcccctgccttgcccagatgtggagtgtgaattcagcattctcccagagaatgagtgctgcccgcgctgtgtcacagacccttgccaggctgacaccatccgcaatgacatcaccaagacttgcctggacgaaatgaatgtggttcgcttcaccgggtcctcttggatcaaacatggcactgagtgtactctctgccagtgcaagaatggccacatctgttgctcagtggatccacagtgccttcaggaactgtgaagttaactgtctcatgggagatttctgttaaaagaatgttctttcattaaaagaccaaaaagaagttaaaacttaaattgggtgatttgtgggcagctaaatgcagctttgttaatagctgagtgaactttcaattatgaaatttgtggagcttgacaaaatcacaaaaggaaaattactggggcaaaattagacctcaagtctgcctctactgtgtctcacatcaccatgtagaagaatgggcgtacagtatataccgtgacatcctgaaccctggatagaaagcctgagcccattggatctgtgaaagcctctagcttcactggtgcagaaaattttcctctagatcagaatcttcaagaatcagttaggttcctcactgcaagaaataaaatgtca

SEQ ID NO: 57106 - DNA, 2448 bp, Artificial Sequence
  derived and/or modified sequence
atggaaaccggcctgggggcaccattattcaaggcgtggctgcttattagcgtctggggcctcggggtcgatccatccctacagatcgacgtcttaaccgagctggagctgggcgaatctaccacaggagtaaggcaggtgccagggctccataatggtactaaggcttttttattccaggatacccccaggagtattaaggcaagcacagctacggctgaacagttttttcagaagctcagaaacaaacacgagttcactatcctggttacattgaagcaaacccatcttaactcaggagtcattttgtctatccaccacttagaccaccgatacctggagctagagtcaagtgggcatcgcaatgaagtacgtctgcactatcgcagtggctctcaccgacctcatactgaagtgttcccttacatcctcgcagatgataagtggcataaactgtccctggcgatcagcgcgtcccacctgatcctgcacatcgattgcaacaagatatacgaaagggtcgtagagaagccatctacagatttgcccttagggactaccttctggctcggccagcgaaataatgcccacggctacttcaagggcattatgcaagatgtacagttgttggtcatgccacagggttttatcgctcaatgtccagatctgaacagaacctgtcctacctgtaatgatttccatgggttggtgcaaaaaatcatggaactccaggacatcctagccaaaacatcggccaagttgtcccgtgccgagcaacggatgaaccgcctggatcagtgttactgtgagcggacctgcaccatgaaaggtacaacttaccgggagtttgagagctggattgatggatgtaagaactgtacttgcctaaacgggaccatccagtgtgagactctgatttgtcctaatccggactgtccactgaagtccgcgctcgcttacgttgatggaaagtgctgcaaggaatgcaaaagcatttgtcagttccaaggcaggacatacttcgagggagaaaggaacactgtctactcgtcatccggagtgtgtgtgttatatgagtgcaaggaccagactatgaagctggtggaatcctcaggatgcccagctctcgattgcccagagtcacaccaaataaccttgagtcatagctgctgtaaagtatgcaagggttacgacttctgtagtgaacgccacaactgtatggaaaactctatttgtcggaacttgaatgatcgagccgtctgctcttgccgggatgggttccgcgcactgcgggaagacaatgcatactgtgaggacatcgatgaatgtgctgaggggaggcattattgtcgtgagaataccatgtgcgtgaacacaccgggatctttcatgtgcatttgcaagaccggctacattaggatcgacgattactcctgtactgagcacgatgaatgcattaccaatcagcacaattgcgacgagaacgctctgtgtttcaacactgtgggcggtcacaactgcgtgtgcaaacccggatataccggtaatggaactacctgtaaggcattttgcaaggatgggtgccgaaacggaggcgcttgcatcgctgctaacgtctgcgcctgcccacaggggtttaccggcccaagctgcgagactgacattgacgagtgcagcgatgggtttgtgcagtgtgattcaagagcaaattgcattaacctgcccggttggtatcactgcgaatgtcgggatggctatcatgacaacggaatgttctcccccagcggggagtcttgtgaagatatcgacgagtgcgggacagggcgacatagctgcgctaatgacacgatctgtttcaacctcgatggcggatacgattgtcgctgcccacacggcaagaattgcacgggggactgtatccacgacggtaaggtgaaacacaacgggcagatatgggtgcttgagaacgaccgctgctcggtctgctcttgtcagaacggctttgttatgtgcagacgtatggtgtgcgactgtgagaatcctaccgttgacttattctgctgtcccgaatgcgatccgaggctgtcgtcccagtgtcttcatcagaacggggagaccttgtacaactcgggcgacacctgggtccagaattgccagcaatgccggtgcttacagggtgaggtcgactgctggccactgccctgcccggacgttgaatgcgaatttagcatcctgccggagaacgaatgctgtccaagatgcgtaaccgatccgtgtcaggctgacacgataaggaacgacattaccaagacatgcctggatgaaatgaatgtcgtgcggttcactggctcatcatggatcaagcatggtactgaatgcacactatgccaatgcaaaaacggtcatatctgttgttccgtagacccccagtgtctgcaggagctttag

SEQ ID NO: 57107 - DNA, 1734 bp, Artificial Sequence
  derived and/or modified sequence
atggaaactggactcggggctccgttgttcaaagcctggctgcttattagtgtgtggggtctgggggtcgacccctctctgcaaatcgatgtcttgaccgaactggaactcggagagtctacaacaggagttaggcaggtccctggactccataatggcacaaaggcattcttatttcaggacacacctcggtccatcaaagcttcaacggccacagcagaacaattcttccagaagttgagaaacaagcacgaattcaccatattggtgaccctcaaacagactcacttgaatagtggggttatcctgtccattcatcacctagaccaccggtacctggaactcgaatcaagcgggcaccggaacgaggtacgcctgcattaccgaagtggatcacaccgaccacacactgaggtttttccgtacatcctggcagatgacaagtggcacaaattgtctctggcgatttcagctagtcatctcatacttcacatagactgcaataagatctacgaaagagtagtggagaaaccctcaacggatctgccactggggaccaccttctggctggggcagcgcaataacgcccacggttacttcaaaggaattatgcaggacgtgcagctactggtgatgccacaggggttcatagcccaatgtcccgacctaaacaggacctgccctacctgtaatgattttcatggattggtgcagaaaatcatggaactgcaagacattctcgctaaaacttccgccaaactcagtcgcgcagaacagcggatgaataggctggatcagtgttattgtgaacggacatgcaccatgaaggggaccacttatcgggaattcgaatcctggatcgatggatgcaagaactgcacatgcctgaacggaactatacagtgcgagacactaatttgtcctaatccagactgcccactgaagagtgctctggcatacgtggatggcaagtgctgcaaagagtgcaaatcgatatgccaatttcaggggagaacatattttgaaggggaacgcaataccgtctactcaagttccggcgtctgcgtcctctacgaatgcaaggaccaaactatgaagctggtggagagttccggctgtcccgcactcgactgtccggagtctcaccagataacactctctcactcctgctgcaaggtctgcaagggctatgatttttgcagcgaacggcacaattgtatggaaaatagtatttgccgaaatctgaatgatcgtgctgtatgctcatgccgcgatggcttccgcgctctgcgggaagacaacgcctattgcgaggatatagacgagtgcgccgaaggaaggcactattgcagggaaaataccatgtgtgtaaacaccccaggcagcttcatgtgcatatgtaagacaggctacattcgcatcgacgactatagctgtaccgagcacgacgagtgtattacgaaccagcacaattgcgatgaaaatgccctctgttttaacacggtcggcggtcataattgcgtgtgcaaacctggctataccggaaacggaaccacgtgtaaagctttctgtaaagacggctgcagaaacggcggagcttgtattgccgctaatgtgtgtgcctgcccacagggattcaccggcccttcatgtgagaccgatatagacgaatgctccgatggctttgtgcagtgtgattccagggcgaactgcatttgcttggtccccttatag

SEQ ID NO: 57108 - DNA, 333 bp, Artificial Sequence
  derived and/or modified sequence
atggagacaggcttgggcgcaccactgtttaaagcctggctgcttatcagcgtctgggggctgggtgtggacccttctctgcagatcgacgttctaacagaattggaattgggggaaagcactaccggagtgcggcaggtccctggcctgcataatggaactaaggcttttttgttccaggatacaccccgatctatcaaggccagtaccgcaaccgctgaacagttctttcaaaagctccgcaacaaacacgagtttactatcctggtgactttgaaacaaacccacctgaactccggggtcatcttgtctatccaccacctggaccactag

SEQ ID NO: 57109 - DNA, 2448 bp, Artificial Sequence
  derived and/or modified sequence
atggagacggggctcggtgctcctctcttcaaagcttggttattaatctcagtttgggggttgggcgtggaccccagcctgcaaattgacgtgctgaccgagttggagcttggcgaatcaaccactggcgtgaggcaggtgcctgggcttcataatggcaccaaagctttcctgttccaggataccccaagaagtataaaggcaagcactgcaacagccgaacagttctttcagaagttgagaaataagcacgagttcaccattctcgtaacattgaagcagacccacctgaattccggtgtgattcttagtatccaccacctcgatcacagatacctggagctcgaatcatccggccatagaaatgaggtgcgattgcattaccgtagcggcagccatcgcccacacactgaggtcttcccttacattctcgctgatgataagtggcacaaactgtcactggcaatctccgccagccatttgatcttacacatcgattgcaataaaatttatgaacgggttgtggagaaaccttccactgacttgccgttgggaacaactttctggctcggacagcggaataacgcacacggctactttaaaggcataatgcaagacgtgcaattactggtaatgcctcagggctttattgcccagtgccctgacctgaacaggacctgcccaacttgcaacgactttcacggcttggtgcagaaaatcatggaactccaggacatcctggctaaaacgtcagccaagcttagcagggcagagcagagaatgaacaggcttgatcagtgttattgcgaaagaacatgtaccatgaaaggaactacttaccgagaattcgaatcttggatcgatgggtgcaagaattgcacctgcttaaatggcacgatacagtgcgaaacattaatctgcccaaacccagactgcccactgaagtcagccctggcgtatgttgatggaaagtgctgcaaggaatgtaaatctatatgtcaatttcagggtagaacttattttgaaggcgaacgtaatactgtgtatagctcaagcggcgtgtgcgtcctgtacgaatgtaaggatcagactatgaaactggtggaatcctctgggtgccctgcgctcgactgtcccgaaagccatcaaattacccttagccactcttgctgcaaagtgtgcaaggggtacgacttctgctcagaaaggcacaactgcatggagaattccatatgtagaaaccttaatgatcgcgcagtatgtagctgcagggacggttttcgtgcactacgtgaggacaacgcctactgcgaagatatcgatgagtgtgccgagggcaggcattactgccgggaaaacacaatgtgtgtgaacacacctggctcctttatgtgcatctgtaagacaggctatattcgtatcgatgactacagctgtactgaacacgatgagtgtattaccaaccaacacaactgcgacgaaaatgctttatgttttaacaccgtaggtgggcacaactgtgtgtgtaagcccggatatactggaaatgggacgacctgtaaagccttctgcaaagacgggtgcaggaatgggggagcctgcatcgcagcaaatgtgtgtgcttgccctcaaggtttcacgggaccctcatgcgagacagacatcgacgaatgctctgacggctttgtgcagtgcgactcgagagccaattgcatcaatctgcctggatggtaccactgcgagtgccgggacggctaccacgacaatggtatgttcagcccaagcggtgagtcgtgcgaagatatcgatgaatgcggcacaggcaggcacagttgcgccaacgataccatctgttttaacctggatgggggatatgattgccggtgccctcacgggaaaaactgtaccggggattgtatccatgacggcaaagtaaagcacaacggccagatctgggttctagagaacgaccgctgttcagtgtgtagttgccaaaatggcttcgtcatgtgcagaagaatggtctgcgactgcgagaaccccacagtagatcttttttgctgtcccgagtgtgaccctcgtctcagttctcaatgtctccaccagaatggcgaaacattgtacaacagtggggatacttgggtgcagaactgccagcaatgtaggtgcttgcagggagaagtggactgctggccactgccctgccctgatgtggaatgtgaattctccatcctacctgaaaacgagtgctgtcccaggtgtgtgaccgatccttgccaagccgataccatcagaaacgacatcaccaagacatgtctggacgaaatgaacgtagtgcgattcactgggtcaagttggatcaagcacggcactgagtgtaccctatgccagtgcaagaatggtcatatctgctgctcagtagaccctcagtgccttcaggaactctag

SEQ ID NO: 57110 - DNA, 2448 bp, Artificial Sequence
  derived and/or modified sequence
atggagaccgggctcggagcccctctattcaaagcctggctgctaattagcgtttggggcctcggagtcgatcctagcctgcagattgatgtactcaccgagcttgagctcggtgaaagtacaacaggggtgcggcaagtgccaggcctgcataatggtacgaaggccttcctgtttcaggacacacctcgttcaatcaaggcttccaccgcaaccgccgagcaattcttccaaaagcttagaaacaaacatgagttcaccatcctggtgacattgaaacagacacacctgaactcaggggtgatactcagcatacatcacttggatcatcgctatcttgaactagaatcctcaggacatcgtaacgaggtgcgcctgcactacagatcaggcagccacagaccgcacactgaggtgttcccctatatcctcgcagatgacaaatggcataagttgtccctggccatctccgcatcccacttgatactccacatagattgtaacaagatttacgagagagtcgtggagaaaccttccacagaccttcctttgggcacaacattctggttgggccagcgcaacaacgcacatggctacttcaaaggaatcatgcaggatgtccaactgttggttatgccccagggctttatcgcacaatgccccgacctgaaccgcacatgccccacctgcaacgattttcacggccttgtccagaaaattatggagttacaggacatcctggccaagacaagcgcaaaattaagccgcgccgaacagcggatgaaccggctggatcagtgttattgtgagagaacctgcacaatgaaaggaactacttaccgggaatttgagtcctggattgacggctgtaagaactgcacttgcctcaatggcaccattcagtgcgaaactctgatttgtccaaatccagattgccccctgaaaagcgcactcgcgtatgtggacggcaaatgctgcaaagagtgtaagtctatctgtcagtttcaggggagaacctactttgagggcgagcggaatacagtgtatagttcttccggcgtctgcgtcttgtacgagtgcaaagaccaaacaatgaagctcgtggagtcttctggctgcccagctctcgactgccccgagagccatcagattaccttgagccactcttgctgtaaggtgtgtaagggctacgacttctgttcggaaaggcacaattgtatggagaattcaatttgtagaaaccttaacgacagagcggtttgctcctgtagggacggctttagagcattgcgggaagataatgcttattgcgaagatattgacgaatgtgctgagggtcggcactactgccgggagaacacaatgtgtgtcaacacgcccgggtcttttatgtgcatatgcaaaaccggttatatccgcatcgacgactacagctgcaccgaacacgacgaatgtatcacgaaccaacacaactgcgatgagaatgccctctgcttcaatacagtcggcggccacaattgcgtatgcaaacccggttatacaggcaacggaactacgtgtaaggccttttgcaaagacggttgtcggaacgggggtgcctgtatcgccgccaacgtctgcgcctgcccccagggctttactggacctagctgcgaaactgacatcgacgagtgctcagacggcttcgtgcagtgtgatagtagggccaattgcatcaatctcccaggctggtaccactgtgagtgccgcgacggttaccatgacaatggaatgttctccccctctggagagagctgcgaggacatcgatgaatgcggtacaggcaggcattcctgtgcaaatgacaccatatgcttcaatctggatggaggctacgattgccgctgccctcacggcaaaaattgcactggggactgtattcacgacggaaaagtcaagcataacggtcagatatgggtgcttgaaaacgatcgatgctctgtctgttcatgccagaatggattcgtgatgtgtcggcgaatggtttgcgactgcgaaaaccccaccgtagacctattctgttgccctgagtgcgatccaaggttatcttctcagtgcctgcaccaaaacggcgagacactgtacaactctggagatacatgggttcaaaattgccagcagtgcagatgcttacagggtgaagtggattgctggcccctgccttgccccgatgtggaatgtgaattttcaattctgcctgaaaatgagtgctgtccccgttgtgttacagatccgtgtcaagctgacaccatcaggaacgacatcaccaaaacatgtctcgacgaaatgaacgtggtcaggtttaccggtagttcgtggataaaacacggaacagaatgcaccctctgtcagtgtaaaaatggacacatatgttgttcagtggatccccaatgccttcaggaactgtag

SEQ ID NO: 57111 - DNA, 1734 bp, Artificial Sequence
  derived and/or modified sequence
atggagacagggctaggggctccactgttcaaggcatggctattgattagcgtctggggactgggcgtggacccctccttacaaatagacgtcctgacagagctggagctgggcgaatccacgactggggtacgtcaggttcccgggcttcataatggaacaaaagccttcctgtttcaggacacgccaagatcgataaaggcctcgacagccacagcggaacagttctttcagaaactcagaaacaaacacgagttcacgatactggtcaccttaaagcagactcacctaaattcgggcgtcatattgtcaattcaccatctcgaccacaggtatctggagttggagtctagcgggcacaggaatgaagtacgtctgcattacaggagcggatcccaccgaccccacactgaagtcttcccatacattctcgcggacgataagtggcataagctgagcctggctatttccgcatcccatctgatcctgcacatcgattgcaataagatttacgaaagagtagttgagaagccctcaacagacctgcctcttggcactacgttttggttgggccagcgcaacaacgcacacgggtatttcaaaggaatcatgcaggatgttcaacttttggtaatgccccagggctttatcgcccagtgccccgatttaaatcgaacttgtcccacatgtaatgactttcatggcttggtacagaaaatcatggagcttcaggacatacttgccaaaacttcagcaaagcttagcagagcagagcagcgcatgaaccggctggaccagtgttattgtgagcgaacatgtaccatgaaaggtaccacataccgggaattcgagagctggatcgacgggtgtaagaactgtacatgcctcaacggtacaatacagtgcgaaacacttatatgcccgaacccagactgccctttgaaatctgcactcgcctacgtggatgggaagtgttgcaaggaatgtaaatcgatctgccagtttcaggggcgcacctactttgagggagagcgcaacactgtatattcgtcctccggcgtgtgcgtactctatgaatgtaaggatcaaacgatgaaattggttgaaagtagcgggtgcccagcattagactgccccgagagccatcagatcacattaagtcactcgtgttgtaaggtgtgcaagggctatgacttctgctccgagaggcataactgtatggagaattccatctgcaggaacttgaatgatagggctgtttgcagctgcagggacggctttcgggccctcagagaagataatgcttattgcgaagacatagatgagtgtgccgaaggtcgacattattgtagggagaacacgatgtgcgtgaacaccccaggcagcttcatgtgtatttgcaagacgggatacatccgcatcgatgactactcctgtaccgagcacgacgaatgtataacaaaccagcataattgtgatgaaaatgctctatgctttaacactgtcggtgggcataattgcgtctgcaaaccggggtacaccggaaatggaactacctgtaaggcattctgtaaggatggctgtaggaatggtggcgcctgcatcgcagccaacgtatgtgcgtgcccccagggctttactgggccgagctgtgagacggacatcgacgaatgcagcgacggttttgtgcagtgcgattccagggccaactgcatatgcttagtgccgctctag

SEQ ID NO: 57112 - DNA, 333 bp, Artificial Sequence
  derived and/or modified sequence
atggagaccggattaggcgctccgttgtttaaagcttggctactcatatcagtgtggggcttgggagtcgatccgtcgctgcaaatcgatgtgctgacagagctagagctgggcgagagtactaccggcgttcgtcaagttccaggactccataacggcacaaaagcgttcctgtttcaagatacccctcgctctatcaaagcatctactgccactgctgaacagttcttccagaagctcagaaataaacacgagtttacaatccttgtcaccctgaaacaaacacatcttaacagcggagtaatcttgagcatccaccacctcgatcactag

SEQ ID NO: 57113 - DNA, 2448 bp, Artificial Sequence
  derived and/or modified sequence
atggaaaccggtttgggcgcaccgctatttaaggcctggctgcttatctctgtatggggactgggcgtggatccatctttacaaatagacgtactgaccgagctcgaattaggagaatcaacaacaggggtcaggcaggtccctggactgcataacggtaccaaagcttttctgtttcaagatacgcctaggagtataaaagcatctactgccactgcagaacaattctttcaaaaactgcggaacaagcacgagtttaccatactggtgaccctcaaacagacccacctcaatagtggggtgatcttgagtattcatcaccttgatcatcgttatctggagttagagagctcgggccaccggaatgaagtcagactgcactaccgttccggaagccatagaccccacactgaagtcttcccctacattcttgccgatgataaatggcacaaactctcactcgctataagcgcctcccatctgattttgcatatcgattgcaacaaaatatatgagcgagtggtggaaaaaccctccacggacttgccactcgggactacattttggctgggacagcggaacaacgcccatggctacttcaagggtattatgcaggatgtgcagttattagtcatgccgcagggatttattgctcagtgtccagatctcaatagaacatgcccaacctgtaatgactttcacggtttggtccaaaaaataatggaactgcaggacattctggccaaaacctccgcaaagttgtctcgcgcagagcagcgtatgaatcggttggatcagtgttactgtgagaggacatgtacaatgaagggcacaacatatagagaattcgaaagctggattgatggctgcaaaaattgtacatgcctaaacgggaccatccagtgcgaaactcttatatgccccaacccagattgccctctgaaatcagccttggcttatgtagatggcaaatgttgtaaggaatgtaagtctatctgtcaatttcaaggccgaacctacttcgaaggggagaggaatactgtttacagttcgagtggggtgtgcgtgctatacgagtgcaaggatcaaacaatgaaattagttgagtctagcgggtgtccagccttggactgtcctgagagccatcagattacccttagtcactcatgctgcaaggtatgtaaaggctatgacttctgctctgagcgccacaattgtatggagaactcaatctgcaggaacctcaacgaccgcgcggtttgctcctgcagagacggtttccgagctctgagggaagacaatgcctattgtgaagatatcgatgaatgcgccgagggacgacattattgccgagagaatacaatgtgtgtgaacacgcctggctcttttatgtgtatctgtaaaactggttatatacgaatagatgactacagttgcactgaacatgacgaatgcattaccaatcagcataattgcgacgaaaacgctctgtgttttaataccgtcggcggccataattgcgtttgtaagcccggctacactgggaacggcaccacctgcaaggcgttctgcaaggacggttgccgcaacggaggcgcatgtatcgctgccaatgtgtgtgcctgtccacaggggtttacgggcccttcctgcgagacagacatcgatgagtgctctgacggattcgtgcagtgtgattcccgagctaattgcataaatctgccggggtggtaccactgcgagtgcagagatggttatcacgataacggcatgtttagcccatctggggaaagctgcgaggatatagatgaatgcgggacaggaagacattcctgtgcaaacgatactatatgctttaatctggacggaggatacgattgcagatgccctcatggcaagaactgtaccggagactgcattcatgatggcaaagttaaacacaacggacagatctgggttctggagaacgataggtgctcagtatgttcttgccagaatggcttcgtcatgtgccgtagaatggtctgtgactgtgagaatcccactgtggacctgttttgttgcccagagtgcgatcccagactgagctctcagtgtctccatcagaacggcgaaacactttacaattccggtgatacttgggtgcagaactgccaacagtgtcgttgcttgcaaggggaggtagattgttggcccctaccctgtccggatgtggagtgcgagttttcgattctacctgagaatgaatgctgccctcgctgcgtcacagacccttgccaggccgacacgatcagaaacgatattaccaagacttgccttgacgaaatgaatgtggtgcgtttcactgggagctcttggatcaagcacggaactgaatgcacactgtgccaatgtaaaaatggccacatctgctgtagcgtggacccacaatgcttacaggaactctag

SEQ ID NO: 57114 - DNA, 2448 bp, Artificial Sequence
  derived and/or modified sequence
atggaaaccggcctcggtgcccccttgttcaaagcttggctactgattagtgtttggggcctcggcgtggacccgtctctccagattgacgtactgacagaactcgaactgggtgaatcgactacaggagtcagacaggttcctggattgcataatgggaccaaggcctttctctttcaggatacaccacgctctatcaaagcttccacggcaaccgcggaacaattttttcaaaaattaagaaacaagcatgaatttactattttggtcaccctgaagcagacccacttgaactctggggtaatactttcaatacatcaccttgaccaccgctacctggagctcgaatcttccggacacagaaacgaggtcagactccactacagatctggttcccaccggccccacacagaagtcttcccctatatactggctgatgacaagtggcataagttgagtctagccatctcggcctcacacttgatcttgcatatcgactgcaacaaaatatacgagagagttgtcgagaagccatccaccgatcttccattgggcacaacattctggttgggtcagcgcaacaatgcacacggatacttcaagggaataatgcaggatgtccagctgctggttatgcctcagggttttattgcgcagtgtccagatctcaacaggacatgcccaacgtgcaacgattttcatggattggtccaaaaaataatggaactccaggacatcctggcaaaaacgagcgctaaactgtcaagagcagaacaaaggatgaaccggttagaccagtgttactgcgaaaggacttgcacaatgaagggaaccacatatagagaatttgaatcttggatcgatggatgcaaaaactgcacatgcctgaacggcactatccagtgcgagactctaatttgcccaaatcccgactgcccattaaaatccgccctcgcttatgtcgatggcaaatgttgcaaggaatgtaagagtatctgtcagttccaaggacggacgtacttcgaaggggaaagaaacaccgtttacagttcttccggggtctgtgtcctgtacgagtgtaaagaccaaaccatgaaattagttgaatccagtggttgccccgctttggactgcccggagtctcaccagatcactctaagccattcgtgttgtaaggtatgtaaggggtatgatttttgctccgaacgccacaattgtatggagaacagcatttgtaggaaccttaatgatagagcggtatgttcatgtcgggacggtttccgggcactcagagaggacaatgcatactgtgaggacatcgatgaatgcgctgaaggacggcactactgcagggaaaatacaatgtgcgtgaataccccaggatcgtttatgtgcatttgtaagactggctacattaggatcgacgactatagttgtactgagcatgatgaatgcataaccaatcaacacaactgcgatgaaaatgctctttgctttaatacagttggtgggcacaattgtgtgtgtaagccgggttacaccggcaatggaactacatgtaaagcattttgtaaagacggatgccgaaatggcggggcctgcatagctgctaatgtgtgcgcttgcccacagggcttcaccggcccaagttgcgaaaccgatatcgatgagtgttcagacgggttcgtgcaatgtgattctcgggccaattgtatcaatctgccaggatggtatcactgtgagtgtagggatggctaccacgataacggaatgttcagtccttcaggagagtcttgtgaggatatagacgagtgcggaactggccgtcatagctgtgctaatgatacaatctgctttaatttagacggcggatatgattgtcgctgcccccatggaaagaattgtactggcgactgtatccacgatggcaaagtgaaacacaacggacagatatgggtcttagagaacgaccgctgctcagtgtgttcctgtcagaacggattcgtaatgtgccgcagaatggtgtgtgactgtgaaaacccaaccgtggacctgttttgctgtcccgagtgcgatcccagactgtcctcccaatgcctgcaccaaaacggcgagacactgtacaactctggagatacatgggttcaaaattgccagcagtgcagatgcttacagggtgaagtggattgctggcccctgccttgccccgatgtggaatgtgaattttcaattctgcctgaaaatgagtgctgtccccgttgtgttacagatccgtgtcaagctgacaccatcaggaacgacatcaccaaaacatgtctcgacgaaatgaacgtggtcaggtttaccggtagttcgtggataaaacacggaacagaatgcaccctctgtcagtgtaaaaatggccacatatgttgctccgtagacccccaatgcctccaagaactgtag

SEQ ID NO: 57115 - DNA, 1734 bp, Artificial Sequence
  derived and/or modified sequence
atggaaaccggactgggcgcccccctgttcaaagcatggttactcatctctgtatggggactcggagttgacccttccttgcagatcgacgtgctcactgagctggaacttggagagtccacaaccggggtaagacaagttcctggtctgcacaatggcacgaaggcctttctcttccaagataccccccgatcaatcaaagcatcaacggctaccgccgagcaattttttcagaaactgcgcaacaagcacgaatttactatactggtaaccttgaaacaaacacacctgaatagcggtgttattttatccatccaccatctggaccacagatacctcgaactggagtcctctggacatcggaacgaagtgcgcctgcattatagaagcggctctcaccgacctcacaccgaagtatttccatatatcttagctgacgacaaatggcataaactgagcctggccatctctgcatcccatttgattttgcatatcgattgtaataaaatctacgagcgagtggtcgaaaaaccctccaccgacctaccccttggcacaacgttctggcttggccagcggaacaatgctcacggatacttcaagggaattatgcaagacgttcagctgctggtgatgccgcagggatttattgctcagtgccccgacctgaatcggacgtgccccacttgtaatgactttcatggcctggtccaaaaaatcatggagctgcaggacatactggctaagacctctgccaaactgtctcgtgccgaacaacggatgaaccgccttgatcagtgctattgtgagcggacatgtaccatgaagggcactacatacagagaattcgagagctggattgatggctgtaaaaattgtacctgtttaaatggaactatccaatgtgaaaccttgatatgtcctaaccctgattgtccgctcaaatccgctctggcgtacgtcgatgggaagtgctgtaaggaatgtaagtcaatctgccagttccagggaagaacctatttcgaaggcgagaggaacactgtatactcatcctcgggcgtgtgcgtgctctatgaatgcaaagatcaaactatgaaactggttgaaagtagcgggtgcccagccctggactgtcctgagagccaccaaatcactctgtcccattcgtgttgtaaggtgtgtaaaggatatgatttctgttccgagagacataattgtatggagaactccatatgcaggaacctgaacgacagagccgtctgctcctgcagagatgggtttagggctttgagagaagataacgcttactgcgaagatatcgatgaatgcgcagagggacgccactactgtagagaaaacacaatgtgcgtaaacaccccaggcagtttcatgtgtatctgcaaaactggctatattcggatcgatgactattcttgtaccgaacatgatgaatgcatcactaatcaacacaactgcgatgagaacgcgctgtgctttaacacagtcggtggccataattgcgtttgtaaaccagggtatactgggaatggcacaacatgtaaggcattctgtaaggacggatgccgaaatggtggtgcttgtattgcggccaatgtgtgcgcatgccctcaaggattcacaggacccagttgcgaaactgacatcgacgaatgttcagacggattcgtgcagtgtgatagtcgcgcaaactgtatttgccttgtgccactctag

SEQ ID NO: 57116 - DNA, 333 bp, Artificial Sequence
  derived and/or modified sequence
atggagaccggattaggcgctccgttgtttaaagcttggctactcatatcagtgtggggcttgggagtcgatccgtcgctgcaaatcgatgtgctgacagagctagagctgggcgagagtactaccggcgttcgtcaagttccaggactccataacggcacaaaagcgttcctgtttcaagatacccctcgctctatcaaagcatctactgccactgctgaacagttcttccagaagctcagaaataaacacgagtttacaatccttgtcaccctgaaacaaacacatcttaacagcggagtaatcctgtccattcaccaccttgaccattag

SEQ ID NO: 57117 - DNA, 2448 bp, Artificial Sequence
  derived and/or modified sequence
atggaaactggtctcggtgctcccctgtttaaagcctggttgttgatctccgtatggggcctcggcgttgatccatctttacagattgacgtactcaccgagctggaactgggtgaatccacaacaggggtgcgtcaggtgcctggtcttcataatgggactaaggcttttctgttccaggataccccaaggtctatcaaagctagcacggcaactgctgaacagttctttcaaaaactgcgaaacaaacatgaatttactatcctagtcactctcaagcaaacacacctcaactctggggtcatcctgagtattcatcaccttgatcaccgctacctggaactggaatcctctggccaccggaacgaggtgcgattgcactaccggagcggatcgcacagaccacatactgaagtgtttccctacatcctggcggacgataaatggcacaagctttctctggctatcagcgcttcccacttaatcctgcacatcgattgtaacaaaatttacgagagagttgttgaaaagccttccacagacctaccactgggtacaaccttctggcttggtcaacgcaacaatgcccacggatatttcaaaggcatcatgcaagatgtccagcttctcgtcatgccgcagggcttcattgctcaatgtccagacctaaacagaacatgtcctacttgtaacgattttcatgggttggtccagaagatcatggagctgcaagacatcttagccaagacaagcgctaaactctcccgtgccgagcagaggatgaacagattggaccaatgttattgcgaacgaacttgtaccatgaaaggtaccacatatcgggaatttgagtcttggatcgatggctgtaaaaactgtacatgcttgaatgggacaatccagtgcgagaccctgatatgcccaaacccagactgccctctcaagagcgctcttgcatacgtggacggtaagtgttgcaaggaatgtaagtctatctgtcagttccagggtaggacgtacttcgaaggggagagaaataccgtttatagttcctccggagtgtgcgtcctgtatgagtgtaaagaccaaactatgaagctagtcgagtcttccggatgtccagctttggactgccctgagtcacatcaaataactctttctcattcttgttgtaaagtttgtaaaggctatgatttctgctccgagaggcacaactgcatggagaattctatttgcagaaaccttaacgatagggccgtttgctcatgtagagatggattcagggccttaagagaggataacgcctactgtgaagatattgacgaatgcgctgaaggcaggcactattgcagagagaacacaatgtgcgtgaatactcccggatcttttatgtgcatctgcaaaactggatatataagaatcgacgattactcgtgcaccgaacacgacgagtgcattaccaaccaacacaactgcgacgagaacgcgctttgttttaacaccgtcggcggccataattgtgtttgtaaaccaggctacaccgggaatggaaccacctgcaaagcattttgtaaggacggatgccggaacgggggtgcctgcatagctgctaatgtatgcgcctgtcctcaggggttcacggggcctagttgcgagacggatatcgacgaatgttcagatggatttgtccaatgtgatagccgagctaattgtattaacttgcccgggtggtaccactgcgaatgtagggacggttaccacgataacgggatgttcagcccctccggcgaatcctgcgaagatatcgacgagtgcggaaccggccggcattcatgtgccaatgatacaatctgctttaatctggacggaggctacgactgtaggtgtccacacggaaagaattgcacaggcgactgtatacatgatggaaaagtgaagcacaatggacagatttgggtactggaaaacgaccgctgttctgtgtgctcctgtcagaatgggtttgtgatgtgtagaagaatggtctgcgactgcgagaatcccacagtcgatctgttctgctgtccagagtgtgaccctagactctcttctcaatgcctgcaccaaaacggagaaacactatacaacagcggggacacttgggttcaaaattgtcaacagtgccgttgcttacagggtgaggttgactgctggcctttgccatgtcctgacgtggagtgcgagttctccatcctgccagagaatgaatgttgtcctagatgcgtgactgacccttgccaggccgacacaatccgaaacgatataaccaaaacgtgcctggacgaaatgaacgtggttcggtttacaggctcaagttggattaaacacggaacggaatgtactttatgccaatgcaaaaatggtcatatatgttgttccgtagatccacaatgccttcaagaactctag

SEQ ID NO: 57118 - DNA, 2448 bp, Artificial Sequence
  derived and/or modified sequence
atggagaccggcctgggcgcccccctgttcaaggcctggctgctgatcagcgtgtggggcctgggcgtggaccccagcctgcagatcgacgtgctgaccgagctggagctgggcgagagcaccaccggcgtgagacaggtgcccggcctgcacaacggcaccaaggccttcctgttccaggacacccccagaagcatcaaggccagcaccgccaccgccgagcagttcttccagaagctgagaaacaagcacgagttcaccatcctggtgaccctgaagcagacccacctgaacagcggcgtgatcctgagcatccaccacctggaccacagatacctggagctggagagcagcggccacagaaacgaggtgagactgcactacagaagcggcagccacagaccccacaccgaggtgttcccctacatcctggccgacgacaagtggcacaagctgagcctggccatcagcgccagccacctgatcctgcacatcgactgcaacaagatctacgagagagtggtggagaagcccagcaccgacctgcccctgggcaccaccttctggctgggccagagaaacaacgcccacggctacttcaagggcatcatgcaggacgtgcagctgctggtgatgccccagggcttcatcgcccagtgccccgacctgaacagaacctgccccacctgcaacgacttccacggcctggtgcagaagatcatggagctgcaggacatcctggccaagaccagcgccaagctgagcagagccgagcagagaatgaacagactggaccagtgctactgcgagagaacctgcaccatgaagggcaccacctacagagagttcgagagctggatcgacggctgcaagaactgcacctgcctgaacggcaccatccagtgcgagaccctgatctgccccaaccccgactgccccctgaagagcgccctggcctacgtggacggcaagtgctgcaaggagtgcaagagcatctgccagttccagggcagaacctacttcgagggcgagagaaacaccgtgtacagcagcagcggcgtgtgcgtgctgtacgagtgcaaggaccagaccatgaagctggtggagagcagcggctgccccgccctggactgccccgagagccaccagatcaccctgagccacagctgctgcaaggtgtgcaagggctacgacttctgcagcgagagacacaactgcatggagaacagcatctgcagaaacctgaacgacagagccgtgtgcagctgcagagacggcttcagagccctgagagaggacaacgcctactgcgaggacatcgacgagtgcgccgagggcagacactactgcagagagaacaccatgtgcgtgaacacccccggcagcttcatgtgcatctgcaagaccggctacatcagaatcgacgactacagctgcaccgagcacgacgagtgcatcaccaaccagcacaactgcgacgagaacgccctgtgcttcaacaccgtgggcggccacaactgcgtgtgcaagcccggctacaccggcaacggcaccacctgcaaggccttctgcaaggacggctgcagaaacggcggcgcctgcatcgccgccaacgtgtgcgcctgcccccagggcttcaccggccccagctgcgagaccgacatcgacgagtgcagcgacggcttcgtgcagtgcgacagcagagccaactgcatcaacctgcccggctggtaccactgcgagtgcagagacggctaccacgacaacggcatgttcagccccagcggcgagagctgcgaggacatcgacgagtgcggcaccggcagacacagctgcgccaacgacaccatctgcttcaacctggacggcggctacgactgcagatgcccccacggcaagaactgcaccggcgactgcatccacgacggcaaggtgaagcacaacggccagatctgggtgctggagaacgacagatgcagcgtgtgcagctgccagaacggcttcgtgatgtgcagaagaatggtgtgcgactgcgagaaccccaccgtggacctgttctgctgccccgagtgcgaccccagactgagcagccagtgcctgcaccagaacggcgagaccctgtacaacagcggcgacacctgggtgcagaactgccagcagtgcagatgcctgcagggcgaggtggactgctggcccctgccctgccccgacgtggagtgcgagttcagcatcctgcccgagaacgagtgctgccccagatgcgtgaccgacccctgccaggccgacaccatcagaaacgacatcaccaagacctgcctggacgagatgaacgtggtgagattcaccggcagcagctggatcaagcacggcaccgagtgcaccctgtgccagtgcaagaacggccacatctgctgcagcgtggacccccagtgcctgcaggagctgtag

SEQ ID NO: 57119 - DNA, 1734 bp, Artificial Sequence
  derived and/or modified sequence
atggagaccggcctgggcgcccccctgttcaaggcctggctgctgatcagcgtgtggggcctgggcgtggaccccagcctgcagatcgacgtgctgaccgagctggagctgggcgagagcaccaccggcgtgagacaggtgcccggcctgcacaacggcaccaaggccttcctgttccaggacacccccagaagcatcaaggccagcaccgccaccgccgagcagttcttccagaagctgagaaacaagcacgagttcaccatcctggtgaccctgaagcagacccacctgaacagcggcgtgatcctgagcatccaccacctggaccacagatacctggagctggagagcagcggccacagaaacgaggtgagactgcactacagaagcggcagccacagaccccacaccgaggtgttcccctacatcctggccgacgacaagtggcacaagctgagcctggccatcagcgccagccacctgatcctgcacatcgactgcaacaagatctacgagagagtggtggagaagcccagcaccgacctgcccctgggcaccaccttctggctgggccagagaaacaacgcccacggctacttcaagggcatcatgcaggacgtgcagctgctggtgatgccccagggcttcatcgcccagtgccccgacctgaacagaacctgccccacctgcaacgacttccacggcctggtgcagaagatcatggagctgcaggacatcctggccaagaccagcgccaagctgagcagagccgagcagagaatgaacagactggaccagtgctactgcgagagaacctgcaccatgaagggcaccacctacagagagttcgagagctggatcgacggctgcaagaactgcacctgcctgaacggcaccatccagtgcgagaccctgatctgccccaaccccgactgccccctgaagagcgccctggcctacgtggacggcaagtgctgcaaggagtgcaagagcatctgccagttccagggcagaacctacttcgagggcgagagaaacaccgtgtacagcagcagcggcgtgtgcgtgctgtacgagtgcaaggaccagaccatgaagctggtggagagcagcggctgccccgccctggactgccccgagagccaccagatcaccctgagccacagctgctgcaaggtgtgcaagggctacgacttctgcagcgagagacacaactgcatggagaacagcatctgcagaaacctgaacgacagagccgtgtgcagctgcagagacggcttcagagccctgagagaggacaacgcctactgcgaggacatcgacgagtgcgccgagggcagacactactgcagagagaacaccatgtgcgtgaacacccccggcagcttcatgtgcatctgcaagaccggctacatcagaatcgacgactacagctgcaccgagcacgacgagtgcatcaccaaccagcacaactgcgacgagaacgccctgtgcttcaacaccgtgggcggccacaactgcgtgtgcaagcccggctacaccggcaacggcaccacctgcaaggccttctgcaaggacggctgcagaaacggcggcgcctgcatcgccgccaacgtgtgcgcctgcccccagggcttcaccggccccagctgcgagaccgacatcgacgagtgcagcgacggcttcgtgcagtgcgacagcagagccaactgcatctgcctggtgcccctgtag

SEQ ID NO: 57120 - DNA, 333 bp, Artificial Sequence
  derived and/or modified sequence
atggagaccggcctgggcgcccccctgttcaaggcctggctgctgatcagcgtgtggggcctgggcgtggaccccagcctgcagatcgacgtgctgaccgagctggagctgggcgagagcaccaccggcgtgagacaggtgcccggcctgcacaacggcaccaaggccttcctgttccaggacacccccagaagcatcaaggccagcaccgccaccgccgagcagttcttccagaagctgagaaacaagcacgagttcaccatcctggtgaccctgaagcagacccacctgaacagcggcgtgatcctgagcatccaccacctggaccactag

SEQ ID NO: 57121 - protein, 839 aa, Artificial Sequence
  derived and/or modified sequence
MSIRRLLILILKIGRRWTELIRTMESRVLLRTFCLIFGLGAVWGLGVDPSLQIDVLTELELGESTTGVRQVPGLHNGTKAFLFQDTPRSIKASTATAEQFFQKLRNKHEFTILVTLKQTHLNSGVILSIHHLDHRYLELESSGHRNEVRLHYRSGSHRPHTEVFPYILADDKWHKLSLAISASHLILHIDCNKIYERVVEKPSTDLPLGTTFWLGQRNNAHGYFKGIMQDVQLLVMPQGFIAQCPDLNRTCPTCNDFHGLVQKIMELQDILAKTSAKLSRAEQRMNRLDQCYCERTCTMKGTTYREFESWIDGCKNCTCLNGTIQCETLICPNPDCPLKSALAYVDGKCCKECKSICQFQGRTYFEGERNTVYSSSGVCVLYECKDQTMKLVESSGCPALDCPESHQITLSHSCCKVCKGYDFCSERHNCMENSICRNLNDRAVCSCRDGFRALREDNAYCEDIDECAEGRHYCRENTMCVNTPGSFMCICKTGYIRIDDYSCTEHDECITNQHNCDENALCFNTVGGHNCVCKPGYTGNGTTCKAFCKDGCRNGGACIAANVCACPQGFTGPSCETDIDECSDGFVQCDSRANCINLPGWYHCECRDGYHDNGMFSPSGESCEDIDECGTGRHSCANDTICFNLDGGYDCRCPHGKNCTGDCIHDGKVKHNGQIWVLENDRCSVCSCQNGFVMCRRMVCDCENPTVDLFCCPECDPRLSSQCLHQNGETLYNSGDTWVQNCQQCRCLQGEVDCWPLPCPDVECEFSILPENECCPRCVTDPCQADTIRNDITKTCLDEMNVVRFTGSSWIKHGTECTLCQCKNGHICCSVDPQCLQEL

SEQ ID NO: 57122 - protein, 816 aa, Artificial Sequence
  derived and/or modified sequence
MESRVLLRTFCLIFGLGAVWGLGVDPSLQIDVLTELELGESTTGVRQVPGLHNGTKAFLFQDTPRSIKASTATAEQFFQKLRNKHEFTILVTLKQTHLNSGVILSIHHLDHRYLELESSGHRNEVRLHYRSGSHRPHTEVFPYILADDKWHKLSLAISASHLILHIDCNKIYERVVEKPSTDLPLGTTFWLGQRNNAHGYFKGIMQDVQLLVMPQGFIAQCPDLNRTCPTCNDFHGLVQKIMELQDILAKTSAKLSRAEQRMNRLDQCYCERTCTMKGTTYREFESWIDGCKNCTCLNGTIQCETLICPNPDCPLKSALAYVDGKCCKECKSICQFQGRTYFEGERNTVYSSSGVCVLYECKDQTMKLVESSGCPALDCPESHQITLSHSCCKVCKGYDFCSERHNCMENSICRNLNDRAVCSCRDGFRALREDNAYCEDIDECAEGRHYCRENTMCVNTPGSFMCICKTGYIRIDDYSCTEHDECITNQHNCDENALCFNTVGGHNCVCKPGYTGNGTTCKAFCKDGCRNGGACIAANVCACPQGFTGPSCETDIDECSDGFVQCDSRANCINLPGWYHCECRDGYHDNGMFSPSGESCEDIDECGTGRHSCANDTICFNLDGGYDCRCPHGKNCTGDCIHDGKVKHNGQIWVLENDRCSVCSCQNGFVMCRRMVCDCENPTVDLFCCPECDPRLSSQCLHQNGETLYNSGDTWVQNCQQCRCLQGEVDCWPLPCPDVECEFSILPENECCPRCVTDPCQADTIRNDITKTCLDEMNVVRFTGSSWIKHGTECTLCQCKNGHICCSVDPQCLQEL

SEQ ID NO: 57123 - protein, 321 aa, Artificial Sequence
  derived and/or modified sequence
MESRVLLRTFCLIFGLGAVWGLGVDPSLQIDVLTELELGESTTGVRQVPGLHNGTKAFLFQDTPRSIKASTATAEQFFQKLRNKHEFTILVTLKQTHLNSGVILSIHHLDHRYLELESSGHRNEVRLHYRSGSHRPHTEVFPYILADDKWHKLSLAISASHLILHIDCNKIYERVVEKPSTDLPLGTTFWLGQRNNAHGYFKGIMQDVQLLVMPQGFIAQCPDLNRTCPTCNDFHGLVQKIMELQDILAKTSAKLSRAEQRMNRLDQCYCERTCTMKGTTYREFESWIDGCKNCTCLNGTIQCETLICPNPDCPLKSALAY

SEQ ID NO: 57124 - DNA, 500 bp, Artificial Sequence
  derived and/or modified sequence
acttctttggatgctattttgaggatagactgaagggaatgatgatagcagggagaccagttaggatgatgacttagaccatggcagttgtgggtggagatggtaactgccagattctgtctatatattgagaagtagcaggcaggatgtactgagcaattggatgtgggatgtgagagaaatgactccaaggtttttggcctgagcaatcagaaggatccatctaacatttactgaaataaggaagatgctttattcaatctaaaagtgaaaaaagaaccttttagacattattattataaaatgtctataagaagacttctcattttaatcctcaaaatcactctggttatggattcctataagtgtatcctgttgaagtttgctgagctccttgaatctagggagacgatggactgagctgatccgcaccatggagtctcgggtcttactgagaacattctgtttgatcttcggtctcggagcagtttgggggcttg

SEQ ID NO: 57125 - DNA, 1053 bp, Artificial Sequence
  derived and/or modified sequence
aaaccacatgtgaactgaagctgtcaggttccacaaaggcagaagtactctctgaaaagagggagacgatggactgagctgatccgcaccatggagtctcgggtcttactgagaacattctgtttgatcttcggtctcggagcagtttgggggcttggtgtggacccttccctacagattgacgtcttaacagagttagaacttggggagtccacgaccggagtgcgtcaggtcccggggctgcataatgggacgaaagcctttctctttcaagatactcccagaagcataaaagcatccactgctacagctgaacagttttttcagaagctgagaaataaacatgaatttactattttggtgaccctaaaacagacccacttaaattcaggagttattctctcaattcaccacttggatcacaggtacctggaactggaaagtagtggccatcggaatgaagtcagactgcattaccgctcaggcagtcaccgccctcacacagaagtgtttccttacattttggctgatgacaagtggcacaagctctccttagccatcagtgcttcccatttgattttacacattgactgcaataaaatttatgaaagggtagtagaaaagccctccacagacttgcctctaggcacaacattttggctaggacagagaaataatgcgcatggatattttaagggtataatgcaagatgtccaattacttgtcatgccccagggatttattgctcagtgcccagatcttaatcgcacctgtccaacttgcaatgacttccatggacttgtgcagaaaatcatggagctacaggatattttagccaaaacatcagccaagctgtctcgagctgaacagcgaatgaatagattggatcagtgctattgtgaaaggacttgcaccatgaagggaaccacctaccgagaatttgagtcctggatagacggctgtaagaactgcacatgcctgaatggaaccatccagtgtgaaactctaatctgcccaaatcctgactgcccacttaagtcggctcttgcgtat

SEQ ID NO: 57126 - protein, 353 aa, Artificial Sequence
  derived and/or modified sequence
MLEGQLEAREPKEGTHPEDPCPGAGAAMEKTPAAAEVPREDSNAGEMPSLQQQITSLHQELGRQQSLWADIHRKLQSHMDALRKQNRELREELRGLQRQQWEAGKKPAASPHAGRESHTLALEPAFGKISPLSADEETTPKYAGRKSQSATLLGQRWSSNHLAPPKPMSLKTERINSGKTPPQEDREKSPPGRRQDRSPAPTGRPTPGAERREVSEDGKIMHPSSRSLQNSGGRKSPVQASQAATLQEQTAAAGVADRSSSVLGSSEGGFLSRVQAEEFASSSPDSAERQNLPVNPPSSLEIAQAMDTKMKKEEVQEEKRHPNGKADDCRRSGFPSEFPGALHAAPSRQDMGP

SEQ ID NO: 57127 - DNA, 1062 bp, Artificial Sequence
  derived and/or modified sequence
atgctggagggccagctggaggccagagagcccaaggagggcacccaccccgaggacccctgccccggcgccggcgccgccatggagaagacccccgccgccgccgaggtgcccagagaggacagcaacgccggcgagatgcccagcctgcagcagcagatcaccagcctgcaccaggagctgggcagacagcagagcctgtgggccgacatccacagaaagctgcagagccacatggacgccctgagaaagcagaacagagagctgagagaggagctgagaggcctgcagagacagcagtgggaggccggcaagaagcccgccgccagcccccacgccggcagagagagccacaccctggccctggagcccgccttcggcaagatcagccccctgagcgccgacgaggagaccacccccaagtacgccggcagaaagagccagagcgccaccctgctgggccagagatggagcagcaaccacctggccccccccaagcccatgagcctgaagaccgagagaatcaacagcggcaagacccccccccaggaggacagagagaagagcccccccggcagaagacaggacagaagccccgcccccaccggcagacccacccccggcgccgagagaagagaggtgagcgaggacggcaagatcatgcaccccagcagcagaagcctgcagaacagcggcggcagaaagagccccgtgcaggccagccaggccgccaccctgcaggagcagaccgccgccgccggcgtggccgacagaagcagcagcgtgctgggcagcagcgagggcggcttcctgagcagagtgcaggccgaggagttcgccagcagcagccccgacagcgccgagagacagaacctgcccgtgaacccccccagcagcctggagatcgcccaggccatggacaccaagatgaagaaggaggaggtgcaggaggagaagagacaccccaacggcaaggccgacgactgcagaagaagcggcttccccagcgagttccccggcgccctgcacgccgcccccagcagacaggacatgggcccctag

SEQ ID NO: 57128 - DNA, 1062 bp, Artificial Sequence
  derived and/or modified sequence
atgctcgagggacagttggaggccagagagccgaaggaaggaacacaccccgaagatccgtgccctggagcaggggccgccatggaaaaaaccccagcggccgccgaggtccccagggaggattctaacgcgggagagatgcctagtctccaacagcagatcactagcttacaccaagaactgggtcggcagcaatcgttgtgggccgacatccatcgcaagttgcaaagtcacatggacgcactccgcaagcaaaaccgcgagctccgcgaagaactgcgcggactgcagagacagcagtgggaggccggtaagaagcccgctgcgtctccccatgctgggcgcgagtcccacaccctcgcgttagaacccgcattcgggaaaatcagccccctcagtgctgacgaagagaccacaccaaagtacgcaggaaggaagtcacagtctgcgactttgctgggacagaggtggagtagtaaccatctggcgccaccgaaaccgatgagtcttaagaccgaaaggatcaacagtggaaagactcccccccaggaggacagagaaaaatcaccaccgggtcgacgacaggaccgatcccccgcacctaccggacggcccactccaggggccgagaggcgggaagtttctgaagatggcaaaattatgcaccctagtagccgcagccttcagaactccgggggaagaaagtcacccgtgcaggcctcacaggctgccacactgcaagagcagactgccgcagccggagtcgcagaccgttcctctagtgttcttggcagctctgagggaggcttcctgtcacgtgtccaggcagaggaattcgcaagctcctccccagactctgccgagcgacagaatttacccgtgaatcccccatcttctctggagattgcccaggctatggataccaagatgaaaaaggaagaggtccaagaagagaaaaggcatccaaacggaaaagccgacgattgcaggcgaagtgggtttccctcagagttccctggggcgctccacgccgccccatcacgacaggacatggggccttag

SEQ ID NO: 57129 - DNA, 1062 bp, Artificial Sequence
  derived and/or modified sequence
atgctggagggccagctggaggcccgggagcccaaggagggcacccaccctgaggacccctgccctggggccggggccgccatggagaagaccccagctgctgctgaggtgccccgggaggacagcaatgctggggagatgcccagcctgcagcagcagatcaccagcctgcaccaggagctgggccggcagcagagcctgtgggccgacatccacaggaagctgcagagccacatggatgccctgaggaagcagaaccgggagctgcgggaggagctgcggggcctgcagaggcagcagtgggaggccggcaagaagccagctgccagcccccatgctggccgggagagccacaccctggccctggagcccgccttcggcaagatcagccccctgtctgcagatgaggagaccacccccaagtatgccggcaggaagagccagagcgccaccctgctgggccagcgctggagcagcaaccacctggccccacccaagcccatgagcctgaagacagagcgcatcaacagcggcaagaccccaccccaggaggaccgggagaagagccccccaggaagacggcaggacaggagccctgcccccaccggccggcccaccccaggagctgagcggcgggaggtgtctgaagatggcaagatcatgcaccccagcagccgcagcctgcagaacagcggcggcaggaagagccctgtgcaggccagccaggccgccaccctgcaggagcagacagctgctgctggggtggccgacaggagcagctctgtgctgggcagcagcgagggcggcttcctgagccgggtgcaggccgaggagtttgccagcagcagcccagacagcgctgagcggcagaacctgcctgtgaacccccccagcagcctggagatcgcccaggccatggacaccaagatgaagaaggaggaggtgcaggaggagaagaggcaccccaacgggaaggcagatgactgccgccgcagcggcttccccagcgagttccctggggccctgcacgccgcccccagccggcaggacatgggcccctag

SEQ ID NO: 57130 - DNA, 1062 bp, Artificial Sequence
  derived and/or modified sequence
atgctggagggccagctggaggcccgggagcccaaggagggcacccatccagaggatccctgcccaggggctggcgccgctatggagaaaactccagctgccgcagaggtccctagggaagattccaacgcaggcgagatgccttccctccagcagcagatcacttccctgcatcaagaattggggagacagcagtcgctgtgggccgacatccatcggaagctgcaaagccacatggatgctctccggaaacagaaccgggagctccgcgaggagctacgcggactacaacgccagcaatgggaagcgggcaaaaaacctgccgccagccctcatgcaggaagggagtctcacacactagctcttgagcccgcattcggaaaaatcagtccattgtccgccgacgaggagaccaccccaaagtatgccgggaggaaatctcagagcgccacattattgggacaacgttggtccagcaaccacctcgccccacctaaaccaatgagcctgaagacggagcgcattaactctggcaagacgcccccacaggaagaccgggagaaatctccccctggccgaagacaggatcgctctccggcccctactgggcgaccaactccgggtgcagagaggcgagaggtgagcgaagacggcaaaatcatgcatccctccagccgctctctgcaaaacagcggagggcgcaaatccccggttcaggcaagccaggccgcaactctgcaggagcagaccgccgctgcgggagtggcagaccgttcctccagtgtactgggctccagtgagggtgggttcctctccagggtgcaggctgaggagttcgcctcctcgagcccagattccgccgagcggcaaaacctaccagttaatcctccgtcctcacttgaaatcgctcaggcgatggacaccaaaatgaaaaaggaagaggtccaggaagagaagaggcaccccaacggaaaagccgacgattgccggcgtagcggcttcccatctgagtttccgggcgccctgcatgctgccccaagtcgccaggacatgggcccatag

SEQ ID NO: 57131 - DNA, 1062 bp, Artificial Sequence
  derived and/or modified sequence
atgctcgaaggccagctggaggcgagagagcccaaggagggcacacaccccgaagacccctgtccgggagccggagccgcaatggaaaaaacacctgccgctgctgaagtaccgagggaggattccaacgccggagagatgccctccctgcagcagcagatcacatcactgcatcaggagttaggcagacagcagtcactttgggctgatatacacagaaagctccagagtcacatggacgccctgaggaaacagaacagggagctgcgcgaggagctgagaggcctgcagagacaacagtgggaggcagggaagaaacccgctgcctcaccgcacgcaggtagggaatcacacacgctggcacttgagcctgccttcggaaagatttccccccttagtgctgacgaagagaccacccccaagtatgccggaagaaagagccaatctgccaccctactagggcagcgatggagctcaaaccatttagcgccaccgaaacccatgagcctaaagaccgaacgcatcaatagcggcaaaacacccccacaggaagaccgtgaaaagtcccctcccggtcgcagacaagatcgcagtcctgcccctacaggcaggcccacacccggagctgaaaggagggaggtttctgaggatggaaaaatcatgcacccatcatctaggagcttacagaactctggtggacgaaagtccccagttcaggcttcccaggcagcaacgctgcaggaacagaccgcagccgcaggtgtggctgaccgctcgtccagtgtgcttggcagtagtgagggcggtttcctgagtagggttcaggctgaagagttcgcctctagctcacctgactctgccgaaagacagaatctgcccgttaacccgccttcctcattagaaattgcccaggccatggatacaaagatgaaaaaagaagaagtccaagaagagaagagacatccgaacggaaaggcagacgattgtaggcggtctggctttcccagtgaattcccgggagctcttcacgcagccccatcccgtcaggacatgggaccatag

SEQ ID NO: 57132 - DNA, 2185 bp, Artificial Sequence
  derived and/or modified sequence
aagacagaaagtccgttggaaccgtcggctgctctctggtctctggagatgaggcgggaggacttggggacagctgtggggacacggcccagatgttctggtcccagcagaagtgactggcggggaccaggatgctggagggtcagctcgaggccagggagcccaaggagggcacccacccagaggacccgtgcccgggagctggggctgccatggagaagacacctgcagcagccgaggtccccagggaggacagcaatgccggggagatgccgtcattacagcagcagatcaccagcctccaccaagagctcgggagacagcagtcgctgtgggctgatattcacagaaaactccagagtcatatggatgccttgaggaagcagaaccgggagctccgagaagagctgagaggcctgcagcggcagcagtgggaagccgggaagaaacccgcagcgtccccacacgcggggcgagaatcacacactctggcattggaacctgcttttggaaaaatttcacctctgtcagctgatgaagagacaacgcccaaatacgctggccgcaagagtcagagtgcgactctcctgggacaaagatggtcatctaaccacttagctcctccaaagccaatgagtttaaagacagaaagaattaactcggggaaaacaccaccacaggaagatagagagaaaagtcctcccgggagacgtcaagacagaagtccagcacccactggaaggccgactcccggtgcagaaagacgggaggtgtctgaagacggaaagattatgcatccatcttcccgaagtctgcaaaactccggtggcagaaaatcaccagtgcaggcttcccaggccgccacgctgcaggagcagacggcagcagccggagttgctgacagaagctcatcagtcttagggagttctgaaggcggatttctcagccgcgttcaagctgaagagttcgccagttcttccccagacagtgcagagcggcagaatcttcctgtaaacccaccatcttccctggaaatagcacaggccatggacactaagatgaaaaaggaggaagtacaggaagaaaaacgacatccaaatggcaaggcagatgactgccggcggtccggtttcccgagtgaatttccaggagctctgcatgccgctccctccagacaggacatggggccctgacctggaggccaggcgtttctagcattgttgactgccagtttattaccagtaaataaagcaatacgcttttcaggaggaagatttgttttaaatacttaaaaaaaaacccaaaactatagcctcaaatatcttccagccaccacattttagcccttgaggagagctcagttccggaaggacgcgtcaaggtggcggtggtcggcattgactcaggaaggggtgggaagaggcacctgctgcggctgcggctgcggctacagtgttttgtgagctccgaggagacccagtcctgcctggggcagcacatcatcgctgcttcttcagctcaacagttcgttcatctcacgcctcttgctggcctgttagaaactgggagtcggcctcaggctagctttgctgagggaactctgcctcagtaaaagcgaattcatgtcttgcaagcggataaagcatttggataaatgaacaacagggaatgctacttgcagtaacagtttgaattcactgaaatgcttttgtctttagcgcagtggttgtagtggtttgtcaggggagaaggaaacccacatcatttgagcacctgaccttgccatccccataggcaggtccatgagacataagtgatgctcctccttggctaagtgcatggagaaaccaatcgctgaagctcatgaaaccacgaagatgaggacacaagaactaggtaacgcgctgtgccctctgctagcgcgatccttcctttctccccacaaccagcggtcacccacctctgcctgctcctacgtctctggctcccccaccctccctcccaggtcttcaacactttcctcttctcgtgactcatcttgcatctacttcttgtgtgtcttgcattggatatgccaaagttctttccttttttgtgttttctttcttttaataatataaactccaaaatagattgtttgattcttttcatgtggaacatttaaaatattatttgtgctttatta

SEQ ID NO: 57133 - DNA, 2141 bp, Artificial Sequence
  derived and/or modified sequence
ggagatgaggcgggaggacttggggacagctgtggggacacggcccagatgctctggtcccagcagaagtgactggcggggaccaggatgctggagggtcagctcgaggccgggtagcccaaggagggcacccacccagaagacccgtgcccgggagctggggctgccatggagaagacacctgcagcagccgaggtccccagggaggacagcaatgccggggagatgccgtcattacagcagcagatcaccagcctccaccaagagctcgggagacagcagtcgctgtgggctgatattcacagaaaactccagagtcatatggatgccttgaggaagcagaaccgggagctccgagaagagctgagaggcctgcagcggcagcagtgggaagccgggaagaaacccgcagcgtccccacacgcggggcgagaatcacacactctggcattggaacctgcttttggaaaaatttcacatctgtcagctgatgaagacacaacgcccaaatacgctggccgcaagagtcagagtgccactctcctgggacaaagatggtcatctaaccacttagctcctccaaagccaatgagtttaaagacagaaagaattaactcggggaaaacaccaccacaggaagatagagagaaaagtcctcccgggagacgtcaagacagaagtccagcacccactggaaggccgactcccggtgcagaaagacggggggtgtctgaagacggaaagattatgcatccatcttcccgaagtccgcaaaactccggtggcagaaaatcaccagtgcaggcttcccaggccaccacgctgcaggagcagacggcagcagccagaggagctgacagaagctcatcagtcttagggagttctgaaggcggatttctcagccgcgttcaagctgacgagttcgccagttctgccccagacagtgcagagcggcagaatcttcctgtaaacccaccatcttccctggaaatagcacaggccatggacactaagatgaaaaaggaggaagtacaggaagaaaaacgacatccaaagggcaaggcagatgactgccggcggtccggtttcccgagtgaatttccaggagctctgcacgccgctccctccagacaggacatggggccctgacctggaggccaggcgtttctagcattgttgactgccagtttattcccagtaaataaagcaatacgcttttcaggaggaagatttgttttaaatacttaaaaaaaaacccaaaactatagcctcaaatatcttccagccaccacattttagcccttgaggagagctcagttccggaaggacgcgtcaaggtggcggtggtcggcattgactcaggaaggggtgggaagaggcacctgctgcggctgcggctgcggctacagtgttttgtgagctccgaggagacccagtcctgcctggggcagcacatcatcgctgcttcttcagctcaacagttcgttcatctcacgcctcttgctggcctgttagaaactgggagtcggcctcaggctagctttgctgagggaactctgcctcagtaaaagcgaattcatgtcttgcaagcgggtaaagcatttggataaatgaacaacagggaatgctacttgcagtaacagtttgaattcactgaaatgcttttgtctttagcgcagtggttgtagtggtttgtcaggggagaaggaaacccacatcatttgagcacctgaccttgccatccccgtaggcaggtccatgagacataagtgatgctcctccttggctaagtgcatggaggaaccaatcgctgaagctcatgaaaccacgaagatgaggacacaagaactaggtaacgcgctgtgccctctgctagcgcgatccttcctttctccccacaaccagcggtcacccacctctgcctgcccctatgtctctggctcccccaccctccctcccaggtcttcagcactttcctcttctcgtgactcatcttgcatctacttcttgtgtatcttgcattggatatgccaaagttctttccttttttgtgttttctttcttttaataatataaactccaaaatagattgtttgattcttttcatgtggaacatttaaaatattatttgtgctttatta

SEQ ID NO: 57134 - protein, 684 aa, Artificial Sequence
  derived and/or modified sequence
MSLWPPFRCRWKLAPRYSRRASPQQPQQDFEALLAECLRNGCLFEDTSFPATLSSIGSGSLLQKLPPRLQWKRPPELHSNPQFYFAKAKRLDLCQGIVGDCWFLAALQALALHQDILSRVVPLNQSFTEKYAGIFRFWFWHYGNWVPVVIDDRLPVNEAGQLVFVSSTYKNLFWGALLEKAYAKLSGSYEDLQSGQVSEALVDFTGGVTMTINLAEAHGNLWDILIEATYNRTLIGCQTHSGEKILENGLVEGHAYTLTGIRKVTCKHRPEYLVKLRNPWGKVEWKGDWSDSSSKWELLSPKEKILLLRKDNDGEFWMTLQDFKTHFVLLVICKLTPGLLSQEAAQKWTYTMREGRWEKRSTAGGQRQLLQDTFWKNPQFLLSVWRPEEGRRSLRPCSVLVSLLQKPRHRCRKRKPLLAIGFYLYRMNKYHDDQRRLPPEFFQRNTPLSQPDRFLKEKEVSQELCLEPGTYLIVPCILEAHQKSEFVLRVFSRKHIFYEIGSNSGVVFSKEIEDQNERQDEFFTKFFEKHPEINAVQLQNLLNQMTWSSLGSRQPFFSLEACQGILALLDLNASGTMSIQEFRDLWKQLKLSQKVFHKQDRGSGYLNWEQLHAAMREAGIMLSDDVCQLMLIRYGGPRLQMDFVSFIHLMLRVENMEDVFQNLTQDGKGIYLQKPEWMMMALYS

SEQ ID NO: 57135 - protein, 684 aa, Artificial Sequence
  derived and/or modified sequence
MSLWPPFRCRWKLAPRYSRRASPQQPQQDFEALLAECLRNGCLFEDTSFPATLSSIGSGSLLQKLPPRLQWKRPPELHSNPQFYFAKAKRLDLCQGIVGDCWFLAALQALALHQDILSRVVPLNQSFTEKYAGIFRFWFWHYGNWVPVVIDDRLPVNEAGQLVFVSSTYKNLFWGALLEKAYAKLSGSYEDLQSGQVSEALVDFTGGVTMTINLAEAHGNLWDILIEATYNRTLIGCQTHSGEKILENGLVEGHAYTLTGIRKVTCKHRPEYLVKLRNPWGKVEWKGDWSDSSSKWELLSPKEKILLLRKDNDGEFWMTLQDFKTHFVLLVICKLTPGLLSQEAAQKWTYTMREGRWEKRSTAGGQRQLLQDTFWKNPQFLLSVWRPEEGRRSLRPCSVLVSLLQKPRHRCRKRKPLLAIGFYLYRVAKYHDDQRRLPPEFFQRNTPLSQPDRFLKEKEVSQELCLEPGTYLIVPCILEAHQKSEFVLRVFSRKHIFYEIGSNSGVVFSKEIEDQNERQDEFFTKFFEKHPEINAVQLQNLLNQMTWSSLGSRQPFFSLEACQGILALLDLNASGTMSIQEFRDLWKQLKLSQKVFHKQDRGSGYLNWEQLHAAMREAGIMLSDDVCQLMLIRYGGPRLQMDFVSFIHLMLRVENMEDVFQNLTQDGKGIYLQKPEWMMMALYS

SEQ ID NO: 57136 - DNA, 2055 bp, Artificial Sequence
  derived and/or modified sequence
atgagcctgtggccccccttcagatgcagatggaagctggcccccagatacagcagaagagccagcccccagcagccccagcaggacttcgaggccctgctggccgagtgcctgagaaacggctgcctgttcgaggacaccagcttccccgccaccctgagcagcatcggcagcggcagcctgctgcagaagctgccccccagactgcagtggaagagaccccccgagctgcacagcaacccccagttctacttcgccaaggccaagagactggacctgtgccagggcatcgtgggcgactgctggttcctggccgccctgcaggccctggccctgcaccaggacatcctgagcagagtggtgcccctgaaccagagcttcaccgagaagtacgccggcatcttcagattctggttctggcactacggcaactgggtgcccgtggtgatcgacgacagactgcccgtgaacgaggccggccagctggtgttcgtgagcagcacctacaagaacctgttctggggcgccctgctggagaaggcctacgccaagctgagcggcagctacgaggacctgcagagcggccaggtgagcgaggccctggtggacttcaccggcggcgtgaccatgaccatcaacctggccgaggcccacggcaacctgtgggacatcctgatcgaggccacctacaacagaaccctgatcggctgccagacccacagcggcgagaagatcctggagaacggcctggtggagggccacgcctacaccctgaccggcatcagaaaggtgacctgcaagcacagacccgagtacctggtgaagctgagaaacccctggggcaaggtggagtggaagggcgactggagcgacagcagcagcaagtgggagctgctgagccccaaggagaagatcctgctgctgagaaaggacaacgacggcgagttctggatgaccctgcaggacttcaagacccacttcgtgctgctggtgatctgcaagctgacccccggcctgctgagccaggaggccgcccagaagtggacctacaccatgagagagggcagatgggagaagagaagcaccgccggcggccagagacagctgctgcaggacaccttctggaagaacccccagttcctgctgagcgtgtggagacccgaggagggcagaagaagcctgagaccctgcagcgtgctggtgagcctgctgcagaagcccagacacagatgcagaaagagaaagcccctgctggccatcggcttctacctgtacagaatgaacaagtaccacgacgaccagagaagactgccccccgagttcttccagagaaacacccccctgagccagcccgacagattcctgaaggagaaggaggtgagccaggagctgtgcctggagcccggcacctacctgatcgtgccctgcatcctggaggcccaccagaagagcgagttcgtgctgagagtgttcagcagaaagcacatcttctacgagatcggcagcaacagcggcgtggtgttcagcaaggagatcgaggaccagaacgagagacaggacgagttcttcaccaagttcttcgagaagcaccccgagatcaacgccgtgcagctgcagaacctgctgaaccagatgacctggagcagcctgggcagcagacagcccttcttcagcctggaggcctgccagggcatcctggccctgctggacctgaacgccagcggcaccatgagcatccaggagttcagagacctgtggaagcagctgaagctgagccagaaggtgttccacaagcaggacagaggcagcggctacctgaactgggagcagctgcacgccgccatgagagaggccggcatcatgctgagcgacgacgtgtgccagctgatgctgatcagatacggcggccccagactgcagatggacttcgtgagcttcatccacctgatgctgagagtggagaacatggaggacgtgttccagaacctgacccaggacggcaagggcatctacctgcagaagcccgagtggatgatgatggccctgtacagctag

SEQ ID NO: 57137 - DNA, 2055 bp, Artificial Sequence
  derived and/or modified sequence
atgagcctgtggccccccttcagatgcagatggaagctggcccccagatacagcagaagagccagcccccagcagccccagcaggacttcgaggccctgctggccgagtgcctgagaaacggctgcctgttcgaggacaccagcttccccgccaccctgagcagcatcggcagcggcagcctgctgcagaagctgccccccagactgcagtggaagagaccccccgagctgcacagcaacccccagttctacttcgccaaggccaagagactggacctgtgccagggcatcgtgggcgactgctggttcctggccgccctgcaggccctggccctgcaccaggacatcctgagcagagtggtgcccctgaaccagagcttcaccgagaagtacgccggcatcttcagattctggttctggcactacggcaactgggtgcccgtggtgatcgacgacagactgcccgtgaacgaggccggccagctggtgttcgtgagcagcacctacaagaacctgttctggggcgccctgctggagaaggcctacgccaagctgagcggcagctacgaggacctgcagagcggccaggtgagcgaggccctggtggacttcaccggcggcgtgaccatgaccatcaacctggccgaggcccacggcaacctgtgggacatcctgatcgaggccacctacaacagaaccctgatcggctgccagacccacagcggcgagaagatcctggagaacggcctggtggagggccacgcctacaccctgaccggcatcagaaaggtgacctgcaagcacagacccgagtacctggtgaagctgagaaacccctggggcaaggtggagtggaagggcgactggagcgacagcagcagcaagtgggagctgctgagccccaaggagaagatcctgctgctgagaaaggacaacgacggcgagttctggatgaccctgcaggacttcaagacccacttcgtgctgctggtgatctgcaagctgacccccggcctgctgagccaggaggccgcccagaagtggacctacaccatgagagagggcagatgggagaagagaagcaccgccggcggccagagacagctgctgcaggacaccttctggaagaacccccagttcctgctgagcgtgtggagacccgaggagggcagaagaagcctgagaccctgcagcgtgctggtgagcctgctgcagaagcccagacacagatgcagaaagagaaagcccctgctggccatcggcttctacctgtacagagtggccaagtaccacgacgaccagagaagactgccccccgagttcttccagagaaacacccccctgagccagcccgacagattcctgaaggagaaggaggtgagccaggagctgtgcctggagcccggcacctacctgatcgtgccctgcatcctggaggcccaccagaagagcgagttcgtgctgagagtgttcagcagaaagcacatcttctacgagatcggcagcaacagcggcgtggtgttcagcaaggagatcgaggaccagaacgagagacaggacgagttcttcaccaagttcttcgagaagcaccccgagatcaacgccgtgcagctgcagaacctgctgaaccagatgacctggagcagcctgggcagcagacagcccttcttcagcctggaggcctgccagggcatcctggccctgctggacctgaacgccagcggcaccatgagcatccaggagttcagagacctgtggaagcagctgaagctgagccagaaggtgttccacaagcaggacagaggcagcggctacctgaactgggagcagctgcacgccgccatgagagaggccggcatcatgctgagcgacgacgtgtgccagctgatgctgatcagatacggcggccccagactgcagatggacttcgtgagcttcatccacctgatgctgagagtggagaacatggaggacgtgttccagaacctgacccaggacggcaagggcatctacctgcagaagcccgagtggatgatgatggccctgtacagctag

SEQ ID NO: 57138 - DNA, 2055 bp, Artificial Sequence
  derived and/or modified sequence
atgtccctctggccaccttttagatgccggtggaagctggccccgcgctactcacgaagggccagtccccaacagccccaacaggatttcgaggccttgctggccgagtgtctgaggaacggttgcctgtttgaggatacctccttccctgcaacgctgagcagcatcggatccgggtccctgcttcagaagttgcccccgaggttacagtggaagaggccccccgaactccactcgaacccacagttttacttcgctaaagccaaacgtttagacctgtgccagggcatcgtcggggattgttggttcttagctgcactccaggctctggccttgcaccaggatatccttagcagggtggttcctctaaaccagagctttaccgagaaatacgctggtatctttcgcttttggttttggcactatggcaattgggtacccgtggtgattgatgaccggttaccggtaaacgaagcaggccagctagtgtttgtctccagtacttacaaaaacctgttctggggcgccctgctcgagaaggcttatgctaaattatcaggcagttatgaggacctccagtccgggcaggtgagcgaggcccttgtagacttcactgggggagtcaccatgactataaatctagcagaggcccacggaaatctctgggacatcctgatcgaagctacttataatcgaaccctgatagggtgccagacgcatagcggggagaaaatcctggagaatggcctggtggagggacacgcctacacactgactgggattcggaaagtgacctgcaagcaccgcccagagtaccttgtcaaactccgcaatccctgggggaaggttgaatggaaaggagactggtccgatagctcgtcaaagtgggaacttttaagtccaaaggagaaaattctgcttttacgtaaggacaacgacggggagttttggatgactctgcaggactttaaaacgcattttgtgctgcttgtgatttgtaaattgaccccgggactactgagccaggaagccgcccaaaagtggacctacacaatgagggaagggcgttgggaaaagcgctcgacggcaggaggccagcggcagctccttcaggatacattctggaagaacccccagtttctcctcagcgtttggcgacctgaagaggggaggagatcgcttcgcccctgcagcgttctggtgagcctcttgcaaaagccacgccacagatgtaggaaacggaagccgctcctcgcaattggcttttacctctacagaatgaacaaataccacgacgatcagaggagactgccgccagagtttttccagagaaatactcctttgagccagcccgatagattcctgaaagagaaagaggtgtcccaggaactttgcctggaaccgggaacctatctgattgtgccttgcattttagaggcccatcaaaaaagcgaattcgtgctgcgggtgttcagccggaaacatatattttatgaaatcgggtcgaatagtggagtcgtgttcagcaaagagattgaagaccagaatgaaagacaggatgagttctttaccaaatttttcgaaaaacacccggaaatcaacgctgtgcagttacagaacctgcttaaccaaatgacctggtccagtctgggatcaagacagcccttcttctccctggaggcttgtcagggtatcctggcattgctggacttgaatgcctcagggactatgagcattcaggaatttagagatctctggaaacagctgaagctgtcacagaaagtttttcacaagcaagaccgcggaagcggatacctgaactgggaacagttgcacgctgccatgcgcgaggcgggaataatgctgtccgatgatgtctgccaattaatgctcattagatacggtggcccccgcctccagatggattttgtatcattcattcacttgatgctcagggtggagaatatggaggacgtgttccagaatttgacacaggatggcaagggtatttatctgcagaaaccagagtggatgatgatggctctctattcctag

SEQ ID NO: 57139 - DNA, 2055 bp, Artificial Sequence
  derived and/or modified sequence
atgtctctctggccaccctttagatgtagatggaagctagcccctaggtactcccgccgcgctagcccccagcagcctcaacaggacttcgaagctctgctggctgaatgtctgcgcaacggatgcctctttgaagatacctctttccccgctactttgtcatcaattggatctggatctctgttgcagaagttaccgcctcgactccaatggaaacgtccaccagagcttcatagcaacccccaattctattttgccaaggctaaacgcctagacctctgccagggtattgtcggcgattgttggtttctagctgccctccaggcattggccttgcatcaggacattctgtcccgtgtggtgccacttaaccagagctttaccgagaaatatgcagggatcttccgattctggttttggcactatggtaattgggtgccagtggtgatagacgacaggctgccggtgaatgaagcgggtcaactagtcttcgtgtctagcacctataagaatctgttttggggtgccctgctcgaaaaggcgtacgctaagctgagcggatcctatgaggacctgcagagcgggcaagtttccgaggctcttgtagatttcacaggtggagtgaccatgaccatcaaccttgccgaggcacacggaaatctctgggatatccttatcgaagcaacgtataatagaacgctaatcggctgccagacccattccggggaaaagatcctcgagaacggcctggtcgagggacacgcctatacactgaccggaataaggaaggtaacgtgtaagcatcggcccgaatatctggtgaaattgaggaatccctgggggaaggtcgaatggaagggggattggtccgattcctcttccaaatgggagttgttgtcccctaaggagaagatcctgcttttacggaaggataacgacggtgagttctggatgaccctccaagatttcaaaactcactttgtgctccttgtgatctgtaaactgactcccgggctgcttagtcaggaggccgcccagaagtggacgtatactatgcgagagggtcgttgggaaaagcgtagcacagctgggggccagcgtcagctgttgcaggacactttctggaaaaatccacagtttctgctttctgtgtggagaccagaagaggggcggagaagcttgagaccctgtagcgtgctcgtgagcctgttgcagaagccaaggcaccggtgccgaaagcggaaacctctgctggcaatcggcttttatttgtaccgggtcgcaaaatatcacgatgatcagcggcgactgccacccgagttcttccaacgaaacacccccctttcccaacccgacaggtttctgaaagaaaaggaggtgtcacaggaactgtgcctggaacccggcacttatctgatcgtgccgtgcattctggaagcccatcagaagagcgagttcgtgctgcgcgtgttttcacgcaagcacattttttatgagattggttctaattccggggtcgtgttttctaaggaaatcgaggaccagaacgagaggcaggacgagttcttcacaaaattttttgaaaagcatcctgaaattaacgccgtccaattgcagaacctcctgaatcagatgacttggtccagccttggctcccgccagccttttttttctttagaggcgtgtcaaggtatcctggcgctactcgacctcaacgcaagcggcacaatgtctatccaggagttcagagacctttggaagcagctgaaattatcccagaaggtcttccataaacaagatcgaggaagtgggtatctgaattgggaacagcttcatgccgcaatgagagaggcagggatcatgctgagtgacgacgtgtgtcagttaatgctgatcaggtacggcggcccgaggctacagatggactttgtaagcttcattcacttaatgctgcgagtggaaaacatggaggacgtttttcaaaatttgacccaggatgggaaggggatctacttgcagaagccggagtggatgatgatggccctgtacagttag

SEQ ID NO: 57140 - DNA, 2055 bp, Artificial Sequence
  derived and/or modified sequence
atgagcctgtggccacccttccgctgccgctggaagctggccccccgctacagcagaagagccagcccccagcagccccagcaggactttgaggccctgctggccgagtgcctgagaaatggctgcctgtttgaggacaccagcttccctgccaccctgagcagcatcggcagcggcagcctgctgcagaagctgcccccccggctgcagtggaagaggcctcctgagctgcacagcaacccccagttctactttgccaaggccaagaggctggacctgtgccagggcatcgtgggggactgctggttcctggccgccctgcaggccctggccctgcaccaggacatcctgagccgggtggtgcccctgaaccagagcttcacagagaagtatgccggcatcttccgcttctggttctggcactacggcaactgggtgcctgtggtgattgatgaccggctgcctgtgaatgaagctggccagctggtgtttgtgagcagcacctacaagaacctcttctggggcgccctgctggagaaggcctatgccaagctgagcggcagctatgaggacctgcagagcggccaggtgtctgaggccctggtggacttcaccggaggagtgaccatgaccatcaacctggccgaggcccacggcaacctgtgggacatcctgattgaggccacctacaacagaaccctgattggctgccagacccacagcggggagaagatcctggagaatggcctggtggagggccacgcctacaccctgaccggcatcaggaaggtgacctgcaagcacaggcctgagtacctggtgaagctgaggaacccctggggcaaggtggagtggaagggggactggagcgacagcagcagcaagtgggagctgctgagccccaaggagaagatcctgctgctgaggaaggacaatgatggagagttctggatgaccctgcaggacttcaagacccactttgtgctgctggtgatctgcaagctgaccccaggcctgctgagccaggaggccgcccagaagtggacctacaccatgagggagggccgctgggagaagaggagcacagctgggggccagaggcagctgctgcaggacaccttctggaagaacccccagttcctgctgtctgtgtggaggcctgaggagggcagaagaagcctgcggccctgcagcgtgctggtgtccctgctgcagaagcccaggcaccgctgcaggaagaggaagcccctgctggccatcggcttctacctgtacaggatgaacaagtaccatgatgaccagaggcggctgcccccagagttcttccagaggaacacccccctgagccagcctgaccgcttcctgaaggagaaggaggtgtcccaggagctgtgcctggagcccggcacctacctgattgtgccctgcatcctggaggcccaccagaagtcagaatttgtgctgcgggtcttcagcaggaagcacatcttctatgagatcggcagcaacagcggcgtggtgttcagcaaggagattgaggaccagaatgaaaggcaggatgagttcttcaccaagttctttgagaagcaccctgagatcaatgctgtgcagctgcagaacctgctgaaccagatgacctggagcagcctgggcagccggcagcccttcttcagcctggaggcctgccagggcatcctggccctgctggacctgaatgccagcggcaccatgagcatccaggagttccgggacctgtggaagcagctgaagctgagccagaaggtgttccacaagcaggaccggggcagcggctacctgaactgggagcagctgcatgctgccatgagggaggccggcatcatgctgagtgatgatgtgtgccagctgatgctgatccgctatggaggcccccggctgcagatggactttgtgtccttcatccacctgatgctgcgggtggagaacatggaggatgtgttccagaacctgacccaggacggcaagggcatctacctgcagaagccagagtggatgatgatggccctgtacagctag

SEQ ID NO: 57141 - DNA, 2055 bp, Artificial Sequence
  derived and/or modified sequence
atgagcctgtggccacccttccgctgccgctggaagctggccccccgctacagcagaagagccagcccccagcagccccagcaggactttgaggccctgctggccgagtgcctgagaaatggctgcctgtttgaggacaccagcttccctgccaccctgagcagcatcggcagcggcagcctgctgcagaagctgcccccccggctgcagtggaagaggcctcctgagctgcacagcaacccccagttctactttgccaaggccaagaggctggacctgtgccagggcatcgtgggggactgctggttcctggccgccctgcaggccctggccctgcaccaggacatcctgagccgggtggtgcccctgaaccagagcttcacagagaagtatgccggcatcttccgcttctggttctggcactacggcaactgggtgcctgtggtgattgatgaccggctgcctgtgaatgaagctggccagctggtgtttgtgagcagcacctacaagaacctcttctggggcgccctgctggagaaggcctatgccaagctgagcggcagctatgaggacctgcagagcggccaggtgtctgaggccctggtggacttcaccggaggagtgaccatgaccatcaacctggccgaggcccacggcaacctgtgggacatcctgattgaggccacctacaacagaaccctgattggctgccagacccacagcggggagaagatcctggagaatggcctggtggagggccacgcctacaccctgaccggcatcaggaaggtgacctgcaagcacaggcctgagtacctggtgaagctgaggaacccctggggcaaggtggagtggaagggggactggagcgacagcagcagcaagtgggagctgctgagccccaaggagaagatcctgctgctgaggaaggacaatgatggagagttctggatgaccctgcaggacttcaagacccactttgtgctgctggtgatctgcaagctgaccccaggcctgctgagccaggaggccgcccagaagtggacctacaccatgagggagggccgctgggagaagaggagcacagctgggggccagaggcagctgctgcaggacaccttctggaagaacccccagttcctgctgtctgtgtggaggcctgaggagggcagaagaagcctgcggccctgcagcgtgctggtgtccctgctgcagaagcccaggcaccgctgcaggaagaggaagcccctgctggccatcggcttctacctgtacagagtggccaagtaccatgatgaccagaggcggctgcccccagagttcttccagaggaacacccccctgagccagcctgaccgcttcctgaaggagaaggaggtgtcccaggagctgtgcctggagcccggcacctacctgattgtgccctgcatcctggaggcccaccagaagtcagaatttgtgctgcgggtcttcagcaggaagcacatcttctatgagatcggcagcaacagcggcgtggtgttcagcaaggagattgaggaccagaatgaaaggcaggatgagttcttcaccaagttctttgagaagcaccctgagatcaatgctgtgcagctgcagaacctgctgaaccagatgacctggagcagcctgggcagccggcagcccttcttcagcctggaggcctgccagggcatcctggccctgctggacctgaatgccagcggcaccatgagcatccaggagttccgggacctgtggaagcagctgaagctgagccagaaggtgttccacaagcaggaccggggcagcggctacctgaactgggagcagctgcatgctgccatgagggaggccggcatcatgctgagtgatgatgtgtgccagctgatgctgatccgctatggaggcccccggctgcagatggactttgtgtccttcatccacctgatgctgcgggtggagaacatggaggatgtgttccagaacctgacccaggacggcaagggcatctacctgcagaagccagagtggatgatgatggccctgtacagctag

SEQ ID NO: 57142 - DNA, 2055 bp, Artificial Sequence
  derived and/or modified sequence
atgagcctgtggccccccttccggtgccggtggaagctggccccccgatactcgcgcagagccagtcctcagcagccccagcaggattttgaagccctgctcgctgaatgtttgaggaatggctgcctatttgaagacaccagtttccccgccacgctcagctctattggcagcgggagtctgctgcaaaagctcccccctcggctgcagtggaagaggccgccggaactgcatagtaatccccagttttatttcgccaaggcaaagcggcttgacttatgtcagggcatagttggggattgctggttcctcgcagccttgcaagccctggcactgcaccaagatatactgtcccgcgtggttcctctaaaccaaagcttcaccgagaagtatgcaggtatcttccgattctggttctggcactacgggaactgggtgcccgtcgtgatcgacgaccgtttgccagtgaatgaagccggccagttggtgttcgtgtcttctacatacaagaacctcttctggggcgcattgcttgaaaaggcttacgcaaagttatctggcagctacgaagacctgcagagcggccaggtttcggaagccctggtcgatttcaccgggggagtgactatgacaatcaatctggcagaggctcacgggaatctctgggacattctcatcgaggcaacctataataggactctcatcggctgtcagacccactctggggagaaaatcctcgaaaatggactggtggaaggacatgcttacaccctaaccgggatccgcaaggtgacatgtaaacataggccagaatacctcgtgaaactgagaaacccctggggaaaggtggaatggaagggggattggagcgactcatcatctaagtgggagctcctgagtcccaaagagaaaatccttcttctgcgcaaggataacgacggtgagttctggatgacccttcaggatttcaagacccatttcgttctattagtgatttgcaaactcaccccagggctcttatctcaagaggccgcccagaaatggacatacactatgagagagggaagatgggagaagcgcagcacagcaggggggcagcgacagttgctgcaagataccttctggaagaaccctcagttccttctgagtgtatggagaccggaagaagggcgtcgctcgttgcggccttgtagtgtacttgtgagcctccttcagaagcctagacataggtgtcggaagcgaaagcccctgctcgcaattggcttctatctgtatcgaatgaacaaatatcacgacgatcagcgtcgactcccccccgagttttttcagcgcaacacgcccctgtctcagccagacaggttcctcaaagagaaggaggtgtctcaggaactctgcctcgagcccggcacgtacctgattgttccctgcattctcgaagctcatcagaagtctgaatttgtcttgagggtgttctcccgaaaacacatattctacgaaatcggttcgaacagtggtgttgtgttcagcaaagagatcgaggaccaaaacgagagacaagacgaattcttcaccaaattctttgaaaagcatcccgagattaatgccgtgcagttgcagaacttactgaaccagatgacatggtccagcctgggatcacggcagccattctttagtctcgaggcatgccaagggattttggccctgctggacttgaacgcgtcaggaaccatgagtatccaagagttccgagacctttggaaacaactcaaactgagccagaaggtcttccacaagcaagacagaggctctggctacttaaactgggaacagcttcacgccgcaatgagagaagctggaatcatgttgagcgacgatgtgtgccagttgatgttaatccgctacggcggccctcggctccagatggactttgtttcttttatccacctgatgttaagggtggaaaacatggaggatgtgttccagaatcttacgcaggacggaaagggaatctacctgcagaaaccagaatggatgatgatggccttatattcttag

SEQ ID NO: 57143 - DNA, 2055 bp, Artificial Sequence
  derived and/or modified sequence
atgagcctgtggccccccttccggtgccggtggaagctggcccccagatactcacgcagagccagtccgcagcagccgcagcaggacttcgaagccttgctggccgagtgtttgcgcaatggttgccttttcgaggacacaagctttcctgcaacactgagcagcatcggttctggcagcttactgcaaaaactcccccctcgcctacagtggaaaaggcctccggaactccactcgaaccctcagttctacttcgccaaggccaaaaggctcgacttgtgccagggaattgttggagattgttggttcctggcagccctacaggccctggctctgcatcaggacatcctgtcccgggtcgtgccattgaatcagtctttcacagagaagtatgcaggaattttccggttctggttttggcattacggcaattgggtgcccgtggtgatagacgaccgactacctgtcaatgaagcagggcagttagttttcgtcagcagcacctataagaatctcttctggggcgccctgcttgaaaaggcatacgccaaactcagcgggagctacgaggatcttcaaagtgggcaggtctctgaagcgctagtggattttactggcggagtaacgatgaccatcaatctcgctgaggcccatggtaatctgtgggatattctaattgaagcaacctataacaggacattgatcgggtgccagactcatagcggagaaaagattctagaaaacggactagtggaggggcacgcttatactctaacggggatccggaaggtcacttgtaaacataggccggagtatttggtgaagctgcgtaatccctggggcaaagtcgaatggaaaggtgattggagcgatagttcctccaagtgggagctgttgagtcctaaagagaaaatcttgcttcttcgtaaagacaacgacggagaattctggatgaccctgcaggactttaagactcatttcgtactgctggttatttgtaagttgacacccggattgctgagtcaagaggccgctcaaaagtggacttacacaatgcgggaggggagatgggagaaacggagcaccgctggcggtcaacggcagctgctgcaagacaccttttggaagaaccctcaatttctactgtccgtatggaggccagaagaggggcgccggagtctgagaccatgtagtgtgctcgtctctttactgcaaaagccccgccatagatgtcgaaaaagaaagcccctgttggccataggattctacctatatcgggtcgcaaaataccacgatgaccagcgaaggctgcctcccgaattcttccagcggaataccccacttagccagcctgatcggttcctaaaagagaaggaggtgtcccaggaattgtgtttagagcccggcacatatttaattgtgccctgtattctcgaagcacaccagaaatcagagttcgtcttaagggtcttctctcgcaagcatattttttacgagattggttctaattccggtgtggttttctctaaggaaattgaggaccagaatgaaaggcaggacgagttttttaccaaatttttcgaaaagcaccctgagatcaacgcggtgcagctgcagaatctcctgaaccagatgacgtggtcaagcctcgggagtcgccagcccttcttcagtttggaggcatgccagggtattctagcactcctcgatcttaatgccagcggcactatgagcatccaggagtttagagatctgtggaagcagctaaagctgtcacagaaggtgtttcacaaacaggacaggggctcaggatatttgaactgggagcaactgcacgccgccatgcgggaggccggcataatgctgtctgatgacgtgtgccagctaatgttgatccgttatggaggacccagattacagatggattttgtgtcatttattcacttaatgctaagggtggagaacatggaggatgtgttccagaacctgacacaggatgggaaggggatttatctacaaaaacctgagtggatgatgatggcgctttactcttag

SEQ ID NO: 57144 - DNA, 2055 bp, Artificial Sequence
  derived and/or modified sequence
atgtctctctggccgcctttccgctgtcggtggaagcttgcacccagatatagccgccgagccagccctcagcagcctcaacaggattttgaggccttacttgctgaatgcttgcggaacggctgtcttttcgaggatacgtccttccctgccaccctcagcagcattggatctggaagtttacttcagaagttgcccccaagacttcagtggaagagaccccctgagctccacagcaacccgcagttctatttcgctaaagccaaaagactggatctatgtcaaggcatcgttggagactgttggtttctggccgcactgcaggccctggccctccaccaggacattcttagccgggtcgtcccactcaatcagagtttcactgagaagtacgcagggatattcagattctggttttggcactacggcaactgggtgcctgtcgtcattgacgatagactgccagttaacgaagctggccaactagtcttcgtatccagtacctacaagaacctattttggggggcattactggagaaggcttacgcaaagttaagcgggtcatatgaagatttacagtctggacaggtctccgaagctctggtggacttcaccggcggtgtaaccatgacaatcaacctcgcagaagcgcacggaaacctgtgggacatcctgattgaggctacctacaaccggacactgatcggttgccagactcactccggcgaaaagatcctcgaaaacgggcttgtggaagggcacgcatacaccctgaccggaatccggaaggttacttgcaagcaccggcctgagtatctggtgaaacttaggaatccatgggggaaggtggaatggaaaggcgattggagcgacagctcttctaagtgggagctgcttagtcctaaggaaaaaatcctgctccttcgcaaggataatgacggcgagttctggatgaccctgcaggatttcaagacccatttcgtgctgctcgtgatttgcaagctcacccctgggctgttgtctcaggaagccgcacagaaatggacctatacaatgagggagggtaggtgggagaagcgctctaccgcaggcggtcagaggcagttgctgcaggatacgttctggaagaatccccagtttctcctttcagtgtggcgccctgaggagggtagacggtcgctgcggccttgctccgtcctggttagcctgttgcagaaaccacggcatcggtgtaggaaacgaaagcccctgctggctatcgggttctatctgtatcgcatgaacaagtaccacgatgaccagagaagactgcctcccgagtttttccaaagaaacaccccgctgtcgcagcccgacagatttctgaaagaaaaagaagtttctcaggaactctgcctggagcctggcacatacttgatagtcccttgcatactcgaagcccaccaaaagtcagagtttgtgctgcgggtcttcagcaggaagcacatcttttacgagatcggtagcaacagcggagtcgtcttctccaaggaaatcgaagatcaaaacgaaaggcaagacgaatttttcacgaagttttttgagaaacacccggaaataaatgccgtgcagctgcagaatcttctgaatcagatgacctggtccagtctcggaagtaggcaaccgtttttctcattggaggcatgccagggcattctcgccctgttagacctgaacgcttctggcactatgagcattcaggaatttcgcgatttgtggaagcagttaaagctgagtcagaaagtctttcacaaacaggaccggggatctggatacctgaactgggagcagctgcacgccgctatgagagaagcgggaatcatgctctctgacgatgtgtgccagcttatgctcattagatatggaggcccacgcctgcaaatggatttcgtaagctttatccatctaatgctgagagtggaaaacatggaggacgttttccaaaaccttactcaggacggaaaaggaatctatcttcaaaagccagaatggatgatgatggctctttactcgtag

SEQ ID NO: 57145 - DNA, 2055 bp, Artificial Sequence
  derived and/or modified sequence
atgtcactgtggcccccattcagatgtcgctggaaactggcaccgcgatattcacgaagagcctctccgcagcagccacagcaggacttcgaagctctgctggccgaatgtctgcggaatggttgtctgtttgaagacactagctttcctgcaacactttcctcgatcggaagcggcagccttctccaaaaactgcctccgcgactgcagtggaagcgaccgcctgagttgcactctaaccctcaattctacttcgccaaggctaaaagacttgatctgtgccagggtattgtgggtgattgctggttcctcgctgccctgcaggcattagccttgcatcaggacatcttgtctcgcgtggtgcccctcaatcagagttttacggaaaagtatgctgggatcttcagattctggttttggcactacgggaattgggtgcctgtagttatcgacgatcgattacctgttaacgaggccggacagctggtattcgtcagcagcacgtataaaaacctgttttggggagcactgctggagaaggcatatgccaaactgtcggggagctatgaagatctccagagtgggcaagtgtccgaggccttggtcgattttactggaggcgtgacgatgaccataaacctggccgaggcacacggcaatctatgggatattctcatcgaagccacctacaacagaacactgatagggtgccaaacccacagcggggaaaagattctggaaaacggcttagttgagggccacgcctacactttaacaggaatccgtaaagtgacatgcaaacaccgaccagaatatcttgtcaagctcagaaatccgtggggcaaggtggaatggaaaggtgattggtctgacagttccagcaagtgggaactcttaagccccaaagaaaaaattcttttgttaaggaaagataacgatggagaattctggatgacactccaggactttaagacacactttgtgctgttagtcatatgcaaactcacccctgggctgctctcacaggaggcggctcaaaaatggacatatacaatgagggagggtcggtgggaaaaaaggagcacagccggaggacaaaggcagttactgcaagatacattttggaagaaccctcagtttttgctctctgtgtggcgccctgaggaaggacgtcgctcccttaggccctgtagtgttctggtttcccttctgcagaaaccaagacacaggtgtcgaaagcgcaagccccttcttgctatcggtttttatctctacagagtggccaagtatcacgacgatcagaggaggcttccaccagagtttttccagagaaacacacctctgagccagccggatcgcttccttaaggagaaagaagtgagccaggaactttgcttagagcccggaacatatctcatcgtaccttgcatattggaagcacatcagaagtctgagtttgtcttgcgtgtcttctctagaaaacacatattctacgagatcggttctaacagcggagtagttttctccaaagagatcgaggaccagaacgagcggcaggatgagttctttacaaagttctttgaaaaacacccagaaattaacgcagtgcaactacaaaacttgctcaaccagatgacttggtcatctcttggtagtcgccagccattcttttctctagaggcctgtcaggggatcctcgccctgttggacctcaacgcctctggaacaatgtccatacaagagttcagggacctctggaaacagctgaagttgagccagaaagtgtttcacaagcaagacagggggtcgggctacctcaattgggagcaactgcatgccgctatgcgagaggccggaattatgctttcagatgatgtgtgccaactgatgctgataagatacggcggaccgagattgcaaatggacttcgtgtctttcatccacttaatgttaagggtggagaatatggaggacgtgtttcagaatctgactcaggatggcaaaggtatctaccttcagaagcccgagtggatgatgatggccctttattcctag

SEQ ID NO: 57146 - DNA, 2197 bp, Artificial Sequence
  derived and/or modified sequence
atataagaggtggtttcaggctgcatgcttctgactgcaccgggattagagcttgcccaggcgcttaaagaagcaaaatctcctgtgcaggagcagcagagactcctcaggaagactcactggactgtacccaccacctgccatgtctctgtggccacctttccgatgcagatggaagctggcgccaaggtactctaggagggcgtctccacagcaaccccaacaggactttgaggccctgctggcagagtgcctgaggaatggctgcctctttgaagacaccagcttcccggccaccctgagctccatcggcagtggctccctgctgcagaagctgccaccccgcctgcagtggaagaggcccccggagctgcacagcaatccccagttttattttgccaaggccaaaaggctggatctgtgccaggggatagtaggagactgctggttcttggctgctttgcaagctctggccttgcaccaggacatcctgagccgggttgttcccctgaatcagagtttcactgagaagtatgctggcatcttccggttctggttctggcactatgggaactgggttcctgtggtgatcgatgaccgtctgcctgtgaatgaggctggccagctggtctttgtctcctccacctataagaacttgttctggggagcacttctggaaaaggcctatgccaagctctctggttcctatgaagacttgcagtcaggacaggtgtctgaagcccttgtagacttcactggaggggtgacaatgaccatcaacctggcagaagcccatggcaacctctgggacatcctcatcgaagccacctacaacagaaccctcattggctgccagacccactcaggggagaagattctggagaatgggctggtggaaggccatgcctatactctcacaggaatcaggaaggtgacctgcaaacatagacctgaatatctcgtcaagctacggaacccctggggaaaggtggaatggaaaggagactggagtgacagttcaagtaaatgggagctgctgagccccaaggagaagattctgcttctgaggaaagacaatgacggagaattctggatgacgctgcaggactttaaaacacatttcgtgctcctggttatctgtaaactgaccccaggcctgttgagccaggaggcggcccagaagtggacgtacaccatgcgggaggggagatgggagaagcggagcacagctggtggccagaggcagttgctgcaggacacattttggaagaacccgcagttcctgctgtctgtctggaggcccgaggagggcaggagatccctgaggccctgcagcgtgctggtgtccctgctccagaagcccaggcacaggtgccgcaagcggaagcctctcctcgccattggcttctacctgtataggatgaacaagtaccatgatgaccagaggagactgccccctgagttcttccagagaaacactcctctgagccagcctgataggtttctcaaggagaaagaagtgagtcaggagctgtgtctggaaccagggacgtacctcatcgtgccctgcatattggaggcccaccagaagtcagagttcgtcctcagggtcttctccaggaagcacatcttttatgaaattggcagcaattctggtgtcgtcttctcaaaggagatagaagaccaaaatgaaaggcaggatgaattcttcaccaaattctttgaaaagcatccagagattaatgcagttcaacttcagaacctcctgaaccagatgacctggtcaagtctggggagcagacagcccttctttagcctggaagcctgccaggggatcctggccttactggaccttaatgcatcaggtactatgagcatccaggaattcagggacctgtggaagcagctgaagctctctcagaaggttttccacaagcaagaccgtgggtcaggatacctgaactgggagcagctgcacgctgccatgagggaggcaggaatcatgctcagtgatgacgtctgtcagctgatgctcatccgctacggcggcccccgcctccagatggactttgtcagtttcatccacttgatgctgcgtgtagagaacatggaggatgtcttccaaaacttaacccaagatggcaaagggatatacctccagaagccagagtggatgatgatggcactgtactcctga

SEQ ID NO: 57147 - DNA, 3820 bp, Artificial Sequence
  derived and/or modified sequence
atataagaggtggtttcaggctgcatgcttctgactgcaccgggattagagcttgcccaggcgcttaaagaagcaaaatctcctgtgcaggagcagcagagactcctcaggaagactcactggactgtacccaccacctgccatgtctctgtggccacctttccgatgcagatggaagctggcgccaaggtactctaggagggcgtctccacagcaaccccaacaggactttgaggccctgctggcagagtgcctgaggaatggctgcctctttgaagacaccagcttcccggccaccctgagctccatcggcagtggctccctgctgcagaagctgccaccccgcctgcagtggaagaggcccccggagctgcacagcaatccccagttttattttgccaaggccaaaaggctggatctgtgccaggggatagtaggagactgctggttcttggctgctttgcaagctctggccttgcaccaggacatcctgagccgggttgttcccctgaatcagagtttcactgagaagtatgctggcatcttccggttctggttctggcactatgggaactgggttcctgtggtgatcgatgaccgtctgcctgtgaatgaggctggccagctggtctttgtctcctccacctataagaacttgttctggggagcacttctggaaaaggcctatgccaagctctctggttcctatgaagacttgcagtcaggacaggtgtctgaagcccttgtagacttcactggaggggtgacaatgaccatcaacctggcagaagcccatggcaacctctgggacatcctcatcgaagccacctacaacagaaccctcattggctgccagacccactcaggggagaagattctggagaatgggctggtggaaggccatgcctatactctcacaggaatcaggaaggtgacctgcaaacatagacctgaatatctcgtcaagctacggaacccctggggaaaggtggaatggaaaggagactggagtgacagttcaagtaaatgggagctgctgagccccaaggagaagattctgcttctgaggaaagacaatgacggagaattctggatgacgctgcaggactttaaaacacatttcgtgctcctggttatctgtaaactgaccccaggcctgttgagccaggaggcggcccagaagtggacgtacaccatgcgggaggggagatgggagaagcggagcacagctggtggccagaggcagttgctgcaggacacattttggaagaacccgcagttcctgctgtctgtctggaggcccgaggagggcaggagatccctgaggccctgcagcgtgctggtgtccctgctccagaagcccaggcacaggtgccgcaagcggaagcctctcctcgccattggcttctacctgtatagggtagcaaagtaccatgatgaccagaggagactgccccctgagttcttccagagaaacactcctctgagccagcctgataggtttctcaaggagaaagaagtgagtcaggagctgtgtctggaaccagggacgtacctcatcgtgccctgcatattggaggcccaccagaagtcagagttcgtcctcagggtcttctccaggaagcacatcttttatgaaattggcagcaattctggtgtcgtcttctcaaaggagatagaagaccaaaatgaaaggcaggatgaattcttcaccaaattctttgaaaagcatccagagattaatgcagttcaacttcagaacctcctgaaccagatgacctggtcaagtctggggagcagacagcccttctttagcctggaagcctgccaggggatcctggccttactggaccttaatgcatcaggtactatgagcatccaggaattcagggacctgtggaagcagctgaagctctctcagaaggttttccacaagcaagaccgtgggtcaggatacctgaactgggagcagctgcacgctgccatgagggaggcaggaatcatgctcagtgatgacgtctgtcagctgatgctcatccgctacggcggcccccgcctccagatggactttgtcagtttcatccacttgatgctgcgtgtagagaacatggaggatgtcttccaaaacttaacccaagatggcaaagggatatacctccagaagccagagtggatgatgatggcactgtactcctgagaaggctgagtctcacctgccctcactgaagactctgcatgtggcccaagagcagcctttggctgagaccaacccatgcccaccctacttactgatcttcaggacagcctcactagccgtcaccttctcagctgggaaggtttctcttctgcagccctccccgtgcatggccagcatgcagaaagggaagggaggaagtaaagattacatcagatttgtaaaagctagccatccttccctgaggccacaaccttgtcacaagcggagatgttacctgacatggcctaagcattctgactccagagctggtgtggttagcctccatacaacactgcctctgtggctgcaaactcaagtgactttagacatgccacatgttctcacatggtggggtaatcatctaggttttaaggtctgaaatgggaatgatatatccttagacatttagtcccagcatctgcaaattgatagagacataggctaagtttcagctgtttggggatggggtcagggatatagtgggctttcagaaacacagacagtaagagaattggcagagtccaggtggggtgggctggctctggcatctgaggtcatggggtagtcttcttctgacaatatctccgtatgattggatctggggcaacctagtagatttaaaacacctgagttctcaaagggcttcctgcttgtgacaggtgtgtctatttgcttgatatatagactatcagatccatttcaaatctgtccagaaattctctgtctatctacttcaaaggacaaaaacaaacccatgctaaattatagagtcaatcagtgggtggttggtatatctgattttttgaactaccatgaaacaccttgtttatgtcatccctctcaaccaagaatacaggtgcaaaaccagaacaatggcctttttccaaagtctatgcaatttattcataagttagcacctcagagccatttattactacaggttgagcatcccaaatctgaaaaccccaaatctgaaatactccaaaatctaaaatttctgagagtagacatgaaactcaaaggaaataggggcattttggattttgaatttttgggtttgaggtgttcaactgacaagtctataatgcagatatcctgaaatctgaaacacttctggtcccaagcattttagttaagagatagtcaacctgtattctatttaatcttaatttacaaacaattctaacaaacatggctgtttgatttccaactccatagcagactcaggaaggaagctgaatgaagagataaaagtgtgtccattggcagaggactaaaggagatttgagcacctgtcagatgggtactgtaccagaagaaaggagcactttgaaagcgtagcttatggggtaggaaagtattttatttaggaaaaaaaacccttcatttattccaaatgataaaatgtaaaatgggtttccataaagtgccagatacatgagatgttgttgattttataaatgatgatcatgtatttacagccttttacagttttttatatccattgacttatttgtgtctttgtctttaaaatctgccattgcaaatagctgttttaataaaccaattttgccttggcccctg

SEQ ID NO: 57148 - protein, 104 aa, Artificial Sequence
  derived and/or modified sequence
MMSTEQMQPLELSEDRLDKLDPRCSHLGVFSEHLIKRYDVQERHPKGKMIPVLHNTDLEQKKPRRKDTPALHMSPFAAGVTLLRDERPKAIVEDDEKDGDKIAI

SEQ ID NO: 57149 - DNA, 315 bp, Artificial Sequence
  derived and/or modified sequence
atgatgagcaccgagcagatgcagcccctggagctgagcgaggacagactggacaagctggaccccagatgcagccacctgggcgtgttcagcgagcacctgatcaagagatacgacgtgcaggagagacaccccaagggcaagatgatccccgtgctgcacaacaccgacctggagcagaagaagcccagaagaaaggacacccccgccctgcacatgagccccttcgccgccggcgtgaccctgctgagagacgagagacccaaggccatcgtggaggacgacgagaaggacggcgacaagatcgccatctag

SEQ ID NO: 57150 - DNA, 315 bp, Artificial Sequence
  derived and/or modified sequence
atgatgtctaccgagcagatgcagccattagaactgtcagaggacaggctagacaagctggatcctaggtgctcacaccttggcgtgttctctgagcacctgatcaagcgatacgacgtgcaggagcgtcatcccaaggggaaaatgattccagtcctgcacaacacggacctggaacagaagaaaccccgcagaaaggataccccagccctccacatgagccctttcgcggctggcgtgacgctgttgagggatgaacgacccaaagcaattgtggaggacgacgagaaggacggcgataagatcgctatttag

SEQ ID NO: 57151 - DNA, 315 bp, Artificial Sequence
  derived and/or modified sequence
atgatgagcacagagcagatgcagcccctggagctgtctgaggaccggctggacaagctggacccccgctgcagccacctgggcgtcttcagcgagcacctgatcaagagatatgatgtgcaggagcggcaccccaagggcaagatgatccctgtgctgcacaacacagacctggagcagaagaagcccaggaggaaggacaccccagccctgcacatgagcccctttgctgctggggtgaccctgctgagagatgagcggcccaaggccatcgtggaggatgatgagaaggatggagacaagatcgccatctag

SEQ ID NO: 57152 - DNA, 315 bp, Artificial Sequence
  derived and/or modified sequence
atgatgagcaccgagcagatgcagcccctggagctgagcgaggaccgcctggataagcttgatcctcgctgtagtcacttgggcgtatttagcgagcacctgatcaaacgttacgatgtacaggagcgtcaccccaaagggaagatgattcccgtgttgcacaatactgacctcgaacagaagaagcctaggcggaaagacaccccagcattacatatgagcccttttgcagccggcgttacactgctcagagatgaacgccccaaagctatcgttgaggatgatgagaaggatggggataagattgccatctag

SEQ ID NO: 57153 - DNA, 315 bp, Artificial Sequence
  derived and/or modified sequence
atgatgtctactgagcaaatgcagccccttgagctgtcagaggaccgcttagacaagctggacccaaggtgcagccacctgggcgtattctctgagcacctcattaaaaggtacgatgtacaggaacggcatcctaagggcaaaatgatccctgtactgcataatacggaccttgagcaaaagaaaccacgtcgcaaagacactccagctctgcacatgtctccctttgctgcaggagtgaccttgttaagggatgaaaggccaaaggccattgttgaggatgacgagaaggatggggacaagatcgcgatttag

SEQ ID NO: 57154 - DNA, 569 bp, Artificial Sequence
  derived and/or modified sequence
agccactgccgcagaggagccaggcccagcctcggtgagcacacacgccctccctgtctctcgccttcgcttccctgcatctgcgctgattgtgctggagaagaaatacatccacccaccctcctttgatgatgtccactgagcaaatgcagccactggaactctcagaagacagactggacaagctagaccctcgttgcagccacttaggtgtgttttcagaacatttaattaaaagatacgatgttcaagagagacatccaaagggcaaaatgatccctgttcttcataacactgacctggaacagaaaaagccaaggagaaaagacacacctgccctgcacatgtccccctttgcagcaggtgtgacattgctcagggacgagagacccaaagcaatcgtggaagatgacgaaaaggatggtgacaagatagctatttaaagatagttcccctgagaccacttgtaaataggttagattggttccctgtggtgacctagagaaaaaatagacttgtttctgctctcatttttgtcatcgtctgacttgaagattcagacaccttct

SEQ ID NO: 57155 - protein, 329 aa, Artificial Sequence
  derived and/or modified sequence
MAEAATPGTTATTSGAGAAAATAAAASPTPIPTVTAPSLGAGGGGGGSDGSGGGWTKQVTCRYFMHGVCKEGDNCRYSHDLSDSPYSVVCKYFQRGYCIYGDRCRYEHSKPLKQEEATATELTTKSSLAASSSLSSIVGPLVEMNTGEAESRNSNFATVGAGSEDWVNAIEFVPGQPYCGRTAPSCTEAPLQGSVTKEESEKEQTAVETKKQLCPYAAVGECRYGENCVYLHGDSCDMCGLQVLHPMDAAQRSQHIKSCIEAHEKDMELSFAVQRSKDMVCGICMEVVYEKANPSERRFGILSNCNHTYCLKCIRKWRSAKQFESKIIK

SEQ ID NO: 57156 - DNA, 990 bp, Artificial Sequence
  derived and/or modified sequence
atggccgaggccgccacccccggcaccaccgccaccaccagcggcgccggcgccgccgccgccaccgccgccgccgccagccccacccccatccccaccgtgaccgcccccagcctgggcgccggcggcggcggcggcggcagcgacggcagcggcggcggctggaccaagcaggtgacctgcagatacttcatgcacggcgtgtgcaaggagggcgacaactgcagatacagccacgacctgagcgacagcccctacagcgtggtgtgcaagtacttccagagaggctactgcatctacggcgacagatgcagatacgagcacagcaagcccctgaagcaggaggaggccaccgccaccgagctgaccaccaagagcagcctggccgccagcagcagcctgagcagcatcgtgggccccctggtggagatgaacaccggcgaggccgagagcagaaacagcaacttcgccaccgtgggcgccggcagcgaggactgggtgaacgccatcgagttcgtgcccggccagccctactgcggcagaaccgcccccagctgcaccgaggcccccctgcagggcagcgtgaccaaggaggagagcgagaaggagcagaccgccgtggagaccaagaagcagctgtgcccctacgccgccgtgggcgagtgcagatacggcgagaactgcgtgtacctgcacggcgacagctgcgacatgtgcggcctgcaggtgctgcaccccatggacgccgcccagagaagccagcacatcaagagctgcatcgaggcccacgagaaggacatggagctgagcttcgccgtgcagagaagcaaggacatggtgtgcggcatctgcatggaggtggtgtacgagaaggccaaccccagcgagagaagattcggcatcctgagcaactgcaaccacacctactgcctgaagtgcatcagaaagtggagaagcgccaagcagttcgagagcaagatcatcaagtag

SEQ ID NO: 57157 - DNA, 990 bp, Artificial Sequence
  derived and/or modified sequence
atggctgaggctgccacaccaggcaccactgccacaacatccggggcaggcgctgctgccgccacagcagctgcagcctctcccacaccaatcccgactgtaacagctcctagtctcggcgctggaggcggaggcggcggcagcgatggatctggcggcggatggactaaacaggtgacctgtcgatactttatgcatggcgtgtgcaaagaaggagataactgcagatacagtcacgacctctcagacagtccttacagtgtggtctgtaagtattttcagcgtggctattgcatctacggagaccgctgtaggtacgagcacagcaagcctctgaagcaggaagaagccaccgcgacagagctgactaccaagagcagtctggcagccagctcttctttgtcttccatcgtcggtcctttggtggagatgaacactggggaagcagaaagccgcaactcaaatttcgcaaccgtaggcgctggctctgaagattgggtgaacgcaattgagttcgtgccaggacagccttactgtgggcgcactgcgccatcttgcactgaggctccattacagggctccgtcaccaaggaagaaagtgagaaggagcagacagctgtagaaaccaagaagcagttgtgcccttatgccgctgtgggagagtgccgctatggtgaaaattgtgtgtacctgcacggcgactcttgtgatatgtgcgggctccaggtcctgcaccccatggacgccgctcagcgctcccagcacattaagagctgtattgaggcacacgagaaagatatggagctgtcctttgccgtgcagcggagtaaagatatggtgtgcggtatctgcatggaggtggtttacgaaaaagccaatcctagtgaacggagatttggaatcttatctaattgtaaccatacttactgcctgaaatgcatccggaagtggcggtcagcgaagcaatttgagtcaaagatcattaaatag

SEQ ID NO: 57158 - DNA, 990 bp, Artificial Sequence
  derived and/or modified sequence
atggccgaggccgccaccccaggcaccacagccaccaccagcggggccggggctgctgctgccacagctgctgctgccagccccacccccatccccaccgtgacagcccccagcctgggcgccggcggcggcggcggcggcagtgatggcagcggcggcggctggaccaagcaggtgacctgccgctacttcatgcacggcgtgtgcaaggagggggacaactgccgctacagccatgacctgagtgacagcccctacagcgtggtgtgcaagtacttccagaggggctactgcatctacggggaccgctgccgctatgagcacagcaagcccctgaagcaggaggaggccacagccacagagctgaccaccaagagcagcctggccgccagcagcagcctgagcagcatcgtgggccccctggtggagatgaacacaggagaggccgagagcaggaacagcaactttgccaccgtgggcgccggcagcgaggactgggtgaatgccatcgagtttgtgcccggccagccctactgcggccgcacagcccccagctgcacagaggcccccctgcagggctctgtgaccaaggaggagagcgagaaggagcagacagctgtggagaccaagaagcagctgtgcccctatgctgctgtgggagaatgtcgctacggggagaactgtgtgtacctgcacggggacagctgtgacatgtgtggcctgcaggtgctgcaccccatggatgctgcccagaggagccagcacatcaagagctgcatcgaggcccacgagaaggacatggagctgagctttgctgtgcagaggagcaaggacatggtgtgtggcatctgcatggaggtggtgtatgagaaggccaaccccagcgagaggagatttggcatcctgagcaactgcaaccacacctactgcctgaagtgcatcaggaagtggaggtctgccaagcagtttgagagcaagatcatcaagtag

SEQ ID NO: 57159 - DNA, 1601 bp, Artificial Sequence
  derived and/or modified sequence
gctcagatacgcgacgcgtagcaggcggggaccgaacgggtgcctcagtgtccttcccctcccctcgcctggcctcgccgtcctctccccgcagccggaccggaactatgtgatcccggaagttccggggcctttgctgtgtgggataaacagtaatggcggaggctgcaactcccggaacaacagccacaacatcaggagcaggagcggcagcggcgacggcggcagcagcctcccccaccccgatccccacagtcaccgccccgtccctgggggcgggcggagggggcggcggcagcgacggcagcggcggcggctggactaaacaggtcacctgcaggtattttatgcatggggtttgtaaggaaggagacaactgtcgctactcgcatgacctctctgacagtccgtatagtgtagtgtgcaagtattttcagcgagggtactgtatttatggagaccgctgcagatatgaacatagcaaaccattgaaacaggaagaagcaactgctacagagctaactacaaagtcatcccttgctgcttcctcaagtctctcatcgatagttggaccacttgttgaaatgaatacaggcgaagctgagtcaagaaattcaaactttgcaactgtaggagcaggttcagaggactgggtgaatgctattgagtttgttcctgggcaaccctactgtggccgtactgcgccttcctgcactgaagcacccctgcagggctcagtgaccaaggaagaatcagagaaagagcaaaccgccgtggagacaaagaagcagctgtgcccctatgctgcagtgggagagtgccgatacggggagaactgtgtgtatctccacggagattcttgtgacatgtgtgggctgcaggtcctgcatccaatggatgctgcccagagatcgcagcatatcaaatcgtgcattgaggcccatgagaaggacatggagctctcatttgccgtgcagcgcagcaaggacatggtgtgtgggatctgcatggaggtggtctatgagaaagccaaccccagtgagcgccgcttcgggatcctctccaactgcaaccacacctactgtctcaagtgcattcgcaagtggaggagtgctaagcaatttgagagcaagatcataaagtgagactcctccccagtcttcatttgtgctttctcttttggggaagaatttagtaacttgtgccaactttcaaccagatggaccgcatttaaatgcatgcattttatcttgaaactgggatattctaatggggatttcttctttgtatttcagctagcttctaggttagttggtctatctacttttatttgaatgaggaaaccctgtgtatcagttagaatcttcgtgctttttctgaggagattgtgtttaatggattattagccagtttaggctcagtgaacaaactgatctagctctgaatgtatgtttcctgacgttttacatttccactttcctattccattcattaagctagccaacaatccaccatcctttaaagattgttctcataactgaacaaaaaccacataatctaaacagagcaaagctacaagaaataaatttatttaaacgaaa

SEQ ID NO: 57160 - DNA, 990 bp, Artificial Sequence
  derived and/or modified sequence
atggccgaggccgccacccccggcaccaccgccaccaccagcggcgcaggcgcggcggccgctactgccgcagccgccagtcctactcctataccaaccgttacagctcccagtcttggcgcggggggcgggggtggcgggtcagacgggagcggagggggctggacaaagcaagtaacttgtcgatacttcatgcatggtgtgtgcaaggagggggacaattgcaggtactcccacgacctgtctgatagcccatatagtgtagtatgcaagtacttccagagaggatactgcatctacggagataggtgccgttatgagcattccaagcctctcaagcaagaagaggccacagcgaccgagcttacaactaagtcctccttggcagcctcttcctccctgagctccatcgttggacccctagtcgaaatgaatactggtgaggccgagagcagaaatagtaattttgcaactgtgggtgcaggaagcgaagactgggtaaacgctattgagtttgttcctggtcagccttactgcgggcgtacagcaccctcatgtacggaggctcccctacaggggtctgtgaccaaggaggagagcgagaaagagcagaccgcggtggaaacaaagaaacagctgtgtccatatgcagctgtgggagaatgtcggtatggcgagaattgtgtgtatctccacggggatagctgcgatatgtgtgggttgcaggtcttacaccctatggacgctgctcagagaagccaacacattaaatcttgcattgaagcccatgagaaagacatggaactatcctttgcagtgcagcgatccaaagatatggtatgtgggatatgtatggaggtcgtgtatgaaaaagcaaacccttccgagcggcgtttcgggatcctctctaactgcaatcatacttactgcctcaagtgtattcgcaagtggcggtccgcgaaacagttcgaatcaaaaattatcaaatag

SEQ ID NO: 57161 - DNA, 990 bp, Artificial Sequence
  derived and/or modified sequence
atggctgaagctgcgactccaggcactactgcaacaacgagtggcgctggggctgccgcagcaaccgctgcagcagcgagcccgaccccaattcccactgttacagccccaagtctgggtgctggcggtggcggaggaggctcagacggctctgggggaggctggaccaaacaggttacttgccgttactttatgcatggggtgtgtaaggagggagacaattgccgatactctcatgatttatctgactccccttattccgttgtctgcaaatatttccaacgcggatactgtatatacggcgacaggtgccgctacgagcatagcaaacccctgaaacaggaggaggctaccgcaactgaactgacaaccaaaagtagcctggctgcctcttcttccctgagttcgattgtgggcccattggtggaaatgaacaccggggaggccgagtctcggaattcaaatttcgccactgtcggtgccggttccgaagattgggtgaacgccatagagttcgtgccagggcagccctattgtggaagaacggctcccagttgtaccgaggcacctttacaggggagcgtcactaaggaagaatccgaaaaggagcagacagcagtggaaactaagaaacagctgtgcccctacgcagcagtgggagaatgcagatacggtgaaaattgtgtatatctgcacggtgattcctgtgacatgtgcggcttacaggtgcttcatcctatggacgccgcacaaagatcacagcacatcaagagttgcattgaggcacacgaaaaggacatggaactgtcattcgctgttcaaagatcaaaagacatggtgtgtgggatctgtatggaagttgtgtatgagaaggcgaacccctctgaacgccgattcggaatcctgagcaactgcaaccacacctactgcttgaaatgcatcagaaagtggaggagcgctaagcagtttgagagtaaaatcataaaatag

SEQ ID NO: 57162 - protein, 125 aa, Artificial Sequence
  derived and/or modified sequence
MAEAHQAVAFQFTVTPDGVDFRLSREALKHVYLSGINSWKKRLIRIKNGILRGVYPGSPTSWLVVIMATVGSSFCNVDISLGLVSCIQRCLPQGCGPYQTPQTRALLSMAIFSTGVWVTGIFFFR

SEQ ID NO: 57163 - protein, 738 aa, Artificial Sequence
  derived and/or modified sequence
MAEAHQAVAFQFTVTPDGVDFRLSREALKHVYLSGINSWKKRLIRIKNGILRGVYPGSPTSWLVVIMATVGSSFCNVDISLGLVSCIQRCLPQGCGPYQTPQTRALLSMAIFSTGVWVTGIFFFRQTLKLLLCYHGWMFEMHGKTSNLTRIWAYLESVRPLLDDEEYYRMELLAKEFQDKTAPRLQKYLVLKSWWASNYVSDWWEEYIYLRGRSPLMVNSNYYVMDLVLIKNTDVQAARLGNIIHAMIMYRRKLDREEIKPVMALGIVPMCSYQMERMFNTTRIPGKDTDVLQHLSDSRHVAVYHKGRFFKLWLYEGARLLKPQDLEMQFQRILDDPSPPQPGEEKLAALTAGGRVEWAQARQAFFSSGKNKAALEAIERAAFFVALDEESYSYDPEDEASLSLYGKALLHGNCYNRWFDKSFTLISFKNGQLGLNAEHAWADAPIIGHLWEFVLGTDSFHLGYTETGHCLGKPNPALAPPTRLQWDIPKQCQAVIESSYQVAKALADDVELYCFQFLPFGKGLIKKCRTSPDAFVQIALQLAHFRDRGKFCLTYEASMTRMFREGRTETVRSCTSESTAFVQAMMEGSHTKADLRDLFQKAAKKHQNMYRLAMTGAGIDRHLFCLYLVSKYLGVSSPFLAEVLSEPWRLSTSQIPQSQIRMFDPEQHPNHLGAGGGFGPVADDGYGVSYMIAGENTIFFHISSKFSSSETNAQRFGNHIRKALLDIADLFQVPKAYS

SEQ ID NO: 57164 - DNA, 378 bp, Artificial Sequence
  derived and/or modified sequence
atggccgaggcacaccaggccgtggcattccagttcaccgtgacccccgacggcgtggatttcagactctccagggaagccctaaaacacgtctatctgagtggcatcaactcctggaagaagagactgatcaggattaagaatggcattctccgtggtgtgtacccaggatctccaacgtcttggttagtcgtaattatggctaccgttggtagctccttttgcaacgtggacatatctttaggcttggtttcttgcattcaacgctgcctgccccagggttgcgggccctatcaaacacctcagacgagagctttactttcaatggcaatcttctccacaggggtttgggttaccggaatcttttttttcaggtag

SEQ ID NO: 57165 - DNA, 2217 bp, Artificial Sequence
  derived and/or modified sequence
atggcagaagcgcatcaggctgtagcatttcagtttacagtgactccagatggagtggatttccggctaagccgggaggcgctgaaacacgtttacctgagcgggataaactcctggaagaaaaggctaattagaataaagaatggtatcctgcggggcgtgtaccccggctcccccactagctggcttgtggtaatcatggctaccgttggcagttccttttgcaacgtggacatctctctgggcctggtgtcctgcatccagaggtgcctgccccaaggctgcggcccatatcagacacctcaaaccagggcgctgttgagtatggccatattctctacaggcgtttgggtgaccggaatcttttttttcagacaaaccttaaaactgctgctgtgctaccacggatggatgttcgagatgcacggcaaaacaagcaacctcacgcggatttgggcctatcttgaatctgtccgacctctccttgacgacgaggagtactacaggatggagcttctggcaaaagaatttcaggataagaccgcgcctcggctgcaaaaatacttggtcctaaaatcatggtgggcgtcaaactacgtttctgactggtgggaggagtatatctacttgcgaggcagatccccactgatggttaacagtaattattacgttatggacctcgtgctcatcaagaatactgatgttcaggctgctcgcctcggcaatataattcacgccatgatcatgtaccgtagaaaactagacagggaagagataaaacctgtcatggccctcggtattgtacccatgtgttcctatcaaatggaaagaatgttcaacactaccagaattcctggtaaggataccgacgtcttgcagcacctctctgactctagacacgtcgcagtatatcataaaggccgtttcttcaaactctggctgtatgagggtgccagactgctcaaacctcaggatctggagatgcaatttcagcgtatccttgatgatccttcaccccctcagcccggggaagagaaactcgctgccctgactgccggaggccgtgtggaatgggcacaggcacgacaagctttcttctccagcgggaaaaataaggctgctctggaggctattgagcgcgccgccttctttgtggccctggatgaagagtcctatagttatgatccagaggatgaggccagcttgagtctgtatggcaaagccctgctgcacggcaactgttacaacagatggttcgataaaagtttcacactgatcagcttcaaaaacggacagctcgggctgaacgcagagcatgcttgggccgatgccccgattatcgggcatctgtgggaatttgtactgggcacagactctttccacttaggttatactgagacggggcattgtttaggcaagcccaatcctgcccttgcacccccgaccaggctgcagtgggacatccccaaacagtgccaggctgttattgagagcagctaccaggtggctaaggccctggccgatgatgtggagctgtattgctttcagttcctgccttttggcaagggcttaattaagaagtgtcggacaagtccggatgcattcgtgcaaattgccctccagttagcccatttcagggaccggggtaaattttgcctgacctatgaagcgagcatgaccagaatgtttcgagagggtagaaccgagacagtcaggtcctgtacatcagagagcactgcctttgttcaagcaatgatggagggctcacatacaaaagccgacttgagggatctatttcaaaaagccgctaagaagcaccagaacatgtacaggctggccatgacaggggcaggaatcgatagacacttgttctgtctgtatttggtgagtaaatatctgggcgtcagttccccatttctggcagaggttcttagcgagccgtggaggttgtcaaccagtcagatcccacagtctcagatcaggatgtttgaccccgagcagcaccctaaccacttgggtgccggcggaggtttcggcccagtggctgatgacggatatggagtgagttatatgatcgctggtgagaacacaatcttttttcacatttcatctaagttttcatctagcgagacaaacgcacagcggtttggtaatcacattagaaaggccttgctagacatcgctgacctattccaggtcccaaaggcctacagctag

SEQ ID NO: 57166 - DNA, 378 bp, Artificial Sequence
  derived and/or modified sequence
atggccgaggcccaccaggccgtggccttccagttcaccgtgaccccagatggagtggacttccggctgagccgggaggccctgaagcacgtgtacctgagcggcatcaacagctggaagaagaggctcatccgcatcaagaatggcatcctgcggggcgtgtacccaggcagccccacctcctggctggtggtgatcatggccaccgtgggcagcagcttctgcaatgtggacatcagcctgggcctggtgtcctgcatccagcgctgcctgccccagggctgcggcccctaccagaccccccagacccgggccctgctgtccatggccatcttcagcactggagtgtgggtgacaggcatcttcttcttcagatag

SEQ ID NO: 57167 - DNA, 2217 bp, Artificial Sequence
  derived and/or modified sequence
atggccgaggcccaccaggccgtggccttccagttcaccgtgaccccagatggagtggacttccggctgagccgggaggccctgaagcacgtgtacctgagcggcatcaacagctggaagaagaggctcatccgcatcaagaatggcatcctgcggggcgtgtacccaggcagccccacctcctggctggtggtgatcatggccaccgtgggcagcagcttctgcaatgtggacatcagcctgggcctggtgtcctgcatccagcgctgcctgccccagggctgcggcccctaccagaccccccagacccgggccctgctgtccatggccatcttcagcactggagtgtgggtgacaggcatcttcttcttccggcagaccctgaagctgctgctgtgctaccacggctggatgtttgagatgcacggcaagaccagcaacctgacccgcatctgggcctacctggagagcgtgcggcccctgctggatgatgaggagtactacaggatggagctgctggccaaggagttccaggacaagacagccccccggctgcagaagtacctggtgctgaagtcctggtgggccagcaactacgtgtctgactggtgggaggagtacatctacctgcggggccgcagccccctgatggtgaacagcaactactacgtgatggacctggtgctgatcaagaacacagatgtgcaggccgcccggctgggcaacatcatccacgccatgatcatgtacagaaggaagctggaccgggaggagatcaagcctgtgatggccctgggcatcgtgcccatgtgcagctaccagatggagaggatgttcaacaccacccgcatccctgggaaggacacagatgtgctgcagcacctgagtgacagccgccacgtggccgtgtaccacaagggccgcttcttcaagctgtggctgtatgaaggagcccggctgctgaagccccaggacctggagatgcagttccagaggatcctggatgaccccagccccccccagcccggggaggagaagctggccgccctgacagctgggggccgggtggagtgggcccaggcccggcaggccttcttcagcagcggcaagaacaaggccgccctggaggccatcgagagagctgccttctttgtggccctggatgaggagagctacagctatgaccctgaagatgaggccagcctgagcctgtatggcaaggccctgctgcacggcaactgctacaaccgctggtttgacaagagcttcaccctcatctccttcaagaatggccagctgggcctgaatgctgagcacgcctgggcagatgcccccatcatcggccacctgtgggagtttgtgctgggcacagacagcttccacctgggctacacagaaacaggccactgcctgggcaagcccaacccagccctggccccacccacccggctgcagtgggacatccccaagcagtgccaggccgtcatcgagagcagctaccaggtggccaaggccctggctgatgatgtggagctgtactgcttccagttcctgccctttgggaagggcctcatcaagaagtgcaggaccagcccagatgcctttgtgcagatcgccctgcagctggcccacttccgggaccggggcaagttctgcctgacctatgaggcctccatgaccaggatgttccgggagggccgcacagagaccgtgcgcagctgcaccagcgagagcacagcctttgtgcaggccatgatggagggcagccacaccaaggctgacctgcgggacctcttccagaaggccgccaagaagcaccagaacatgtaccgcctggccatgactggagctggcatcgacagacacctgttctgcctgtacctggtgtccaagtacctgggcgtgagcagccccttcctggccgaggtgctgtctgagccctggaggctgagcaccagccagatcccccagagccagatccgcatgtttgatcctgagcagcaccccaaccacctgggcgctgggggcggcttcggccctgtggctgatgatggctacggcgtgtcctacatgattgctggggagaacaccatcttcttccacatcagcagcaagttcagcagcagcgagaccaatgcccagcgcttcggcaaccacatcaggaaggccctgctggacattgctgacctcttccaggtgcccaaggcctacagctag

SEQ ID NO: 57168 - DNA, 378 bp, Artificial Sequence
  derived and/or modified sequence
atggccgaggcccaccaggccgtggccttccagttcaccgtgacccccgacggagtcgatttccgcttgtctcgtgaagcgctcaagcacgtgtatctctctggaatcaacagctggaaaaagaggctcatcagaattaaaaatggcattttaagaggtgtataccctggatcacccacgagctggcttgtcgtcattatggcaacggtcggcagttcattctgtaatgtggatatatcactgggtctggtttcttgtatccaacgctgcttacctcagggttgtgggccataccagacaccccaaactcgggccctgctaagcatggctattttctccacaggcgtatgggtcactggtatattcttcttcaggtag

SEQ ID NO: 57169 - DNA, 2217 bp, Artificial Sequence
  derived and/or modified sequence
atggccgaggcccaccaggccgtggccttccagttcaccgtgacccccgatggtgttgattttcgactctctcgggaggcgttgaaacacgtctacctgagcggcatcaactcatggaagaagcgcctgattcgtattaaaaatggtatactgcgaggcgtgtaccccggaagtcccaccagttggctggtcgttatcatggcgaccgtcggctccagcttctgcaacgtcgacattagccttggacttgtatcttgcattcagaggtgtctgccccagggatgtggcccctaccaaacaccacagactagagcacttttgagcatggctatattttcaacaggagtgtgggtaacaggcatcttcttcttcagacagaccctgaaattgctgctgtgctaccatggatggatgttcgagatgcacggtaagaccagcaacctgactagaatttgggcctatctggaatccgtccggccgctactggacgatgaggaatattacaggatggagctgttagctaaggagttccaggataaaactgctccccgcctgcagaaatacctggtgctcaagagctggtgggccagtaattacgtctctgactggtgggaggagtacatctatcttagaggtcgcagccctctaatggtcaactccaattattatgtgatggacctggttctcatcaagaacacggacgttcaggcagctagactgggcaatatcatccacgctatgatcatgtaccggcggaaactggaccgtgaggagattaagcctgttatggccttggggattgtgcccatgtgcagctaccagatggagagaatgttcaacaccacacgtattcctggcaaagacaccgacgtcctgcagcatctgagtgattcccgacatgtcgccgtatatcataaaggccgcttctttaaattatggctgtatgagggcgctcgcctgctaaagccacaggatctcgagatgcagtttcagagaattcttgatgatccctcccctcctcagcccggagaggagaagctcgccgccctgacggcaggcggacgcgtcgaatgggctcaggctagacaagccttcttcagctccgggaagaacaaggccgcactggaggctatcgagagggccgcctttttcgtggctctcgatgaggagagctattcctacgacccggaggacgaggctagcctctccctctatgggaaggctctgttgcatgggaactgttataaccgctggttcgataagtcctttacattaatctccttcaaaaatggccagctgggcctcaacgcagagcatgcgtgggctgatgcaccgatcatcgggcacctctgggagttcgttcttggaacagattccttccaccttggctacacagagacaggccattgcttgggaaagcctaatcccgcactcgcaccaccaacacgcctgcagtgggacatcccaaagcagtgccaagccgtgatcgagtcaagttaccaggtcgcaaaagctttagctgatgacgtggagctgtattgcttccagtttctgcccttcggtaagggattaatcaaaaagtgcaggacctcaccagatgcattcgttcagattgccctgcagttggcgcacttcagggatcgggggaaattttgcctaacctatgaggcctccatgaccagaatgtttcgcgagggcagaaccgagacggtcaggagttgcacctctgaaagcaccgcctttgttcaagctatgatggagggatctcataccaaggcagacctccgtgatctctttcagaaagcggccaagaaacaccagaacatgtataggctagccatgactggcgccggcatcgacagacatcttttttgcctgtatcttgtaagtaaatatctgggcgtaagcagtccctttctggccgaagttctgtcagagccttggaggttgtctacttcacagattcctcagtcccagattcgtatgtttgacccagaacagcaccctaaccatctaggagcaggtgggggtttcggacctgtagcagacgatggctacggggtgagctacatgattgccggagagaacacaatctttttccatatttcctccaaattttcttcatccgaaacaaatgctcagcgctttgggaatcacattcggaaggctctgttggatattgcagatctttttcaagtccccaaggcatatagttag

SEQ ID NO: 57170 - DNA, 378 bp, Artificial Sequence
  derived and/or modified sequence
atggcggaagcccatcaggccgtggctttccagttcactgttacgccagacggagtagactttcggctgtcacgtgaggctctgaagcacgtgtacctgtccggaatcaactcctggaagaagaggctcatcaggatcaaaaatggaatcttaaggggtgtgtaccctgggtctccaacctcatggctcgtggtcattatggccaccgtgggaagctctttctgtaacgtcgatataagtctgggtctggtaagttgcatccagcggtgtctcccgcaaggttgtggtccttaccagactccgcagactcgtgccctgctcagtatggccatcttcagtacaggtgtgtgggtcacaggtatttttttctttcggtag

SEQ ID NO: 57171 - DNA, 2217 bp, Artificial Sequence
  derived and/or modified sequence
atggccgaagcccatcaggcggtagcctttcagtttaccgtaaccccagatggtgtagacttccggttatcccgggaagccttgaagcatgtgtacctgtctggcattaacagctggaaaaaaagactgattcgcattaaaaatggaatcttgcgcggagtttaccccggtagccctactagctggttggtggtcattatggcaactgtaggttcttctttctgcaatgttgacatcagcctaggcttggtgtcctgtatccagcgctgccttccccagggatgtggtccttatcaaacgccccaaactcgggcactgttatcaatggccatctttagtacgggagtttgggtgaccgggatatttttcttcagacagactctgaagttactcttgtgctaccatggttggatgttcgagatgcacgggaagacgagcaatctgactcgtatttgggcctacctagagagcgtgcgcccactgctggatgacgaagagtactaccgcatggagctactggccaaggagttccaggataagacagcacctcgtctgcagaagtatctcgtactgaaatcatggtgggccagtaattatgtctcagattggtgggaggagtatatttacctcagaggtcgatctccgctcatggtgaattctaattactacgtcatggatctggtgcttattaagaatactgatgtgcaggcagctaggttgggaaacattattcacgccatgatcatgtaccggcgaaagctggatcgtgaagaaattaagcccgttatggcgttaggcattgtgccaatgtgtagctaccagatggagcgcatgttcaacaccacccgcattcccggtaaggataccgacgtccttcaacacctttccgacagcaggcacgtggctgtgtatcacaagggaaggttttttaagctgtggctatatgaaggggctagactccttaagccgcaggacttagaaatgcaatttcagcggatattggatgaccccagtccgccacagcctggggaggaaaagctggccgcattgactgccggaggaagggtcgagtgggcgcaagccaggcaggcatttttcagttcggggaagaacaaggccgcactggaggcgattgaacgtgcggcattttttgtggctctcgatgaagagagttactcttacgacccagaggatgaggcatcactgtccctatacggcaaagccctcctgcatggtaattgttataaccggtggttcgataagtcttttacactgattagttttaagaacggtcagttaggcttgaacgcagagcatgcatgggccgacgctccgattattgggcatctctgggagttcgttctggggacagacagctttcacttaggctatacagagacagggcactgtctcggcaaacccaatcctgcactggcacctcctacgagactacagtgggatattcccaagcagtgccaagccgttatcgagtcttcctaccaggttgccaaagccttggctgatgacgtcgaactgtattgctttcaattccttccctttgggaaaggactcatcaagaaatgtaggacaagcccagacgcatttgttcaaatagctctacagctggcacacttccgggacagaggaaagttttgtttaacttatgaggccagcatgacacgcatgttccgagagggccgaaccgagacagttcgttcatgtacatcagagagcactgccttcgtccaggcgatgatggagggcagtcataccaaagcagatctgcgcgatctgtttcagaaagctgccaaaaaacaccagaatatgtacagactggccatgacaggagctgggatcgacaggcatttgttctgcctgtacctggtgagtaagtatttaggtgtatcttcacctttccttgccgaagttttgagtgagccttggcgtctgagcacatcccaaattccccagagtcagattcgcatgttcgaccccgagcagcacccaaaccatcttggcgcagggggaggctttggcccagtggccgatgacgggtatggggtttcctatatgatcgcaggggagaacactattttctttcatatttcctctaagtttagctcttcagagaccaacgcccaacggttcgggaatcacattaggaaagccttgctagatatcgccgacctgtttcaggtgccaaaagcttatagctag

SEQ ID NO: 57172 - DNA, 558 bp, Artificial Sequence
  derived and/or modified sequence
acttccaggggcgcctctctcccctgcccgcgccctcgctgacgccccccaactccaggctgcccttcgccgtccttggggctcctggagctttcaaggcccaaatcccctgcaccacagtggctgtgcccacccggaaggctggcgcgaggatttggcggcggtgccgaccaacccccaggatggcggaagctcaccaggccgtggccttccagttcacggtgaccccagacggggtcgacttccggctcagtcgggaggccctgaaacacgtctacctgtctgggatcaactcctggaagaaacgcctgatccgcatcaagaatggcatcctcaggggcgtgtaccctggcagccccaccagctggctggtcgtcatcatggcaacagtgggttcctccttctgcaacgtggacatctccttggggctggtcagttgcatccagagatgcctccctcaggggtgtggcccctaccagaccccgcagacccgggcacttctcagcatggccatcttctccacgggcgtctgggtgacgggcatcttcttcttccgcc

SEQ ID NO: 57173 - DNA, 2577 bp, Artificial Sequence
  derived and/or modified sequence
atttttagctctaaagccaccatcctcacgagactctggggccccccaggctcccagacctttgagcaaccttcaccgcacagaaacccagccgcgccctgcaattcccaccgcggaaggtgccgaccaacccccaggatggcggaagctcaccaggccgtggccttccagttcacggtgaccccagacggggtcgacttccggctcagtcgggaggccctgaaacacgtctacctgtctgggatcaactcctggaagaaacgcctgatccgcatcaagaatggcatcctcaggggcgtgtaccctggcagccccaccagctggctggtcgtcatcatggcaacagtgggttcctccttctgcaacgtggacatctccttggggctggtcagttgcatccagagatgcctccctcaggggtgtggcccctaccagaccccgcagacccgggcacttctcagcatggccatcttctccacgggcgtctgggtgacgggcatcttcttcttccgccaaaccctgaagctgcttctctgctaccatgggtggatgtttgagatgcatggcaagaccagcaacttgaccaggatctgggcttacctagagtctgtgcgccccttgttggatgatgaggaatattaccgcatggagttgctggccaaagaattccaggacaagactgcccccaggctgcagaaatacctggtgctcaagtcatggtgggcaagtaactatgtgagtgactggtgggaagagtacatctaccttcgaggcaggagccctctcatggtgaacagcaactattatgtcatggaccttgtgctcatcaagaatacagacgtgcaggcagcccgcctgggaaacatcatccacgccatgatcatgtatcgccgtaaactggaccgtgaagaaatcaagcctgtgatggcactgggcatagtgcctatgtgctcctaccagatggagaggatgttcaacaccactcggatcccgggcaaggacacagatgtgctacagcacctctcagacagccggcacgtggctgtctaccacaagggacgcttcttcaagctgtggctctatgagggcgcccgtctgctcaagcctcaggatctggagatgcagttccagaggatcctggacgacccctccccacctcagcctggggaggagaagctggcagccctcactgcaggaggaagggtggagtgggcgcaggcacgccaggccttctttagctctggaaagaataaggctgccttggaggccatcgagcgtgccgctttcttcgtggccctggatgaggaatcctactcctatgaccccgaagatgaggccagcctcagcctctatggcaaggccctgctacatggcaactgctacaacaggtggtttgacaaatccttcactctcatttccttcaagaatggccagttgggtctcaatgcagagcatgcgtgggcagatgctcccatcattgggcacctctgggagtttgtcctgggcacagacagcttccacctgggctacacggagaccgggcactgcctgggcaaaccgaaccctgcgctcgcacctcctacacggctgcagtgggacattccaaaacagtgccaggcggtcatcgagagttcctaccaggtggccaaggcgttggcagacgacgtggagttgtactgcttccagttcctgccctttggcaaaggcctcatcaagaagtgccggaccagccctgatgcctttgtgcagatcgcgctgcagctggctcacttccgggacaggggtaagttctgcctgacctatgaggcctcaatgaccagaatgttccgggagggacggactgagactgtgcgttcctgtaccagcgagtccacagcctttgtgcaggccatgatggaggggtcccacacaaaagcagacctgcgagatctcttccagaaggctgctaagaagcaccagaatatgtaccgcctggccatgaccggggcagggatcgacaggcacctcttctgcctttacttggtctccaagtacctaggagtcagctctcctttccttgctgaggtgctctcggaaccctggcgtctctccaccagccagatcccccaatcccagatccgcatgttcgacccagagcagcaccccaatcacctgggcgctggaggtggctttggccctgtagcagatgatggctatggagtttcctacatgattgcaggcgagaacacgatcttcttccacatctccagcaagttctcaagctcagagacgaacgcccagcgctttggaaaccacatccgcaaagccctgctggacattgctgatcttttccaagttcccaaggcctacagctgaagcccttaggtacctgtgttttgtttgggaactcggaggccctccccctcccccagctcagaccacagaggtggcaagagaagggctgaagctggaagactgttcatgagggacttgtgtgacctgctttgaaatgtgtgactctgctgagtgacgtaggctctgagatagctgtccacgcccacgtgtttgcttggaataaatacttgcctcagaaccttc

SEQ ID NO: 57174 - DNA, 378 bp, Artificial Sequence
  derived and/or modified sequence
atggccgaggcccaccaggccgtggccttccagttcaccgtgacccccgacggcgtggacttcagactgagcagagaggccctgaagcacgtgtacctgagcggcatcaacagctggaagaagagactgatcagaatcaagaacggcatcctgagaggcgtgtaccccggcagccccaccagctggctggtggtgatcatggccaccgtgggcagcagcttctgcaacgtggacatcagcctgggcctggtgagctgcatccagagatgcctgccccagggctgcggcccctaccagaccccccagaccagagccctgctgagcatggccatcttcagcaccggcgtgtgggtgaccggcatcttcttcttcagatag

SEQ ID NO: 57175 - DNA, 2217 bp, Artificial Sequence
  derived and/or modified sequence
atggccgaggcccaccaggccgtggccttccagttcaccgtgacccccgacggcgtggacttcagactgagcagagaggccctgaagcacgtgtacctgagcggcatcaacagctggaagaagagactgatcagaatcaagaacggcatcctgagaggcgtgtaccccggcagccccaccagctggctggtggtgatcatggccaccgtgggcagcagcttctgcaacgtggacatcagcctgggcctggtgagctgcatccagagatgcctgccccagggctgcggcccctaccagaccccccagaccagagccctgctgagcatggccatcttcagcaccggcgtgtgggtgaccggcatcttcttcttcagacagaccctgaagctgctgctgtgctaccacggctggatgttcgagatgcacggcaagaccagcaacctgaccagaatctgggcctacctggagagcgtgagacccctgctggacgacgaggagtactacagaatggagctgctggccaaggagttccaggacaagaccgcccccagactgcagaagtacctggtgctgaagagctggtgggccagcaactacgtgagcgactggtgggaggagtacatctacctgagaggcagaagccccctgatggtgaacagcaactactacgtgatggacctggtgctgatcaagaacaccgacgtgcaggccgccagactgggcaacatcatccacgccatgatcatgtacagaagaaagctggacagagaggagatcaagcccgtgatggccctgggcatcgtgcccatgtgcagctaccagatggagagaatgttcaacaccaccagaatccccggcaaggacaccgacgtgctgcagcacctgagcgacagcagacacgtggccgtgtaccacaagggcagattcttcaagctgtggctgtacgagggcgccagactgctgaagccccaggacctggagatgcagttccagagaatcctggacgaccccagccccccccagcccggcgaggagaagctggccgccctgaccgccggcggcagagtggagtgggcccaggccagacaggccttcttcagcagcggcaagaacaaggccgccctggaggccatcgagagagccgccttcttcgtggccctggacgaggagagctacagctacgaccccgaggacgaggccagcctgagcctgtacggcaaggccctgctgcacggcaactgctacaacagatggttcgacaagagcttcaccctgatcagcttcaagaacggccagctgggcctgaacgccgagcacgcctgggccgacgcccccatcatcggccacctgtgggagttcgtgctgggcaccgacagcttccacctgggctacaccgagaccggccactgcctgggcaagcccaaccccgccctggccccccccaccagactgcagtgggacatccccaagcagtgccaggccgtgatcgagagcagctaccaggtggccaaggccctggccgacgacgtggagctgtactgcttccagttcctgcccttcggcaagggcctgatcaagaagtgcagaaccagccccgacgccttcgtgcagatcgccctgcagctggcccacttcagagacagaggcaagttctgcctgacctacgaggccagcatgaccagaatgttcagagagggcagaaccgagaccgtgagaagctgcaccagcgagagcaccgccttcgtgcaggccatgatggagggcagccacaccaaggccgacctgagagacctgttccagaaggccgccaagaagcaccagaacatgtacagactggccatgaccggcgccggcatcgacagacacctgttctgcctgtacctggtgagcaagtacctgggcgtgagcagccccttcctggccgaggtgctgagcgagccctggagactgagcaccagccagatcccccagagccagatcagaatgttcgaccccgagcagcaccccaaccacctgggcgccggcggcggcttcggccccgtggccgacgacggctacggcgtgagctacatgatcgccggcgagaacaccatcttcttccacatcagcagcaagttcagcagcagcgagaccaacgcccagagattcggcaaccacatcagaaaggccctgctggacatcgccgacctgttccaggtgcccaaggcctacagctag

SEQ ID NO: 57176 - protein, 548 aa, Artificial Sequence
  derived and/or modified sequence
MDELFPLIFPAEPAQASGPYVEIIEQPKQRGMRFRYKCEGRSAGSIPGERSTDTTKTHPTIKINGYTGPGTVRISLVTKDPPHRPHPHELVGKDCRDGFYEAELCPDRCIHSFQNLGIQCVKKRDLEQAISQRIQTNNNPFQEEQRGDYDLNAVRLCFQVTVRDPSGRPLRLPPVLSHPIFDNRAPNTAELKICRVNRNSGSCLGGDEIFLLCDKVQKEDIEVYFTGPGWEARGSFSQADVHRQVAIVFRTPPYADPSLQAPVRVSMQLRRPSDRELSEPMEFQYLPDTDDRHRIEEKRKRTYETFKSIMKKSPFSGPTDPRPPPRRIAVPSRSSASVPKPAPQPYPFTSSLSTINYDEFPTMVFPSGQISQASALAPAPPQVLPQAPAPAPAPAMVSALAQAPAPVPVLAPGPPQAVAPPAPKPTQAGEGTLSEALLQLQFDDEDLGALLGNSTDPAVFTDLASVDNSEFQQLLNQGIPVAPHTTEPMLMEYPEAITRLVTGAQRPPDPAPAPLGAPGLPNGLLSGDEDFSSIADMDFSALLSQISS

SEQ ID NO: 57177 - DNA, 1647 bp, Artificial Sequence
  derived and/or modified sequence
atggacgagctgttccccctgatcttccccgccgagcccgcccaggccagcggcccctacgtggagatcatcgagcagcccaagcagagaggcatgagattcagatacaagtgcgagggcagaagcgccggcagcatccccggcgagagaagcaccgacaccaccaagacccaccccaccatcaagatcaacggctacaccggccccggcaccgtgagaatcagcctggtgaccaaggaccccccccacagaccccacccccacgagctggtgggcaaggactgcagagacggcttctacgaggccgagctgtgccccgacagatgcatccacagcttccagaacctgggcatccagtgcgtgaagaagagagacctggagcaggccatcagccagagaatccagaccaacaacaaccccttccaggaggagcagagaggcgactacgacctgaacgccgtgagactgtgcttccaggtgaccgtgagagaccccagcggcagacccctgagactgccccccgtgctgagccaccccatcttcgacaacagagcccccaacaccgccgagctgaagatctgcagagtgaacagaaacagcggcagctgcctgggcggcgacgagatcttcctgctgtgcgacaaggtgcagaaggaggacatcgaggtgtacttcaccggccccggctgggaggccagaggcagcttcagccaggccgacgtgcacagacaggtggccatcgtgttcagaacccccccctacgccgaccccagcctgcaggcccccgtgagagtgagcatgcagctgagaagacccagcgacagagagctgagcgagcccatggagttccagtacctgcccgacaccgacgacagacacagaatcgaggagaagagaaagagaacctacgagaccttcaagagcatcatgaagaagagccccttcagcggccccaccgaccccagacccccccccagaagaatcgccgtgcccagcagaagcagcgccagcgtgcccaagcccgccccccagccctaccccttcaccagcagcctgagcaccatcaactacgacgagttccccaccatggtgttccccagcggccagatcagccaggccagcgccctggcccccgcccccccccaggtgctgccccaggcccccgcccccgcccccgcccccgccatggtgagcgccctggcccaggcccccgcccccgtgcccgtgctggcccccggccccccccaggccgtggccccccccgcccccaagcccacccaggccggcgagggcaccctgagcgaggccctgctgcagctgcagttcgacgacgaggacctgggcgccctgctgggcaacagcaccgaccccgccgtgttcaccgacctggccagcgtggacaacagcgagttccagcagctgctgaaccagggcatccccgtggccccccacaccaccgagcccatgctgatggagtaccccgaggccatcaccagactggtgaccggcgcccagagaccccccgaccccgcccccgcccccctgggcgcccccggcctgcccaacggcctgctgagcggcgacgaggacttcagcagcatcgccgacatggacttcagcgccctgctgagccagatcagcagctag

SEQ ID NO: 57178 - DNA, 1647 bp, Artificial Sequence
  derived and/or modified sequence
atggacgaattatttccactgatattccccgcagagccggcacaggcctcagggccatacgtcgaaattatcgagcagccaaaacagcgggggatgagatttcggtataaatgtgagggaaggtctgccggctcgatccccggtgagcgctcaactgatacaacgaagacccaccctactattaaaatcaatggatacaccggcccaggcaccgtcagaatatcactcgtaacgaaagaccctccacatagaccccacccacatgagctggtaggtaaagattgccgggatgggttctacgaagccgaactgtgcccagaccggtgtattcactctttccagaatctgggcatccagtgcgtgaagaagagagacttggaacaagccatatcccagaggatccagactaataataatccattccaagaggaacaacggggggactatgacctgaacgctgtgaggctgtgctttcaggtgaccgttagggatccctctggcaggccactgaggctcccaccagtcttgtctcatcccattttcgacaacagagctccaaatactgccgagcttaagatatgccgagtgaatcgcaacagtggctcatgcctggggggggacgagattttcctgctgtgtgataaagtacagaaggaggatatagaggtgtacttcacaggacccggctgggaggccagaggatccttttctcaagctgatgtgcatcgccaggttgccatagtgtttagaacgcctccctacgctgatccgtctcttcaggcaccagtgcgagtgtccatgcagttgaggaggccgagcgatagagagctgagtgagccaatggagttccagtatctgcctgatactgatgaccgtcacagaatcgaggagaagcgtaaaagaacgtatgaaacatttaagagtataatgaagaagagcccatttagcggacctaccgatcctcggcctccccctcgccgaatcgctgtgccttcaagaagtagcgcatctgtccccaaacccgctccacagccatacccgttcacttccagtctctcaactataaactacgatgaattcccaacaatggtctttccttccggccagatttcgcaggcgagcgcactcgctcccgcccctcctcaggtgctgccacaggcgcctgcccccgcccccgcccccgccatggtaagcgcactcgcccaggcccctgctccagtacccgtactcgcccctggaccaccccaggcggtggctcccccagctcccaagcctacacaggccggggagggcactctcagcgaagcgctgctgcaactccagtttgacgatgaggatttgggagcactactgggcaactctaccgacccagccgtgtttaccgacctggcaagtgtcgacaacagcgagtttcagcagctgttgaatcaggggattccggtggcccctcacacaacggagccaatgctgatggagtatccagaagccataaccaggctggtcaccggagctcaaagaccccctgaccctgcacctgcccccctcggtgcacccggcctgccaaacggccttcttagcggcgatgaggacttcagtagtatcgccgacatggactttagcgctcttctgtctcagatatcaagctag

SEQ ID NO: 57179 - DNA, 1647 bp, Artificial Sequence
  derived and/or modified sequence
atggatgagctgttccccctcatcttccctgctgagcccgcccaggccagcggcccctacgtggagatcatcgagcagcccaagcagaggggcatgaggttccgctacaagtgtgagggccgctctgctggcagcatccctggagagaggagcacagacaccaccaagacccaccccaccatcaagatcaatggctacacaggccctggcaccgtgcgcatcagcctggtgaccaaggaccccccccaccggccccacccccatgagctggtgggcaaggactgcagagatggcttctatgaggccgagctgtgcccagaccgctgcatccacagcttccagaacctgggcatccagtgtgtgaagaagagggacctggagcaggccatcagccagaggatccagaccaacaacaaccccttccaggaggagcagagaggagactatgacctgaatgctgtgcggctgtgcttccaggtgacagtgcgggaccccagcggccggcccctgcggctgccccctgtgctgagccaccccatctttgacaacagagcccccaacacagctgagctgaagatctgccgggtgaacagaaacagcggcagctgcctgggcggagatgagatcttcctgctgtgtgacaaggtgcagaaggaggacatcgaggtgtacttcaccggccctggctgggaggcccggggcagcttcagccaggctgatgtgcaccggcaggtggccatcgtgttccgcaccccaccctatgctgaccccagcctgcaggcccctgtgcgggtgtccatgcagctgcggcggcccagcgaccgggagctgtctgagcccatggagttccagtacctgcctgacacagatgacagacacagaattgaggagaagaggaagaggacctatgagaccttcaagagcatcatgaagaagagccccttcagcggccccacagacccccggcccccacccaggagaattgctgtgcccagccgcagcagcgcctctgtgcccaagccagccccccagccctaccccttcaccagcagcctgagcaccatcaactatgatgagttccccaccatggtgttccccagcggccagatcagccaggccagcgccctggccccagccccaccccaggtgctgccccaggccccagccccagccccagccccagccatggtgtctgccctggcccaggccccagcccctgtgcctgtgctggcccctggccccccccaggccgtggcccccccagcccccaagcccacccaggccggggagggcaccctgtctgaggccctgctgcagctgcagtttgatgatgaggacctgggcgccctgctgggcaacagcacagatcctgctgtgttcacagacctggcctctgtggacaacagcgagttccagcagctgctgaaccagggcatccctgtggccccccacaccacagagcccatgctgatggagtacccagaggccatcacccggctggtgactggagcccagaggcccccagaccctgccccagcccccctgggcgcccctggcctgcccaacggcctgctgtctggagatgaggacttcagcagcattgctgacatggacttcagcgccctgctgagccagatcagcagctag

SEQ ID NO: 57180 - DNA, 1647 bp, Artificial Sequence
  derived and/or modified sequence
atggacgagctgttccccctgatcttccccgccgagcccgcccaggccagtgggccttatgtggagattattgaacagccaaagcagcgtggcatgcggtttagatataagtgtgagggccgatctgccggctccattcccggggagaggagcaccgacactaccaagacacatccgaccattaagattaatggctataccggccctggaaccgtccgcatctcccttgtgactaaggatcctccacatcgacctcatcctcatgaattggtcggcaaggattgccgtgacggattctacgaagcagaattgtgccccgaccggtgtatccacagtttccaaaacttgggcattcaatgtgttaaaaagcgggatctggaacaagcaatatcccagcggatccagactaataataatcctttccaggaggagcagcgaggggactatgacttgaacgcggtccggctgtgctttcaagttaccgtgcgagatccctcaggaagacccctcaggctgccccctgtgttgtcacaccccatatttgacaaccgggcccctaataccgcagagcttaagatctgtagagtgaaccgcaattcaggctcctgtctcggcggcgacgagatttttctcctctgcgataaggttcagaaagaggacatcgaagtctatttcaccggtccaggctgggaagcccgcgggtcatttagccaggccgatgtgcataggcaggtggcaattgtcttcagaacaccaccctacgccgatccctccctgcaggccccagtgagagtgtctatgcaactgaggcggccgtccgatagggaactctcagagcctatggagtttcagtacctgcccgatactgatgaccgtcaccgaatagaggagaagaggaagaggacttatgagacattcaaatccataatgaaaaaatcccctttttcaggacccaccgatcctagaccaccccctcgccgaattgccgtgcccagccgctccagcgctagcgtccccaagccggcacctcagccgtacccttttacttcgagtctctctacaatcaattatgacgagtttcccaccatggtctttccatccggacagatctctcaggcgagtgcgctggccccagcccctcctcaggtgctgccacaggctcccgcccctgcaccagctccggccatggtgtccgcactggcgcaagcgcctgcccctgtcccagtcctggccccaggaccaccacaggcagtggcaccaccagcacccaagccgacgcaggctggcgagggaacacttagcgaagctctcctgcagctccagtttgatgacgaggaccttggtgcactgcttggtaacagcaccgaccccgccgtgttcacagacctggcctctgtggataattctgagttccagcagttactgaaccaagggatccccgtggcaccacacactaccgagcccatgctgatggagtaccctgaggctataacccgcctcgtcaccggggcacagaggcctcctgacccagccccagcaccacttggagcacccggcctgccaaacgggttacttagtggagacgaggatttttctagtattgccgatatggacttctccgcacttctgtcacagatctctagttag

SEQ ID NO: 57181 - DNA, 1647 bp, Artificial Sequence
  derived and/or modified sequence
atggacgaattgttccccttgatcttcccagcggaacctgctcaggccagcgggccttatgtagagattatcgaacagcctaagcagcgcggaatgagatttcgctataaatgtgagggccgtagcgctggctcaatcccgggagagaggtctacagacaccaccaagacacaccctacaatcaaaataaacggctatactggcccagggaccgtcaggattagtctcgtgacaaaagacccccctcatcgcccacatccccacgaactggtcggcaaggactgcagggacgggttttacgaggctgagctgtgtcccgatcggtgtatccatagttttcagaatctgggcattcagtgcgtgaaaaagcgtgacttggagcaggctatcagccagcgcatccagaccaacaacaatccatttcaggaagagcagcgaggagactacgacctcaatgctgtgcggctgtgtttccaagtaaccgttcgggacccatccggaagacccctaagactgcccccagttttaagccacccaatatttgataaccgggcacctaataccgctgagcttaagatctgccgggttaaccggaactcaggaagctgtctggggggtgatgaaatctttctcctttgcgataaagtgcaaaaagaggacattgaagtgtacttcactggtccgggttgggaagcacggggttcattctctcaggccgatgtgcatagacaggtggccatcgtttttcggactccaccctacgccgatccatcattgcaagctccagtgagggtgagtatgcagctgcggaggccatctgatagagagttgagcgagcccatggagttccagtacttacctgacaccgacgatagacaccggatcgaggaaaaaaggaagcgcacttacgaaacatttaagagcatcatgaaaaaaagtcctttttcaggcccaaccgatcctagacccccacccaggaggattgctgtgccgagtaggtcttcagccagcgtgccaaagcctgctccgcagccatacccttttactagctctctcagcacgatcaactacgatgagttcccaaccatggtattccccagcggccagatcagccaggcttcggccctcgcccctgcccctccgcaggtgcttccacaggcaccagccccagcccctgcccctgcaatggtgagcgcactcgcccaggccccagccccagtgcccgtcctggctcccggtcctccacaagcagtagcacccccagcgccaaaaccgactcaagccggtgaggggacgttatcagaggcgttacttcagttacaattcgacgacgaagacctgggcgcacttctcgggaattctaccgatccagccgtttttaccgatctggcaagcgtcgataattctgagttccagcagctgcttaatcagggcattcccgttgcgccacacaccacagaacccatgctaatggagtatcccgaagccatcacgcggctggtaactggtgcccagcggcctcccgacccagcacctgcacctctgggggcacccggtcttccgaatggactgctttcgggagatgaggattttagctcaatcgcagacatggacttttccgcactgttgtcccagatctccagttag

SEQ ID NO: 57182 - DNA, 2681 bp, Artificial Sequence
  derived and/or modified sequence
cgtcctcggcgaggcgcgcacttggccccgacccccggcagcggctgtgcgtgcagcctcttcgtcctccgcgcggcgtgcacttgctcccggcccctgcgccgggcggcggcggggcagcgcgcaggcgcggccggattccgggcagtgacgcgacggcgggccgcgcggcgcatttccgcctctggcgaatggctcgtctgtagtgcacgccgcgggcccagctgcgaccccggccccgcccccgggaccccggccatggacgaactgttccccctcatcttcccggcagagccagcccaggcctctggcccctatgtggagatcattgagcagcccaagcagcggggcatgcgcttccgctacaagtgcgaggggcgctccgcgggcagcatcccaggcgagaggagcacagataccaccaagacccaccccaccatcaagatcaatggctacacaggaccagggacagtgcgcatctccctggtcaccaaggaccctcctcaccggcctcacccccacgagcttgtaggaaaggactgccgggatggcttctatgaggctgagctctgcccggaccgctgcatccacagtttccagaacctgggaatccagtgtgtgaagaagcgggacctggagcaggctatcagtcagcgcatccagaccaacaacaaccccttccaagaagagcagcgtggggactacgacctgaatgctgtgcggctctgcttccaggtgacagtgcgggacccatcaggcaggcccctccgcctgccgcctgtcctttctcatcccatctttgacaatcgtgcccccaacactgccgagctcaagatctgccgagtgaaccgaaactctggcagctgcctcggtggggatgagatcttcctactgtgtgacaaggtgcagaaagaggacattgaggtgtatttcacgggaccaggctgggaggcccgaggctccttttcgcaagctgatgtgcaccgacaagtggccattgtgttccggacccctccctacgcagaccccagcctgcaggctcctgtgcgtgtctccatgcagctgcggcggccttccgaccgggagctcagtgagcccatggaattccagtacctgccagatacagacgatcgtcaccggattgaggagaaacgtaaaaggacatatgagaccttcaagagcatcatgaagaagagtcctttcagcggacccaccgacccccggcctccacctcgacgcattgctgtgccttcccgcagctcagcttctgtccccaagccagcaccccagccctatccctttacgtcatccctgagcaccatcaactatgatgagtttcccaccatggtgtttccttctgggcagatcagccaggcctcggccttggccccggcccctccccaagtcctgccccaggctccagcccctgcccctgctccagccatggtatcagctctggcccaggccccagcccctgtcccagtcctagccccaggccctcctcaggctgtggccccacctgcccccaagcccacccaggctggggaaggaacgctgtcagaggccctgctgcagctgcagtttgatgatgaagacctgggggccttgcttggcaacagcacagacccagctgtgttcacagacctggcatccgtcgacaactccgagtttcagcagctgctgaaccagggcatacctgtggccccccacacaactgagcccatgctgatggagtaccctgaggctataactcgcctagtgacaggggcccagaggccccccgacccagctcctgctccactgggggccccggggctccccaatggcctcctttcaggagatgaagacttctcctccattgcggacatggacttctcagccctgctgagtcagatcagctcctaagggggtgacgcctgccctccccagagcactgggttgcaggggattgaagccctccaaaagcacttacggattctggtggggtgtgttccaactgcccccaactttgtggatgtcttccttggaggggggagccatattttattcttttattgtcagtatctgtatctctctctctttttggaggtgcttaagcagaagcattaacttctctggaaaggggggagctggggaaactcaaacttttcccctgtcctgatggtcagctcccttctctgtagggaactctggggtcccccatccccatcctccagcttctggtactctcctagagacagaagcaggctggaggtaaggcctttgagcccacaaagccttatcaagtgtcttccatcatggattcattacagcttaatcaaaataacgccccagataccagcccctgtatggcactggcattgtccctgtgcctaacaccagcgtttgaggggctggccttcctgccctacagaggtctctgccggctctttccttgctcaaccatggctgaaggaaaccagtgcaacagcactggctctctccaggatccagaaggggtttggtctgggacttccttgctctccctcttctcaagtgccttaatagtagggtaagttgttaagagtgggggagagcaggctggcagctctccagtcaggaggcatagtttttactgaacaatcaaagcacttggactcttgctctttctactctgaactaataaatctgttgccaagctg

SEQ ID NO: 57183 - protein, 404 aa, Artificial Sequence
  derived and/or modified sequence
MERGWFHGKGFLLGFILHLLLQDSHLQLVTSFLWLNMWNPDECGGIKKSGMATENLWLSDVFIEESVDQTPAGLMASMSIVKATSNTISQCGWSASANWTPSISPSMDRGERSPSALSPTQVTRAWRRMSRSFQIHHRTSFRTRREWVLLGIQKRTIKVTVATNQYEQAIFHVAIRRRCRPSPYVVNFLVPSGILIAIDALSFYLPLESGNCAPFKMTVLLGYSVFLLMMNDLLPATSTSSHASLVRPHPSRDQKRGVYFALCLSLMVGSLLETIFITHLLHVATTQPLPLPRWLHSLLLHCTGQGRCCPTAPQKGNKGPGLTPTHLPGVKEPEVSAGQMPGPGEAELTGGSEWTRAQREHEAQKQHSVELWVQFSHAMDALLFRLYLLFMASSIITVICLWNT

SEQ ID NO: 57184 - protein, 233 aa, Artificial Sequence
  derived and/or modified sequence
MVAIRRRCRPSPYVVNFLVPSGILIAIDALSFYLPLESGNCAPFKMTVLLGYSVFLLMMNDLLPATSTSSHASLVRPHPSRDQKRGVYFALCLSLMVGSLLETIFITHLLHVATTQPLPLPRWLHSLLLHCTGQGRCCPTAPQKGNKGPGLTPTHLPGVKEPEVSAGQMPGPGEAELTGGSEWTRAQREHEAQKQHSVELWVQFSHAMDALLFRLYLLFMASSIITVICLWNT

SEQ ID NO: 57185 - DNA, 1215 bp, Artificial Sequence
  derived and/or modified sequence
atggaacgagggtggttccacggaaaggggttcctgcttggcttcatcttgcatcttctattacaagacagccacctgcagctagtgaccagcttcctgtggcttaatatgtggaacccggacgagtgcgggggtataaagaagagcggcatggcgaccgaaaatctgtggctgtctgacgtctttattgaggaatcagttgatcagacacccgccggattgatggcctccatgtctatcgttaaagccacctctaatacgatttcccaatgtgggtggtcagcctcagccaattggacgccttcgattagtccgtctatggataggggagaacgctccccctcggccctctcacctacacaggtcactcgtgcctggaggcggatgagccgaagctttcagatccatcaccgcacaagttttcgcacccggagggaatgggtcctgttgggcatccagaagaggaccatcaaggtcaccgtcgccaccaatcaatacgaacaggccatcttccacgttgcaatcagaagacgttgcaggcctagcccctatgtcgtgaacttcttagtgcctagtgggattctaatcgctattgacgctctgtccttttacctgcctctggaatcaggtaattgtgctcccttcaagatgaccgtcctcttgggatactccgtttttctccttatgatgaatgacctcttaccagctacttctactagtagtcatgcctctcttgtgcgcccacaccccagtcgtgaccaaaaaagaggagtatatttcgccttgtgtctcagtctaatggttggctccctgcttgaaaccatcttcatcacgcatctgctacacgtcgcaactacgcagccactccctcttccacgctggctgcactcattactacttcactgtactgggcaggggcgatgttgtccgaccgctccccagaaagggaataagggcccaggactgactccaacccatcttcctggtgtcaaggagccggaggtgagtgccggtcagatgcccggtccgggcgaagcagagctgaccggagggagcgaatggactagagcacagcgcgaacacgaagcacaaaaacagcactctgtggaactctgggtccagtttagccatgctatggacgcactgctgtttagactgtacctgctgtttatggccagcagcatcatcactgttatttgtctgtggaatacatag

SEQ ID NO: 57186 - DNA, 1215 bp, Artificial Sequence
  derived and/or modified sequence
atggagcggggctggttccacggcaagggcttcctgctgggcttcatcctgcacctgctgctgcaggacagccacctgcagctggtgaccagcttcctgtggctgaacatgtggaacccagatgaatgtggcggcatcaagaagagcggcatggccacagagaacctgtggctgagtgatgtgttcatcgaggagagcgtggaccagaccccagctggcctgatggcctccatgagcatcgtgaaggccaccagcaacaccatcagccagtgtggctggagcgccagcgccaactggacccccagcatcagccccagcatggacagaggagagaggagccccagcgccctgagccccacccaggtgacccgggcctggaggaggatgagccgctccttccagatccaccacaggaccagcttccgcacccggcgggagtgggtgctgctgggcatccagaagaggaccatcaaggtgacagtggccaccaaccagtatgagcaggccatcttccacgtggccatcagaagacgctgccggcccagcccctacgtggtgaacttcctggtgcccagcggcatcctgattgccattgatgccctgtccttctacctgcccctggagagcggcaactgtgcccccttcaagatgacagtgctgctgggctacagcgtcttcctgctgatgatgaatgacctgctgcctgccaccagcaccagcagccacgccagcctggtgcggccccaccccagccgggaccagaagaggggcgtgtactttgccctgtgcctgagcctgatggtgggcagcctgctggagaccatcttcatcacccacctgctgcacgtggccaccacccagcccctgcccctgccccgctggctgcacagcctgctgctgcactgcaccggccagggccgctgctgccccacagccccccagaagggcaacaagggccctggcctgacccccacccacctgcccggggtgaaggagcctgaggtgtctgctggccagatgcctggccctggagaggccgagctgactggaggcagcgagtggacccgggcccagcgggagcacgaggcccagaagcagcacagcgtggagctgtgggtgcagttcagccacgccatggatgccctgctcttccggctgtacctgctcttcatggccagcagcatcatcaccgtcatctgcctgtggaacacctag

SEQ ID NO: 57187 - DNA, 1215 bp, Artificial Sequence
  derived and/or modified sequence
atggagcggggctggttccacggcaagggcttcctgctgggcttcattttgcacctactgctccaggactcacatctccagttggtgacttcctttctatggttaaacatgtggaatccagacgaatgcggcgggataaagaaatccggaatggccactgagaatctctggctcagcgatgtgttcattgaggagagtgtagatcaaaccccggctggactgatggccagcatgtcaattgttaaagctacaagcaacactatttcacagtgcggctggagcgcatctgctaactggacgccttcaatctcgcccagtatggacaggggtgaaaggagcccgagtgccttgagcccaacacaggtgacaagagcctggaggaggatgtcacgctcatttcaaattcatcataggacaagcttcaggacaaggagggagtgggtgctcctgggtatacagaagaggactataaaagtcaccgtcgcgacaaatcaatatgagcaagcaatctttcacgttgccataaggcgaaggtgtagaccatcaccctacgtggtgaatttcttggtgcccagcggcatactgattgcaatcgatgccctgtcgttttatcttccgctggaatccggtaattgcgctccattcaagatgacggtgcttcttggttattctgtcttcctccttatgatgaatgatctgctgcccgcaactagcacctcatcacacgcatcactagtgcggccacacccctccagagaccagaagaggggcgtgtactttgctctgtgcttgagtcttatggtaggaagcctgctggagacaatattcatcacccacctgctgcacgtggcaaccacgcaacctctgcctctcccacgttggctccactccctgctcctgcactgcaccggccaggggcggtgctgccccaccgctccacaaaaggggaataagggcccagggcttactcctacccaccttcccggggtgaaggagccagaagtgagcgcaggacagatgcctggccctggcgaggccgagctgactggaggtagtgagtggacgagagctcagagggagcacgaagcccagaagcagcactccgtcgagctttgggtgcagttcagccacgctatggacgcactgctcttccggctctatctgttgttcatggccagttccatcataacagtgatctgcctgtggaacacttag

SEQ ID NO: 57188 - DNA, 1215 bp, Artificial Sequence
  derived and/or modified sequence
atggagagaggctggtttcatggcaaaggctttttgctggggttcatccttcacctgctgcttcaggatagccacttgcagctagtgacaagctttctgtggctaaacatgtggaaccccgacgagtgcggaggcatcaagaaatccggcatggctactgagaatctttggttatccgacgttttcattgaagagagcgtggatcagacccccgctggtctgatggccagtatgtcaattgttaaggccacaagcaataccatatcccagtgcggctggtcggcatcagccaactggacaccctctatctctcctagcatggataggggtgaaagatctccctccgctctcagtccaacacaggttacacgcgcatggcgcaggatgtcgcgctcctttcagatccatcaccggacttcctttagaacccggagggaatgggtccttctgggtatccagaagaggaccatcaaggtcactgtggcaactaatcagtacgaacaggccattttccatgtagcaattcgcaggcgctgcaggcctagcccctatgtagtcaattttttagtcccgagcggaattctgattgcgattgatgccctgtctttttacctgccactggaatcggggaattgcgcacccttcaagatgacagttctcctgggctattctgtcttcctgttgatgatgaatgacctgcttccagcgacttcaacatcttctcacgcgtctctggttcggccacatcctagtcgggatcagaagcgcggagtttacttcgcattgtgcctctcactaatggtgggcagtctgctagaaactattttcatcacccacctgctgcatgttgccacaactcagccgctgcccctaccccgatggctccattcgcttttgttgcattgcacagggcaaggaagatgctgtcccactgctccgcagaagggtaacaagggcccaggactaacacctacccatctccccggagttaaagaacctgaggtttctgctggtcagatgccaggaccaggagaggccgaactcacaggtgggtctgaatggactcgagctcaaagggagcatgaggctcagaagcaacattcagtggagctttgggttcaatttagccacgctatggatgccctcctgttcagactctatctcctatttatggctagttcaataatcacagtcatatgtctctggaacacttag

SEQ ID NO: 57189 - DNA, 1215 bp, Artificial Sequence
  derived and/or modified sequence
atggaaagaggctggttccatgggaaaggattcctccttggcttcatcctccacctgctgctgcaagattcacaccttcaactggtgacatcgttcctgtggctaaatatgtggaacccagatgaatgcggaggcatcaagaagtccggcatggcaactgagaacctatggctttcagatgtcttcatcgaggagtctgtggatcagacacctgcaggtctcatggctagtatgtcaatagtgaaggccacatcaaacacaataagccaatgtgggtggtcagcatctgcaaactggacaccttctatttccccttccatggacagaggtgaacgctctccttcagccctttcacctacacaggtaacccgggcatggagaaggatgtccaggagctttcaaatacatcacagaacctcattcagaacaaggagggagtgggtactgctgggtatccaaaaaagaacaataaaggtgaccgtggccactaaccagtatgaacaagccatcttccatgtggccatcaggcgcaggtgcaggcccagcccctacgtggtaaactttctggtgcccagtggcattctgattgccatcgatgccctcagtttctacctgccactggaaagtgggaattgtgccccattcaagatgactgttctgctgggctacagcgtcttcctgctcatgatgaatgacttgctcccagccactagcacttcatcacatgcttcactagtacgtcctcatccatcaagagaccaaaagcgaggtgtctacttcgccctgtgcctgtccctgatggtgggcagcctgctggagaccatcttcatcacccacctgctgcacgtggccaccacccagcccctacctctgcctcggtggctccactccctgctgctgcactgcaccggccaagggagatgctgtcccactgcgccccagaagggaaataagggcccgggtctcacccccacccacctgcccggtgtgaaggagccagaggtatcagcagggcagatgccaggccctggggaggcagagctgacagggggctcagaatggacaagggcccagcgggaacacgaggcccagaagcagcactcggtggagctgtgggtgcagttcagccacgcgatggacgccctgctcttccgcctctacctgctcttcatggcctcctccatcatcaccgtcatatgcctctggaacacctag

SEQ ID NO: 57190 - DNA, 1215 bp, Artificial Sequence
  derived and/or modified sequence
atggagagaggctggttccacggcaagggcttcctgctgggcttcatcctgcacctgctgctgcaggacagccacctgcagctggtgaccagcttcctgtggctgaacatgtggaaccccgacgagtgcggcggcatcaagaagagcggcatggccaccgagaacctgtggctgagcgacgtgttcatcgaggagagcgtggaccagacccccgccggcctgatggccagcatgagcatcgtgaaggccaccagcaacaccatcagccagtgcggctggagcgccagcgccaactggacccccagcatcagccccagcatggacagaggcgagagaagccccagcgccctgagccccacccaggtgaccagagcctggagaagaatgagcagaagcttccagatccaccacagaaccagcttcagaaccagaagagagtgggtgctgctgggcatccagaagagaaccatcaaggtgaccgtggccaccaaccagtacgagcaggccatcttccacgtggccatcagaagaagatgcagacccagcccctacgtggtgaacttcctggtgcccagcggcatcctgatcgccatcgacgccctgagcttctacctgcccctggagagcggcaactgcgcccccttcaagatgaccgtgctgctgggctacagcgtgttcctgctgatgatgaacgacctgctgcccgccaccagcaccagcagccacgccagcctggtgagaccccaccccagcagagaccagaagagaggcgtgtacttcgccctgtgcctgagcctgatggtgggcagcctgctggagaccatcttcatcacccacctgctgcacgtggccaccacccagcccctgcccctgcccagatggctgcacagcctgctgctgcactgcaccggccagggcagatgctgccccaccgccccccagaagggcaacaagggccccggcctgacccccacccacctgcccggcgtgaaggagcccgaggtgagcgccggccagatgcccggccccggcgaggccgagctgaccggcggcagcgagtggaccagagcccagagagagcacgaggcccagaagcagcacagcgtggagctgtgggtgcagttcagccacgccatggacgccctgctgttcagactgtacctgctgttcatggccagcagcatcatcaccgtgatctgcctgtggaacacctag

SEQ ID NO: 57191 - DNA, 942 bp, Artificial Sequence
  derived and/or modified sequence
atgaacatactggggttagtggtgtttgctatcgtgtttggagttgctcttaggaagctgggacccgaaggtgagctgctcattcgcttctttaacagcttcaacgaggctaccatggtgcttgtgtcttggatcatgtggtatgcccctgttggcattatgtttctagtagctggcaaaattgtggagatggaggacgtgggcttgctctttgcccgactagggaaatacattctgtgctgtcttctcgggcacgcaatccatggtctgctggtgctccctctcatatatttcctgttcactcggaaaaacccgtacagattcctgtggggcattgtgactcccctggctaccgcctttggaacatcatcctcttccgccaccctgccactgatgatgaaatgtgtggaggaaaataatggggtcgccaagcacataagccgcttcatcctcccaataggggcgacggtaaacatggatggggcagcactgttccaatgcgtggccgctgtgtttattgcccagctctcccagcagtctctggattttgtaaagattattaccatcctcgtgaccgcaacggccagcagcgttggcgcagccggaatcccagccggcggagtcctcactttggctataattctggaagcggttaatttgccagtggaccatatctcacttatattggctgtagattggttggtagatcggtcctgtaccgtgctgaacgtggagggcgacgctctcggggcaggtctgcttcagaattatgtggatcgcacggagagtcgatccactgaacctgagcttattcaggtaaaaagtgagctgcccctcgatcctctgccagttccaactgaggaggggaaccccctgctcaagcattatagagggcccgccggcgacgccacggtcgcttctgaaaaggagagcgtgatgtag

SEQ ID NO: 57192 - DNA, 942 bp, Artificial Sequence
  derived and/or modified sequence
atgaacatcctgggcctggtggtgtttgccatcgtgtttggagtggccctgaggaagctgggccctgagggggagctgctgatccgcttcttcaacagcttcaatgaggccaccatggtgctggtgtcctggatcatgtggtacgcccctgtgggcatcatgttcctggtggccggcaagatcgtggagatggaggatgtgggcctgctgtttgcccggctgggcaagtacatcctgtgctgcctgctgggccacgccatccacggcctgctggtgctgcccctcatctacttcctgttcaccaggaagaacccctaccgcttcctgtggggcatcgtgacccccctggccacagccttcggcaccagcagcagcagcgccaccctgcccctgatgatgaagtgtgtggaggagaacaacggggtggccaagcacatcagccgcttcatcctgcccatcggggccaccgtgaacatggatggagctgccctcttccagtgtgtggccgctgtgttcatcgcccagctgagccagcagagcctggactttgtgaagatcatcaccatcctggtgacagccacagccagctctgtgggcgctgctggcatcccagctggaggagtgctgaccctggccatcatcctggaggccgtgaacctgcctgtggaccacatcagcctcatcctggccgtggactggctggtggacaggagctgcaccgtgctgaatgtggagggagatgccctgggcgccggcctgctgcagaactacgtggacagaacagagagccgcagcacagagcctgagctgatccaggtgaagtctgagctgcccctggaccccctgcctgtgcccacagaggagggcaaccccctgctgaagcactaccggggccctgctggagatgccaccgtggccagcgagaaggagagcgtgatgtag

SEQ ID NO: 57193 - DNA, 942 bp, Artificial Sequence
  derived and/or modified sequence
atgaacatcctgggcctggtggtgttcgccatcgtgttcggcgtggctctgcgcaagctgggcccggagggagaactattgattcgctttttcaatagttttaacgaggcaacaatggtactcgtcagctggattatgtggtatgctccggtcggcatcatgttcttggtggcaggcaaaatcgttgagatggaggatgtgggacttctgttcgccagactgggaaagtatatcctgtgctgtctacttggccatgccatccatggattgcttgtgctgcccctgatatatttcctctttacacgcaagaacccctaccgattcctctggggaattgtgacacccttggcaactgcgtttggtaccagctctagcagcgccaccttgcccttgatgatgaagtgcgtcgaggagaataacggcgtcgccaaacatatcagtcgttttatactacccataggtgcaaccgtgaatatggatggagctgcactatttcagtgtgtagccgctgtgttcattgctcagctgtcccagcaatccctagactttgtcaaaattatcaccatacttgtcacggccactgcttcatccgtgggagcggcgggtattccagcagggggagtgctgacactggcaataatactcgaagccgtgaatctgcccgtggatcatattagcctcatcctggccgtcgactggctcgtggatagatcctgcactgtcctcaatgtcgagggggatgcgttaggcgccggcttattacagaactatgttgaccgaaccgaatcacggtccactgaacccgaattgatccaggtcaagagcgaattaccgttagatcctctgcctgtgccaaccgaggagggaaacccactccttaagcattatcgcgggcccgcaggcgacgctactgtggctagcgaaaaggaaagcgtgatgtag

SEQ ID NO: 57194 - DNA, 942 bp, Artificial Sequence
  derived and/or modified sequence
atgaacatcctgggactggtggtcttcgcaattgttttcggcgtggcacttaggaagctgggcccagagggtgaactgttaatacgattctttaattcctttaacgaagcaacaatggtgttggtaagctggattatgtggtacgctcccgttggtatcatgtttcttgtcgcgggtaagattgtcgaaatggaggacgtggggttgcttttcgctcgactgggtaagtacatcctgtgttgtctcctgggccatgcgattcacgggttgctggtgttgccactgatctacttccttttcacaaggaaaaatccttatcggttcctgtggggaatagtaaccccccttgcgaccgccttcgggaccagctcctcttctgccaccctgcctcttatgatgaagtgcgtcgaagagaacaacggtgtggcgaagcacatctcccggttcatcttgcctatcggagctacagtgaacatggatggcgctgcgctgttccagtgtgtagctgccgtgttcattgctcagctgagccagcagtcactggatttcgtgaaaatcattaccatcttggtcactgctaccgcctccagtgtgggagcggctggtattcccgctggcggtgtcttgaccctggcaatcattcttgaggccgtgaacttaccagtggatcatattagcctcattctcgcagtggactggctagttgacagaagttgtactgtcctgaacgtcgaaggggatgctctgggagctgggcttctgcagaattacgtggatagaacagagtcaaggtccaccgagccggagctcatccaggtgaaatccgagttgcccttagacccactgcctgttccaacagaagaagggaacccactgcttaagcattacaggggacccgctggtgatgccacagtggccagcgaaaaggagtcagtgatgtag

SEQ ID NO: 57195 - DNA, 942 bp, Artificial Sequence
  derived and/or modified sequence
atgaacatcctgggcctggtggtgttcgccatcgtgttcggcgtggccctgagaaagctgggccccgagggcgagctgctgatcagattcttcaacagcttcaacgaggccaccatggtgctggtgagctggatcatgtggtacgcccccgtgggcatcatgttcctggtggccggcaagatcgtggagatggaggacgtgggcctgctgttcgccagactgggcaagtacatcctgtgctgcctgctgggccacgccatccacggcctgctggtgctgcccctgatctacttcctgttcaccagaaagaacccctacagattcctgtggggcatcgtgacccccctggccaccgccttcggcaccagcagcagcagcgccaccctgcccctgatgatgaagtgcgtggaggagaacaacggcgtggccaagcacatcagcagattcatcctgcccatcggcgccaccgtgaacatggacggcgccgccctgttccagtgcgtggccgccgtgttcatcgcccagctgagccagcagagcctggacttcgtgaagatcatcaccatcctggtgaccgccaccgccagcagcgtgggcgccgccggcatccccgccggcggcgtgctgaccctggccatcatcctggaggccgtgaacctgcccgtggaccacatcagcctgatcctggccgtggactggctggtggacagaagctgcaccgtgctgaacgtggagggcgacgccctgggcgccggcctgctgcagaactacgtggacagaaccgagagcagaagcaccgagcccgagctgatccaggtgaagagcgagctgcccctggaccccctgcccgtgcccaccgaggagggcaaccccctgctgaagcactacagaggccccgccggcgacgccaccgtggccagcgagaaggagagcgtgatgtag

SEQ ID NO: 57196 - DNA, 1020 bp, Artificial Sequence
  derived and/or modified sequence
atgtattccaccacctatgaggaacgaaatattacaggaacccgcgtgaaggtgcccgtgggtcaggaagtagaaggtatgaacattttggggttggtcgtcttcgccatcgtcttcggggttgcacttaggaagctcgggcctgaaggggaattgctgattagattcttcaactctttcaacgaggctacaatggtgctcgtgtcctggatcatgtggtatgctcctgtgggtatcatgtttctcgtggccggcaaaatcgtggaaatggaggacgtgggtctgttgtttgcacgtttgggtaaatatatcctgtgttgccttctcggtcatgccatccacggccttctagtgctaccccttatttacttcctttttacccgcaagaatccttacagattcctttggggtatcgttacacctttggcaactgccttcggtacatcgtcgagttcagccactttgccgttgatgatgaagtgcgtggaagagaataacggagtggccaagcacatttcgcggtttattttaccaataggcgcaacagtgaatatggatggagccgccctcttccagtgcgtggccgcggtctttatcgcccaactgtcccagcagagtctggacttcgtgaagataatcaccattttagttactgctaccgcctccagtgttggtgccgccggcattcctgcaggaggcgtcctaacacttgctatcatcctggaggcagtgaatcttcccgtggaccacatctccctgatcctggccgttgactggctggtcgatcggtcttgtacggtccttaatgtggagggtgacgcactgggagccggcctcttgcagaattacgtggacaggacagaatctaggagtactgagcctgaattgatccaggtcaagtccgagctacccttggatcccctgcccgtaccaacagaggaaggaaatccactgctaaaacattacagaggaccagcgggagatgcaacagttgcgtcagagaaagagtcagtgatgtag

SEQ ID NO: 57197 - DNA, 1020 bp, Artificial Sequence
  derived and/or modified sequence
atgtacagcaccacctatgaggagaggaacatcaccggcaccagggtgaaggtgcctgtgggccaggaggtggagggcatgaacatcctgggcctggtggtgtttgccatcgtgtttggagtggccctgaggaagctgggccctgagggggagctgctgatccgcttcttcaacagcttcaatgaggccaccatggtgctggtgtcctggatcatgtggtacgcccctgtgggcatcatgttcctggtggccggcaagatcgtggagatggaggatgtgggcctgctgtttgcccggctgggcaagtacatcctgtgctgcctgctgggccacgccatccacggcctgctggtgctgcccctcatctacttcctgttcaccaggaagaacccctaccgcttcctgtggggcatcgtgacccccctggccacagccttcggcaccagcagcagcagcgccaccctgcccctgatgatgaagtgtgtggaggagaacaacggggtggccaagcacatcagccgcttcatcctgcccatcggggccaccgtgaacatggatggagctgccctcttccagtgtgtggccgctgtgttcatcgcccagctgagccagcagagcctggactttgtgaagatcatcaccatcctggtgacagccacagccagctctgtgggcgctgctggcatcccagctggaggagtgctgaccctggccatcatcctggaggccgtgaacctgcctgtggaccacatcagcctcatcctggccgtggactggctggtggacaggagctgcaccgtgctgaatgtggagggagatgccctgggcgccggcctgctgcagaactacgtggacagaacagagagccgcagcacagagcctgagctgatccaggtgaagtctgagctgcccctggaccccctgcctgtgcccacagaggagggcaaccccctgctgaagcactaccggggccctgctggagatgccaccgtggccagcgagaaggagagcgtgatgtag

SEQ ID NO: 57198 - DNA, 1020 bp, Artificial Sequence
  derived and/or modified sequence
atgtacagcaccacctacgaggagcggaacatcaccggcacccgggtcaaggtacctgtgggccaggaagtggaaggaatgaatattttggggctggtggtctttgcaatcgtattcggggttgcgctcaggaagcttgggccggagggagaacttttgatcaggtttttcaatagctttaatgaggccacaatggttttagtgtcctggattatgtggtatgccccagtggggattatgttcctggtggccggtaagattgtcgaaatggaggacgtcggccttttgtttgcccgcctgggaaagtacattctctgttgtctgctggggcatgctattcacggactgcttgtgctgcccctgatttacttcctgtttactagaaaaaacccctaccggttcttgtggggcattgtgaccccacttgcaaccgctttcggaacatcatctagttcggccacactgccactgatgatgaaatgcgtggaagaaaataatggtgtcgccaagcacatcagcagattcatacttccaattggggcgaccgttaacatggacggagcagcactgttccagtgtgtggccgccgtattcatcgcccagctctcccagcagagtcttgatttcgtcaagatcatcacgatactggtcaccgctactgcatcttcagttggcgcggcaggaatcccagccgggggagttctcaccctggccattatcctggaggctgttaacctccccgtcgaccatatttctctcatccttgctgtcgattggctggtggaccgctcctgtacagtgctgaacgtggagggagatgctctgggcgcgggtcttctgcagaactacgtggaccgcaccgagtccaggagcaccgagcctgaactgatccaggtcaaatccgagcttccgcttgacccactccccgtgccgactgaagagggaaatccactgctcaagcactaccggggtccagcaggagatgctaccgttgcctcagaaaaagagtctgtaatgtag

SEQ ID NO: 57199 - DNA, 1020 bp, Artificial Sequence
  derived and/or modified sequence
atgtactcaactacgtacgaagagaggaatattaccggcactagggtgaaggtccccgtcggtcaggaggtcgagggcatgaacatcctggggctggttgtgttcgctatcgttttcggcgtagcactgcgcaaactcggacccgagggagagctgctgataaggttttttaatagttttaatgaagctaccatggtacttgtctcttggatcatgtggtacgccccagtcggcatcatgttcctcgtggccggaaagatcgtcgagatggaggacgtcggcctgctttttgctagattgggcaagtatattctgtgctgtctactaggacatgccattcacggactgctggtgttacctctcatatacttcctttttaccaggaagaatccctacaggtttttatggggcattgtgacacctcttgcaactgcttttggaacgtccagttccagcgctacgctgccattgatgatgaagtgcgtcgaagaaaataatggagtggcaaagcatatcagtcggttcattctgccaattggcgcaacagtgaacatggatggggctgctttattccagtgcgtcgccgctgtcttcattgcacaactcagccagcagtctttagactttgtcaagatcattaccatactggtgactgccactgccagtagcgtgggcgcagccggtatccctgccggtggagtcctcacgctcgctatcattctggaggccgtcaacttaccagtggatcacatcagtttgattctggccgtcgactggctcgttgatagatcctgtactgtgctgaacgtggagggtgatgccctcggcgctgggctcctacaaaattacgtggacagaacagagagccgtagcacagaacccgagctgattcaggttaagtccgaactgccactggaccctctgccggtccccactgaagaaggcaatcccctccttaaacactaccgagggccagccggagatgccaccgttgcctctgaaaaagagagtgtcatgtag

SEQ ID NO: 57200 - DNA, 1927 bp, Artificial Sequence
  derived and/or modified sequence
atggggtggagctgaggcccggggcgacctgccctggcctgccgtgggaggccagcattcctcaccccgaacccacaatgcctcagggctagcacgccagcctcttggggctgaaggaggctgactccccaagtcctgcaaaggggtgcaagcctagttccaaccctgccgggctgaggcatgagtaggggctgtatttgcgtgcaggcgggcccccaaagcttccactcgctgccttaaaacgccaacccagcctctcagacaatgctgccctcccactatgtactctaccacctatgaagagaggaatatcaccggaaccagggtgaaggtgcccgtggggcaggaggtggaggggatgaacatcctgggcttggtagtgtttgccatcgtctttggtgtggcgctgcggaagctggggcctgaaggggagctgcttatccgcttcttcaactccttcaatgaggccaccatggttctggtctcctggatcatgtggtacgcccctgtgggcatcatgttcctggtggctggcaagatcgtggagatggaggatgtgggtttactctttgcccgccttggcaagtacattctgtgctgcctgctgggtcacgccatccatgggctcctggtactgcccctcatctacttcctcttcacccgcaaaaacccctaccgcttcctgtggggcatcgtgacgccgctggccactgcctttgggacctcttccagttccgccacgctgccgctgatgatgaagtgcgtggaggagaataatggcgtggccaagcacatcagccgtttcatcctgcccatcggcgccaccgtcaacatggacggtgccgcgctcttccagtgcgtggccgcagtgttcattgcacagctcagccagcagtccttggacttcgtaaagatcatcaccatcctggtcacggccacagcgtccagcgtgggggcagcgggcatccctgctggaggtgtcctcactctggccatcatcctcgaagcagtcaacctcccggtcgaccatatctccttgatcctggctgtggactggctagtcgaccggtcctgtaccgtcctcaatgtagaaggtgacgctctgggggcaggactcctccaaaattacgtggaccgtacggagtcgagaagcacagagcctgagttgatacaagtgaagagtgagctgcccctggatccgctgccagtccccactgaggaaggaaaccccctcctcaaacactatcgggggcccgcaggggatgccacggtcgcctctgagaaggaatcagtcatgtaaaccccgggagggaccttccctgccctgctgggggtgctctttggacactggattatgaggaatggataaatggatgagctagggctctgggggtctgcctgcacactctggggagccaggggccccagcaccctccaggacaggagatctgggatgcctggctgctggagtacatgtgttcacaagggttactcctcaaaacccccagttctcactcatgtccccaactcaaggctagaaaacagcaagatggagaaataatgttctgctgcgtccccaccgtgacctgcctggcctcccctgtctcagggagcaggtcacaggtcaccatggggaattctagcccccactggggggatgttacaacaccatgctggttattttggcggctgtagttgtggggggatgtgtgtgtgcacgtgtgtgtgtgtgtgtgtgtgtgtgtgtgtgtgtgtgttctgtgacctcctgtccccatggtacgtcccaccctgtccccagatcccctattccctccacaataacagaaacactcccagggactctggggagaggctgaggacaaatacctgctgtcactccagaggacattttttttagcaataaaattgagtgtcaactatttaa

SEQ ID NO: 57201 - DNA, 1020 bp, Artificial Sequence
  derived and/or modified sequence
atgtacagcaccacctacgaggagagaaacatcaccggcaccagagtgaaggtgcccgtgggccaggaggtggagggcatgaacatcctgggcctggtggtgttcgccatcgtgttcggcgtggccctgagaaagctgggccccgagggcgagctgctgatcagattcttcaacagcttcaacgaggccaccatggtgctggtgagctggatcatgtggtacgcccccgtgggcatcatgttcctggtggccggcaagatcgtggagatggaggacgtgggcctgctgttcgccagactgggcaagtacatcctgtgctgcctgctgggccacgccatccacggcctgctggtgctgcccctgatctacttcctgttcaccagaaagaacccctacagattcctgtggggcatcgtgacccccctggccaccgccttcggcaccagcagcagcagcgccaccctgcccctgatgatgaagtgcgtggaggagaacaacggcgtggccaagcacatcagcagattcatcctgcccatcggcgccaccgtgaacatggacggcgccgccctgttccagtgcgtggccgccgtgttcatcgcccagctgagccagcagagcctggacttcgtgaagatcatcaccatcctggtgaccgccaccgccagcagcgtgggcgccgccggcatccccgccggcggcgtgctgaccctggccatcatcctggaggccgtgaacctgcccgtggaccacatcagcctgatcctggccgtggactggctggtggacagaagctgcaccgtgctgaacgtggagggcgacgccctgggcgccggcctgctgcagaactacgtggacagaaccgagagcagaagcaccgagcccgagctgatccaggtgaagagcgagctgcccctggaccccctgcccgtgcccaccgaggagggcaaccccctgctgaagcactacagaggccccgccggcgacgccaccgtggccagcgagaaggagagcgtgatgtag

SEQ ID NO: 57202 - protein, 444 aa, Artificial Sequence
  derived and/or modified sequence
MGGHPQLRLVKALLLLGLNPVSASLQDQHCESLSLASNISGLQCNASVDLIGTCWPRSPAGQLVVRPCPAFFYGVRYNTTNNGYRECLANGSWAARVNYSECQEILNEEKKSKVHYHVAVIINYLGHCISLVALLVAFVLFLRLRPGCTHWGDQADGALEVGAPWSGAPFQVRRSIRCLRNIIHWNLISAFILRNATWFVVQLTMSPEVHQSNVGWCRLVTAAYNYFHVTNFFWMFGEGCYLHTAIVLTYSTDRLRKWMFICIGWGVPFPIIVAWAIGKLYYDNEKCWFGKRPGVYTDYIYQGPMILVLLINFIFLFNIVRILMTKLRASTTSETIQYRKAVKATLVLLPLLGITYMLFFVNPGEDEVSRVVFIYFNSFLESFQGFFVSVFYCFLNSEVRSAIRKRWHRWQDKHSIRARVARAMSIPTSPTRVSFHSIKQSTAV

SEQ ID NO: 57203 - DNA, 2664 bp, Artificial Sequence
  derived and/or modified sequence
ggcgaggccggcaagaggcggccgcgggccgggctgcgtcgggaaacggcggccagacttccccgggaaggggcgagcgagagccgggccgggccgggccgggccgcggggccgggaagcgccgagccgggcatctcctcaccaggcagcgaccgaggagcccggccgcccaccccgtgccgcccgagcccgcagccgcccgccggtccctctgggatgtccgtaggacccgggcattcaggacggtagccgagcgagcccgaggatgggagggcacccgcagctccgtctcgtcaaggcccttctccttctggggctgaaccccgtctctgcctccctccaggaccagcactgcgagagcctgtccctggccagcaacatctcaggactgcagtgcaacgcatccgtggacctcattggcacctgctggccccgcagccctgcggggcagctagtggttcggccctgccctgcctttttctatggtgtccgctacaataccacaaacaatggctaccgggagtgcctggccaatggcagctgggccgcccgcgtgaattactccgagtgccaggagatcctcaatgaggagaaaaaaagcaaggtgcactaccatgtcgcagtcatcatcaactacctgggccactgtatctccctggtggccctcctggtggcctttgtcctctttctgcggctcaggccaggctgcacccattggggtgaccaggcagatggagccctggaggtgggggctccatggagtggtgccccatttcaggttcgaaggagcatccggtgcctgcgaaacatcatccactggaacctcatctccgccttcatcctgcgcaacgccacctggttcgtggtccagctaaccatgagccccgaggtccaccagagcaacgtgggctggtgcaggttggtgacagccgcctacaactacttccatgtgaccaacttcttctggatgttcggcgagggctgctacctgcacacagccatcgtgctcacctactccaccgaccggctgcgcaaatggatgttcatctgcattggctggggtgtgcccttccccatcattgtggcctgggccattgggaagctgtactacgacaatgagaagtgttggtttggcaaaaggcctggggtgtacaccgactacatctaccagggccccatgatcctggtcctgctgatcaatttcatcttccttttcaacatcgtccgcatcctcatgaccaagctccgggcatccaccacgtctgagaccattcagtacaggaaggctgtgaaagccactctggtgctgctgcccctcctgggcatcacctacatgctgttcttcgtcaatcccggggaggatgaggtctcccgggtcgtcttcatctacttcaactccttcctggaatccttccagggcttctttgtgtctgtgttctactgtttcctcaatagtgaggtccgttctgccatccggaagaggtggcaccggtggcaggacaagcactcgatccgtgcccgagtggcccgtgccatgtccatccccacctccccaacccgtgtcagctttcacagcatcaagcagtccacagcagtctgagctggcaggtcatggagcagcccccaaacagctgtggctggggggatgacggccaggctccctgaccaccctgcctgtggaggtgacctgttaggtctcatgcccactcccccaggagcagctggcactgacagcctggggggggccgctcttcccctgcagccgtgcaggactctagctcatgagtggaaagtcacctacaggactgggccgggcccagggcctctggcttccctgcccaatcctccctggagaagggacatgggaatgaattgaaatggggcgctggacacctacagcagcacgcatgtccctccaaggctgccttctcccagagcacaagaaggccagcccactggggcctggggctgccctcggcaaccgtggggaggccatttgctgccctggggcatcatgggcaactcgtgacagcctctgactcaccacgatgatgcctctggacctcggtgatgccttccgacaccactgggaaccaagggccctcgctcaggaaccctggagacagaagtcaggtgtcatcatcagacttgcggccacagcactagagtcacccccccaggcctccagaacctcactggcactgtggcactgccaccagcaatgccctgccttgctgccttcaccctgaacatttactaccctgcaggccaggccagcttcccctcacttaaccaccccacaccagtcacctcctgctccttttcctcttttgtgagaagatgggggctggagggggcagagtggcctgtgagcaagagccaggggtgtcccagtcccagcctctggggcagagcttgtagccctggatggcctctggggcaggaccactagctaagcaagccaggagaagacccctgcccaagtggctcttgggacaacgtgctgcttacactccaggtgtggaccggccgcagcccccactgacctgcccatgtccagagggactggacagccagggcagggctttggggggcactagaagatgagggtgtcggctgtgaggcgggtggctggtataaataatatttatcttttcaaccagc

SEQ ID NO: 57204 - DNA, 1335 bp, Artificial Sequence
  derived and/or modified sequence
atgggcggccacccccagctgagactggtgaaggccctgctgctgctgggcctgaaccccgtgagcgccagcctgcaggaccagcactgcgagagcctgagcctggccagcaacatcagcggcctgcagtgcaacgccagcgtggacctgatcggcacctgctggcccagaagccccgccggccagctggtggtgagaccctgccccgccttcttctacggcgtgagatacaacaccaccaacaacggctacagagagtgcctggccaacggcagctgggccgccagagtgaactacagcgagtgccaggagatcctgaacgaggagaagaagagcaaggtgcactaccacgtggccgtgatcatcaactacctgggccactgcatcagcctggtggccctgctggtggccttcgtgctgttcctgagactgagacccggctgcacccactggggcgaccaggccgacggcgccctggaggtgggcgccccctggagcggcgcccccttccaggtgagaagaagcatcagatgcctgagaaacatcatccactggaacctgatcagcgccttcatcctgagaaacgccacctggttcgtggtgcagctgaccatgagccccgaggtgcaccagagcaacgtgggctggtgcagactggtgaccgccgcctacaactacttccacgtgaccaacttcttctggatgttcggcgagggctgctacctgcacaccgccatcgtgctgacctacagcaccgacagactgagaaagtggatgttcatctgcatcggctggggcgtgcccttccccatcatcgtggcctgggccatcggcaagctgtactacgacaacgagaagtgctggttcggcaagagacccggcgtgtacaccgactacatctaccagggccccatgatcctggtgctgctgatcaacttcatcttcctgttcaacatcgtgagaatcctgatgaccaagctgagagccagcaccaccagcgagaccatccagtacagaaaggccgtgaaggccaccctggtgctgctgcccctgctgggcatcacctacatgctgttcttcgtgaaccccggcgaggacgaggtgagcagagtggtgttcatctacttcaacagcttcctggagagcttccagggcttcttcgtgagcgtgttctactgcttcctgaacagcgaggtgagaagcgccatcagaaagagatggcacagatggcaggacaagcacagcatcagagccagagtggccagagccatgagcatccccaccagccccaccagagtgagcttccacagcatcaagcagagcaccgccgtgtag

SEQ ID NO: 57205 - DNA, 1335 bp, Artificial Sequence
  derived and/or modified sequence
atggggggccaccctcagctgaggctggtgaaagctttactgctgctcggcttgaatcccgtaagcgctagtctgcaggatcagcattgcgaaagcctcagccttgcctcgaatatttccgggctgcaatgcaacgcatccgtcgatctgatcggcacatgttggccccgcagccctgcgggtcaactagtggtgaggccctgtcccgcttttttctatggtgtacggtacaacaccactaataacggctatcgcgaatgtcttgccaatggctcctgggctgcccgcgtcaattattctgagtgtcaggagatcctcaatgaggagaaaaagtctaaagtccattaccatgttgcggtgatcatcaactatctggggcattgcatcagtttagtggcacttctcgtggcattcgttctcttcctgcggctgaggcccggctgtacgcattggggagatcaggctgacggggcactggaggtgggcgctccctggagcggagctccattccaagtccggaggtcaatacggtgtttgaggaacatcatacactggaatctcatctccgccttcatattgaggaatgcgacatggtttgtggtgcagttgacaatgtcaccagaggttcaccagtctaacgtaggttggtgccggctggtgaccgccgcttacaattattttcatgtgactaattttttctggatgtttggggagggctgctacctgcacactgcgatcgtactcacttactccaccgacagattacgcaagtggatgtttatatgcatcgggtggggcgttccttttcccattattgtcgcgtgggccattggcaagttgtattacgataacgagaaatgttggttcgggaaacgcccgggcgtttacaccgattacatctatcagggacctatgatcttagttttactaatcaactttatattccttttcaatattgtgagaatcttgatgaccaagctaagagctagtactacaagcgaaaccattcagtataggaaggccgtgaaagcaaccctcgttctgctgcccttgttgggcataacctatatgctgttctttgtgaaccctggggaggatgaagtctcccgcgtggtgtttatctattttaatagtttcctggagagctttcaaggattctttgtctccgtgttttactgtttcctgaacagcgaagttcgttctgccatccgcaagcggtggcacaggtggcaagacaaacacagcattagggctcgcgttgctagggcaatgtccatccccactagtcccacacgggttagctttcattctataaagcagtccacagccgtatag

SEQ ID NO: 57206 - DNA, 1335 bp, Artificial Sequence
  derived and/or modified sequence
atgggcggccacccccagctgcggctggtgaaggccctgctgctgctgggcctgaaccctgtgtctgccagcctgcaggaccagcactgtgagagcctgagcctggccagcaacatcagcggcctgcagtgcaatgcctctgtggacctgattggcacctgctggcccaggagccctgctggccagctggtggtgcggccctgcccagccttcttctatggagtgcgctacaacaccaccaacaacggctaccgggagtgcctggccaacggctcctgggccgcccgggtgaactacagcgagtgccaggagatcctgaatgaggagaagaagagcaaggtgcactaccacgtggccgtcatcatcaactacctgggccactgcatcagcctggtggccctgctggtggcctttgtgctcttcctgcggctgcggcccggctgcacccactggggagaccaggctgatggagccctggaggtgggcgccccctggagcggggcccccttccaggtgagaagaagcatccgctgcctgaggaacatcatccactggaacctgatcagcgccttcatcctgagaaatgccacctggtttgtggtgcagctgaccatgagccctgaggtgcaccagagcaatgtgggctggtgccgcctggtgacagctgcctacaactacttccacgtgaccaacttcttctggatgtttggagagggctgctacctgcacacagccatcgtgctgacctacagcacagaccggctgaggaagtggatgttcatctgcatcggctggggcgtgcccttccccatcatcgtggcctgggccatcggcaagctgtactatgacaatgagaagtgctggtttgggaagaggcctggggtgtacacagactacatctaccagggccccatgatcctggtgctgctgatcaacttcatcttcctgttcaacatcgtgcgcatcctgatgaccaagctgcgggccagcaccaccagcgagaccatccagtacaggaaggctgtgaaggccaccctggtgctgctgcccctgctgggcatcacctacatgctgttctttgtgaaccctggagaagatgaggtgtcccgggtggtgttcatctacttcaacagcttcctggagagcttccagggcttctttgtgtctgtgttctactgcttcctgaacagcgaggtgcgcagcgccatcaggaagcgctggcaccgctggcaggacaagcacagcatccgggcccgggtggcccgggccatgagcatccccaccagccccaccagggtgtccttccacagcatcaagcagagcacagctgtgtag

SEQ ID NO: 57207 - DNA, 1335 bp, Artificial Sequence
  derived and/or modified sequence
atgggcggccacccccagctgcggctggtgaaggccctgctgctgctcggtcttaatcctgtctcagcatcgctgcaggaccagcattgtgaaagcttgtccctcgcttcaaatataagcgggctgcaatgcaatgcctccgtcgacctgatcgggacatgctggcctcgctccccagctggccagttggtggttcgcccttgccctgcctttttttatggcgtgagatataacaccacaaataatgggtaccgcgagtgcttagccaatggatcttgggccgcgcgagtgaactattcagaatgccaggagatcctcaacgaggaaaagaaaagcaaggtgcactaccatgtggcagttatcatcaactacctgggccactgtatcagtctggttgctcttctggtagccttcgtcctgtttctccgcttacggcctggctgtactcactggggagatcaggccgacggggcactcgaggtcggtgctccttggagtggcgcacccttccaggttagaagatctattagatgcctgcgaaatatcatacactggaacctgatcagcgcctttatcttgagaaatgctacttggttcgtcgtccagttgacaatgtctccagaagtccaccagagtaatgtgggatggtgcagactggtaacagcagcctacaactatttccatgtgacaaactttttctggatgttcggtgaggggtgctacttgcacactgccatcgtgctgacatattctactgaccgcctgagaaagtggatgttcatttgtatcggttggggcgtcccattccccatcatcgttgcctgggcaataggaaagctgtactacgacaacgagaaatgctggtttggcaagcggccaggcgtttatacagactatatctaccaggggccgatgattctggttctcctgatcaactttatattcctatttaatatagttcgcatcctcatgacaaaactgcgggctagcactacaagtgagaccatccagtatcgaaaggctgtcaaagccaccttggtcctgctcccattgcttggcatcacttacatgctctttttcgtcaatccaggagaagatgaggtatccagagtggtgttcatctacttcaattcttttctggagagcttccagggcttttttgtttcagtgttttactgctttctcaattctgaggtgcggtcagctattcgcaaacgctggcataggtggcaggataaacacagcattagagcccgggtggccagagcgatgtccatcccgacctcccctactagggtgtccttccacagcattaagcaaagtacggccgtttag

SEQ ID NO: 57208 - DNA, 1335 bp, Artificial Sequence
  derived and/or modified sequence
atggggggacatcctcagctcagactggtcaaagcgctgcttctgctgggcctgaatccagtgagtgccagtctccaagaccagcattgcgaaagcctaagcctggcaagtaacatttcaggactccagtgcaacgcctcggttgatctcatcggcacctgttggccccgttctccggctggacagctcgtggttcgtccctgtccagctttcttttacggagttagatacaatacgaccaataacggctaccgggaatgtctggccaatggctcatgggccgcacgggtgaattactccgaatgccaggagatcctcaacgaagagaagaaaagtaaggtgcactatcacgtggccgtgattataaattatttgggccactgtatttcactcgtggccctcctggtggctttcgtgctgttcctgcggttgagacctggttgcacacattggggggaccaggctgatggcgctttggaagtgggtgccccttggagcggcgctccttttcaagtgaggcgctcaatacgctgcctgcggaatatcatccattggaacctcattagcgcattcatcctccggaatgccacttggttcgtcgtgcagcttaccatgtctcccgaggtacaccagagcaacgtcggctggtgtagattagtgacagccgcatacaactacttccatgtgaccaatttcttctggatgttcggggagggatgctatttacatactgccattgtgctgacgtattctacggaccgactgcggaagtggatgtttatttgcatcggatggggcgtgccattccccattatcgttgcatgggccatcggtaagctgtactacgataacgaaaagtgttggtttggcaagaggcccggagtgtacacagattatatttaccaaggacccatgatcttagtgttgctgattaatttcatttttttgttcaacatcgttcggattcttatgacaaagttaagggcatctactacttctgagactatccagtatcgcaaggccgtcaaggctactcttgtcctacttcccttgttggggatcacctacatgctgtttttcgtgaatcccggagaggatgaggtgagccgcgtggtatttatttattttaactctttcctggagtctttccagggtttctttgtttcagtattctactgttttctaaatagcgaggttaggagtgctattagaaagagatggcatagatggcaggataagcattcaattagggcccgtgtcgctagggccatgtccatccccaccagtccaacccgggtgtcattccactcgattaagcagtcgaccgcagtctag

SEQ ID NO: 57209 - DNA, 1335 bp, Artificial Sequence
  derived and/or modified sequence
atgggtggacaccctcagctgagactcgtgaaggcccttctgctcctgggtcttaacccagtctctgcatcactccaggatcagcactgcgaatcgctctctcttgctagtaatatttccggcttacagtgcaacgcctcagttgacctcatcggcacctgttggccccgctcccctgctggtcagttggtcgtgaggccttgccctgctttcttctacggcgtgagatacaacacgactaataacggctaccgagagtgtctcgcgaacggtagctgggccgcacgcgttaactactccgagtgtcaggagatcctaaatgaggagaaaaaatctaaggtgcactaccacgtagccgttatcataaattacttgggccactgcatctccttggtggccctgctcgtggctttcgttctattcctcagactccgcccagggtgtactcattggggggatcaggccgatggcgcattggaggtgggtgcaccgtggtctggcgcaccttttcaagtgaggcgctcgattcggtgcttaagaaatattattcactggaatctcatatcggcgtttatactgcgcaacgccacatggttcgtcgttcaattgacaatgtctcccgaggtacaccagtccaatgtcggctggtgtcggctcgtgacagccgcgtataattattttcacgtcactaacttcttttggatgttcggtgaaggatgctaccttcataccgccatcgtgttgacctattctacagaccgtttacgcaaatggatgtttatctgcatcggatggggcgttccctttcctattattgtagcctgggccatcggtaagttgtactatgataacgagaagtgttggttcggcaagaggccgggagtatatacagactatatctatcagggacccatgatactggtgctgctgattaactttatctttcttttcaatatcgtgcgtattttgatgaccaagctacgcgcaagcactacctcagaaaccatccagtatcgcaaggctgttaaggcaaccctcgtgctcttacccctgctcggtatcacctatatgcttttttttgttaaccctggcgaggatgaggtcagccgtgtcgtcttcatttacttcaatagctttctagagagcttccaggggttttttgttagcgtcttttactgtttcctgaactccgaggtccgaagcgcaattaggaaacggtggcataggtggcaggacaaacacagcattagagctcgtgtcgccagggccatgagcataccaacttcccccacaagagtgtcttttcatagcatcaagcagagcacagccgtctag

SEQ ID NO: 57210 - DNA, 1335 bp, Artificial Sequence
  derived and/or modified sequence
atgggcggccacccccagctgcggctggtgaaggccctgctgctgctaggactgaacccggtaagcgcctcactacaggatcagcattgcgagagtctttctctagcctctaacatatccgggttgcagtgcaacgcttccgttgacttaatcgggacgtgttggccacgcagccccgccggacaactcgtggtccgaccgtgcccagccttcttttacggagtgcggtataatactacaaataatggctacagagaatgtctggcgaatggctcttgggccgccagggtgaattactccgagtgtcaggaaatcctaaacgaagagaaaaaatctaaggtacattaccatgtcgccgtcattattaattacttaggtcactgcataagtcttgttgccctgttggtggcctttgtactctttcttcgcctgaggcccggctgtacccactggggggatcaggcagatggcgcactggaggtcggagccccctggtctggagccccgtttcaggttcgcagaagcatccggtgcctacgaaacataatccattggaatctcatcagtgccttcatcttacggaatgccacgtggttcgtagttcagttgacaatgagtccagaagtacatcagtccaacgtgggatggtgtcggcttgtgaccgccgcttataactatttccatgtgacaaactttttctggatgtttggcgaaggctgctacctacataccgcgatcgtgttgacctattccaccgacaggttgaggaaatggatgtttatatgtattggatggggagtgccattccccattatcgtggcatgggcaatcggcaagctgtactatgataatgagaagtgctggttcggaaagagacccggggtctacacagactacatctatcagggaccgatgatcttggtgctgctgattaactttatcttcctcttcaatatcgtgcgaatcctgatgacaaaattgagggctagtactaccagcgaaacgatacagtaccgtaaggccgtgaaggctacactcgtgctactccccctgcttgggataacttacatgttgttctttgtgaaccctggagaggatgaggtgtctcgtgtggtcttcatctacttcaattcgttcctggagagcttccaggggttttttgtctccgtgttttattgctttcttaacagcgaggtgaggtccgccatccggaagaggtggcaccgatggcaggacaagcactccataagggcccgcgtcgcgagggccatgagcatccctacctcaccaacgcgcgtctctttccacagtatcaagcaatcaactgctgtatag

SEQ ID NO: 57211 - DNA, 1335 bp, Artificial Sequence
  derived and/or modified sequence
atgggcggacatcctcagctccggctggttaaggccctgctgctcttaggcctcaatcctgtttccgcttcccttcaagaccaacactgcgagagtctctcgctagcatccaacatctccgggttgcagtgtaacgcctccgtagacttaatcggtacttgctggcccagaagcccggcagggcaactggtggtgcggccatgccccgcatttttttatggcgtgcggtacaacaccaccaacaacggctatcgcgaatgtctggcgaacggctcctgggccgctcgcgtgaactattcagaatgtcaggagatcctgaatgaagagaaaaagagcaaggttcattaccacgtcgcagtcataattaattatttggggcactgtataagcctggttgcgcttctcgtggctttcgtgctgttcctgcgactgcgccctgggtgcacccattggggtgaccaggccgacggcgctttggaggttggtgctccctggtcgggagctcccttccaagtcaggcgctcaatccggtgtctgcggaacattatccactggaacttgattagcgccttcatcctgagaaacgctacatggttcgtcgtccagctcacaatgtcgcccgaagtgcatcagtccaacgtcggttggtgccgtctcgtgaccgccgcatataactactttcacgtgaccaattttttctggatgttcggggagggatgttatctgcacactgcaatagtgctgacgtattcaacggacagactcaggaagtggatgttcatttgtattggctggggcgtgccgtttccgatcattgtcgcttgggcgatcggcaaactttactatgataacgagaagtgttggtttgggaagcgcccaggcgtgtataccgattatatctaccaaggcccaatgatattggtgttattgatcaactttatctttctgtttaatatcgtccgaattcttatgaccaagctgcgtgctagcacaacatccgagaccatccagtacagaaaagccgtcaaggccactttggtgctgttgcccttgttggggatcacgtacatgcttttctttgtcaatcccggtgaggacgaggttagtcgcgtcgtattcatttatttcaactccttcctggaaagctttcaagggttctttgtgagtgtgttctattgcttccttaactcggaagtgcggtctgctatcagaaagcgctggcaccgctggcaggataaacacagcatacgcgctcgtgtggccagggctatgtctatccccacatcgccgacaagagtttcattccacagcataaaacagtccactgccgtatag

SEQ ID NO: 57212 - DNA, 2663 bp, Artificial Sequence
  derived and/or modified sequence
ggcgaggccggcaagaggcggccgcgggccgggctgcgtcgggaaacggcggccagacttccccgggaaggggcgagcgagagccgggccgggccgggccgggccgcggggccgggaagcgccgagccgggcatctcctcaccaggcagcgaccgaggagcccggccgcccaccccgtgccgcccgagcccgcagccgcccgccggtccctctgggatgtccgtaggacccgggcattcaggacggtagccgagcgagcccgaggatgggagggcacccgcagctccgtctcgtcaaggcccttctccttctggggctgaaccccgtctctgcctccctccaggaccagcactgcgagagcctgtccctggccagcaacatctcaggactgcagtgcaacgcatccgtggacctcattggcacctgctggccccgcagccctgcggggcagctagtggttcggccctgccctgcctttttctatggtgtccgctacaataccacaaacaatggctaccgggagtgcctggccaatggcagctgggccgcccgcgtgaattactccgagtgccaggagatcctcaatgaggagaaaaaaagcaaggtgcactaccatgtcgcagtcatcatcaactacctgggccactgtatctccctggtggccctcctggtggcctttgtcctctttctgcggctcaggccaggctgcacccattggggtgaccaggcagatggagccctggaggtgggggctccatggagtggtgccccatttcaggttcgaaggagcatccggtgcctgcgaaacatcatccactggaacctcatctccgccttcatcctgcgcaacgccacctggttcgtggtccagctaaccatgagccccgaggtccaccagagcaacgtgggctggtgcaggttggtgacagccgcctacaactacttccatgtgaccaacttcttctggatgttcggcgagggctgctacctgcacacagccatcgtgctcacctactccactgaccggctgcgcaaatggatgttcatctgcattggctggggtgtgcccttccccatcattgtggcctgggccattgggaagctgtactacgacaatgagaagtgctggtttggcaaaaggcctggggtgtacaccgactacatctaccagggccccatgatcctggtcctgctgatcaatttcatcttccttttcaacatcgtccgcatcctcatgaccaagctccgggcatccaccacgtctgagaccattcagtacaggaaggctgtgaaagccactctggtgctgctgcccctcctgggcatcacctacatgctgttcttcgtcaatcccggggaggatgaggtctcccgggtcgtcttcatctacttcaactccttcctggaatccttccagggcttctttgtgtctgtgttctactgtttcctcaatagtgaggtccgttctgccatccggaagaggtggcaccggtggcaggacaagcactcgatccgtgcccgagtggcccgtgccatgtccatccccacctccccaacccgtgtcagctttcacagcatcaagcagtccacagcagtctgagctggcaggtcatggagcagcccccaaagagctgtggctggggggatgacggccaggctccctgaccaccctgcctgtggaggtgacctgttaggtctcatgcccactcccccaggagcagctggcactgacagcctgggggggccgctctccccctgcagccgtgcaggactctagctcatgagtggaaagtcacctacaggactgggccgggcccagggcctctggcttccctgcccaatcctccctggagaagggacatgggaatgaattgaaatggggcgctggacacctacagcagcacgcatgtccctccaaggctgtcttctcccagagcacaagaaggccagcccactgggccctggggctgccctcggcaaccgtggggaggccatttgctgccctggggcatcatgggcaactcgtgacagcctctgactcaccacgatgacgcctctggacctcggtgatgccttccgacaccactgggaaccaagggccctcactcaggaaccctggagacagaagtcaggtgtcatcatcagacttgcggccacagcactagagtcacccccccaggcctccagaaccttactggcactgtggcactgccaccagcaatgccctgccttgctgccttcaccctgaacatttagtaccctgcaggccaggccagcttcccctcacttaaccaccccataccagtcacctcctgctccttttcctcttttgtgagaagatgggggctggagggggcagagtggcctgtgagcaagagccaggggtgtcccagtcccagcctctggggcagagcttgtagccctggatggcctctggggcaggaccactagctaagcaagccaggagaagacccctgcccaagtggctcttgggacaacgtgctgcttacactccaggtgtggaccggccgcagcccccactgacctgcccatgtccagagggactggacagccagggcagggctttggggggcactagaagatgagggtgtcggctgtgaggcgggtggctggtataaataatatttatcttttcaaccagc

SEQ ID NO: 57213 - protein, 240 aa, Artificial Sequence
  derived and/or modified sequence
MSPEVHQSNVGWCRLVTAAYNYFHVTNFFWMFGEGCYLHTAIVLTYSTDRLRKWMFICIGWGVPFPIIVAWAIGKLYYDNEKCWFGKRPGVYTDYIYQGPMILVLLINFIFLFNIVRILMTKLRASTTSETIQYRKAVKATLVLLPLLGITYMLFFVNPGEDEVSRVVFIYFNSFLESFQGFFVSVFYCFLNSEVRSAIRKRWHRWQDKHSIRARVARAMSIPTSPTRVSFHSIKQSTAV

SEQ ID NO: 57214 - protein, 375 aa, Artificial Sequence
  derived and/or modified sequence
MGGHPQLRLVKALLLLGLNPVSASLQDQHCESLSLASNISDNGYRECLANGSWAARVNYSECQEILNEEKKSKVHYHVAVIINYLGHCISLVALLVAFVLFLRLRSIRCLRNIIHWNLISAFILRNATWFVVQLTMSPEVHQSNVGWCRLVTAAYNYFHVTNFFWMFGEGCYLHTAIVLTYSTDRLRKWMFICIGWGVPFPIIVAWAIGKLYYDNEKCWFGKRPGVYTDYIYQGPMILVLLINFIFLFNIVRILMTKLRASTTSETIQYRKAVKATLVLLPLLGITYMLFFVNPGEDEVSRVVFIYFNSFLESFQGFFVSVFYCFLNSEVRSAIRKRWHRWQDKHSIRARVARAMSIPTSPTRVSFHSIKQSTAV

SEQ ID NO: 57215 - DNA, 2457 bp, Artificial Sequence
  derived and/or modified sequence
ggcgaggccggcaagaggcggccgcgggccgggctgcgtcgggaaacggcggccagacttccccgggaaggggcgagcgagagccgggccgggccgggccgggccgcggggccgggaagcgccgagccgggcatctcctcaccaggcagcgaccgaggagcccggccgcccaccccgtgccgcccgagcccgcagccgcccgccggtccctctgggatgtccgtaggacccgggcattcaggacggtagccgagcgagcccgaggatgggagggcacccgcagctccgtctcgtcaaggcccttctccttctggggctgaaccccgtctctgcctccctccaggaccagcactgcgagagcctgtccctggccagcaacatctcagacaatggctaccgggagtgcctggccaatggcagctgggccgcccgcgtgaattactccgagtgccaggagatcctcaatgaggagaaaaaaagcaaggtgcactaccatgtcgcagtcatcatcaactacctgggccactgtatctccctggtggccctcctggtggcctttgtcctctttctgcggctcaggagcatccggtgcctgcgaaacatcatccactggaacctcatctccgccttcatcctgcgcaacgccacctggttcgtggtccagctaaccatgagccccgaggtccaccagagcaacgtgggctggtgcaggttggtgacagccgcctacaactacttccatgtgaccaacttcttctggatgttcggcgagggctgctacctgcacacagccatcgtgctcacctactccaccgaccggctgcgcaaatggatgttcatctgcattggctggggtgtgcccttccccatcattgtggcctgggccattgggaagctgtactacgacaatgagaagtgttggtttggcaaaaggcctggggtgtacaccgactacatctaccagggccccatgatcctggtcctgctgatcaatttcatcttccttttcaacatcgtccgcatcctcatgaccaagctccgggcatccaccacgtctgagaccattcagtacaggaaggctgtgaaagccactctggtgctgctgcccctcctgggcatcacctacatgctgttcttcgtcaatcccggggaggatgaggtctcccgggtcgtcttcatctacttcaactccttcctggaatccttccagggcttctttgtgtctgtgttctactgtttcctcaatagtgaggtccgttctgccatccggaagaggtggcaccggtggcaggacaagcactcgatccgtgcccgagtggcccgtgccatgtccatccccacctccccaacccgtgtcagctttcacagcatcaagcagtccacagcagtctgagctggcaggtcatggagcagcccccaaacagctgtggctggggggatgacggccaggctccctgaccaccctgcctgtggaggtgacctgttaggtctcatgcccactcccccaggagcagctggcactgacagcctggggggggccgctcttcccctgcagccgtgcaggactctagctcatgagtggaaagtcacctacaggactgggccgggcccagggcctctggcttccctgcccaatcctccctggagaagggacatgggaatgaattgaaatggggcgctggacacctacagcagcacgcatgtccctccaaggctgccttctcccagagcacaagaaggccagcccactggggcctggggctgccctcggcaaccgtggggaggccatttgctgccctggggcatcatgggcaactcgtgacagcctctgactcaccacgatgatgcctctggacctcggtgatgccttccgacaccactgggaaccaagggccctcgctcaggaaccctggagacagaagtcaggtgtcatcatcagacttgcggccacagcactagagtcacccccccaggcctccagaacctcactggcactgtggcactgccaccagcaatgccctgccttgctgccttcaccctgaacatttactaccctgcaggccaggccagcttcccctcacttaaccaccccacaccagtcacctcctgctccttttcctcttttgtgagaagatgggggctggagggggcagagtggcctgtgagcaagagccaggggtgtcccagtcccagcctctggggcagagcttgtagccctggatggcctctggggcaggaccactagctaagcaagccaggagaagacccctgcccaagtggctcttgggacaacgtgctgcttacactccaggtgtggaccggccgcagcccccactgacctgcccatgtccagagggactggacagccagggcagggctttggggggcactagaagatgagggtgtcggctgtgaggcgggtggctggtataaataatatttatcttttcaaccagc

SEQ ID NO: 57216 - DNA, 1128 bp, Artificial Sequence
  derived and/or modified sequence
atgggcggccacccccagctgagactggtgaaggccctgctgctgctgggcctgaaccccgtgagcgccagcctgcaggaccagcactgcgagagcctgagcctggccagcaacatcagcgacaacggctacagagagtgcctggccaacggcagctgggccgccagagtgaactacagcgagtgccaggagatcctgaacgaggagaagaagagcaaggtgcactaccacgtggccgtgatcatcaactacctgggccactgcatcagcctggtggccctgctggtggccttcgtgctgttcctgagactgagaagcatcagatgcctgagaaacatcatccactggaacctgatcagcgccttcatcctgagaaacgccacctggttcgtggtgcagctgaccatgagccccgaggtgcaccagagcaacgtgggctggtgcagactggtgaccgccgcctacaactacttccacgtgaccaacttcttctggatgttcggcgagggctgctacctgcacaccgccatcgtgctgacctacagcaccgacagactgagaaagtggatgttcatctgcatcggctggggcgtgcccttccccatcatcgtggcctgggccatcggcaagctgtactacgacaacgagaagtgctggttcggcaagagacccggcgtgtacaccgactacatctaccagggccccatgatcctggtgctgctgatcaacttcatcttcctgttcaacatcgtgagaatcctgatgaccaagctgagagccagcaccaccagcgagaccatccagtacagaaaggccgtgaaggccaccctggtgctgctgcccctgctgggcatcacctacatgctgttcttcgtgaaccccggcgaggacgaggtgagcagagtggtgttcatctacttcaacagcttcctggagagcttccagggcttcttcgtgagcgtgttctactgcttcctgaacagcgaggtgagaagcgccatcagaaagagatggcacagatggcaggacaagcacagcatcagagccagagtggccagagccatgagcatccccaccagccccaccagagtgagcttccacagcatcaagcagagcaccgccgtgtag

SEQ ID NO: 57217 - DNA, 1128 bp, Artificial Sequence
  derived and/or modified sequence
atgggaggacatccgcagctcagactggtgaaggctctgctgctcctcggactcaaccccgtgtcagcctccctgcaggatcagcattgcgaaagcctttccctggcttccaatatctccgataacggctatagggagtgtctagccaacgggtcctgggccgcacgggtgaattatagcgaatgccaagaaatattaaatgaggaaaaaaaaagtaaggtacactaccacgtggccgtcatcatcaactatctgggccattgtatctcccttgtggcgctactcgtggcctttgtcctgtttctccggttgaggtcaataaggtgcttgcgcaacatcattcactggaacttaataagcgcgttcatcttgcgcaacgcaacatggttcgtagtgcagctgaccatgagtccggaggtgcatcaatcaaacgtgggatggtgccgcctggtgactgccgcttataactactttcacgtgactaatttcttttggatgttcggcgaagggtgttaccttcacaccgcaatcgtgcttacctactccacggatcgacttaggaaatggatgttcatttgcatagggtggggtgtgccatttccaattattgtggcatgggctattggaaaactctactatgataatgaaaagtgctggttcggcaagcgccccggtgtgtacaccgactacatctaccaggggccaatgatcctcgtcttactaattaactttattttcctgttcaacatcgtgaggatcttaatgacaaagctgcgcgcctctacaacatccgaaacaattcagtatcgcaaagctgtaaaagcgaccctggtactcctccccctgttgggtatcacatatatgcttttctttgtgaacccaggggaagatgaggtgtccagagtagtgttcatctactttaactcctttctagaatctttccaagggttctttgtctcagtcttctattgcttcctgaatagcgaggtgcggtctgccatccggaagagatggcacaggtggcaggataaacatagcattagggcgcgggttgcgagggctatgtcaatcccaacgtccccaaccagagttagctttcacagcatcaaacagtccaccgcggtgtag

SEQ ID NO: 57218 - DNA, 1128 bp, Artificial Sequence
  derived and/or modified sequence
atgggcggccacccccagctgcggctggtgaaggccctgctgctgctgggcctgaaccctgtgtctgccagcctgcaggaccagcactgtgagagcctgagcctggccagcaacatcagtgacaatggctaccgggagtgcctggccaacggctcctgggccgcccgggtgaactacagcgagtgccaggagatcctgaatgaggagaagaagagcaaggtgcactaccacgtggccgtcatcatcaactacctgggccactgcatcagcctggtggccctgctggtggcctttgtgctcttcctgcggctgcggagcatccgctgcctgaggaacatcatccactggaacctgatcagcgccttcatcctgagaaatgccacctggtttgtggtgcagctgaccatgagccctgaggtgcaccagagcaatgtgggctggtgccgcctggtgacagctgcctacaactacttccacgtgaccaacttcttctggatgtttggagagggctgctacctgcacacagccatcgtgctgacctacagcacagaccggctgaggaagtggatgttcatctgcatcggctggggcgtgcccttccccatcatcgtggcctgggccatcggcaagctgtactatgacaatgagaagtgctggtttgggaagaggcctggggtgtacacagactacatctaccagggccccatgatcctggtgctgctgatcaacttcatcttcctgttcaacatcgtgcgcatcctgatgaccaagctgcgggccagcaccaccagcgagaccatccagtacaggaaggctgtgaaggccaccctggtgctgctgcccctgctgggcatcacctacatgctgttctttgtgaaccctggagaagatgaggtgtcccgggtggtgttcatctacttcaacagcttcctggagagcttccagggcttctttgtgtctgtgttctactgcttcctgaacagcgaggtgcgcagcgccatcaggaagcgctggcaccgctggcaggacaagcacagcatccgggcccgggtggcccgggccatgagcatccccaccagccccaccagggtgtccttccacagcatcaagcagagcacagctgtgtag

SEQ ID NO: 57219 - DNA, 1128 bp, Artificial Sequence
  derived and/or modified sequence
atgggcggccacccccagctgcggctggtgaaggccctgctgctgcttgggctgaatccagtaagcgcgtccctgcaggaccaacattgcgaatccctgagcctggcctcaaatatcagcgacaatggttatcgagagtgtcttgccaacggcagctgggcggctcgagtcaattactctgagtgccaagagatactcaatgaggagaagaaaagcaaggttcactaccacgtcgccgtgataatcaactatctcggccattgcatctctctggtggcactcctggttgcatttgtcctctttttacggctacggagcatccggtgcctgagaaacatcatccactggaacctgatctccgccttcattctccggaatgctacctggttcgtcgtccagctgacaatgtcccctgaagttcaccagagtaacgtcgggtggtgccggctggtgacggccgcttataattactttcatgtgaccaactttttttggatgtttggtgaaggttgctacctgcacacagcaatcgtgctcacgtactctactgatcggctgcgaaagtggatgttcatttgtattggatggggggttccctttccaatcatcgtcgcttgggctatcggaaagctgtattacgacaacgagaagtgttggttcggcaaaaggcctggagtgtataccgattatatatatcaagggcctatgatcctggtgcttctgatcaatttcatatttcttttcaacattgtgcgtattctgatgactaaactgagggcatcaacgaccagcgagactatacaatacagaaaggcagtgaaagccaccctcgtgctactgcctctgcttggcatcacctacatgctgttctttgtgaatcccggcgaagatgaggtgagtcgggtcgtgtttatatactttaatagctttttggaatccttccaaggctttttcgtgtctgtcttttattgttttctcaatagcgaagtacggtcagctattcgcaaacggtggcacaggtggcaggataaacacagtatcagagctagggtggcgcgagcaatgagcatccctacatctccaacaagggtctcgttccattccattaagcagtcaacagctgtgtag

SEQ ID NO: 57220 - DNA, 1128 bp, Artificial Sequence
  derived and/or modified sequence
atgggcggtcacccacagttaaggctggtaaaagcccttttacttctgggcctaaatcccgtttcagcaagtctccaggatcagcattgtgaatctcttagcttggcttcgaacatttcagataacggctaccgcgagtgcctggccaatggctcttgggctgcccgagtgaattattctgagtgccaggagatcctgaacgaagagaaaaaatccaaagtgcattaccacgttgcagtgataattaactacctggggcactgcatttctctggtcgctttactagtggccttcgttctgttcctccgccttagatcgatccggtgtctgaggaatattatccactggaatctcatctcagcgttcatacttaggaatgccacatggttcgtggtccagttaacaatgagccctgaagttcaccaatccaatgtgggatggtgcaggctggttaccgcggcttataactactttcatgtgacaaacttcttctggatgtttggagagggatgctatctgcacacagccatagtgctaacttacagcacagacagacttcgtaaatggatgttcatttgtatcggatggggggtaccatttcccatcattgtggcctgggcaatcgggaaattgtattatgacaacgagaaatgctggtttggaaaacgcccaggggtctacaccgactatatatatcagggacctatgattctggtactactcatcaactttattttcctgttcaacatcgtgaggattttgatgaccaaactgcgggcttctacgaccagcgagactatccaatacagaaaagctgtaaaagctactctggtactgcttccgttgctgggtattacgtacatgctgttcttcgtcaaccctggtgaagacgaggtgtctcgcgtggtgtttatatactttaatagctttctcgaaagcttccagggtttctttgtgagcgtcttttattgtttcctcaatagtgaggtgaggtcagccatacggaagagatggcaccgttggcaagataagcactcaatccgggctagggtggccagagccatgagcatcccgacaagccctacaagggtgtccttccattcgattaagcagagcaccgccgtgtag

SEQ ID NO: 57221 - DNA, 1128 bp, Artificial Sequence
  derived and/or modified sequence
atgggggggcacccccagctcaggcttgtcaaggccctcttattgcttggtctaaacccagtgagcgccagcttacaggaccaacactgcgagagcctttccctggcatccaacatctccgacaacggatacagagagtgtttggctaatggttcctgggccgcgcgcgtgaactactcagagtgtcaggaaattctcaatgaagagaagaaatccaaagtccactaccatgtggcggtgatcattaactatctgggacattgtatttcacttgttgcccttttggttgcttttgtccttttcctgcgcctgaggtctatccggtgcttgcgaaatatcattcactggaatctgatatctgcttttattctgcggaacgcaacttggttcgtcgtacagttaaccatgtccccagaagtacaccaatctaatgtgggctggtgccgactggtgaccgctgcttacaattactttcacgttaccaactttttttggatgtttggggaaggctgctatcttcacactgctatcgttctgacctatagcacagatcgcctgagaaaatggatgtttatctgcattgggtggggcgtgccctttccgattatcgtggcctgggcaatcgggaagctctactatgataacgaaaagtgttggtttggcaagcgccctggcgtgtacactgattacatttaccaggggcctatgattttggttctgctgattaatttcatttttctgttcaatattgtgaggatcctgatgacaaaactgagagctagtaccaccagcgaaacgatccagtatagaaaggcagtgaaagccacacttgtactgctcccactgcttggaattacatacatgttatttttcgtcaaccccggcgaagatgaagtgagccgggtggttttcatctacttcaacagtttcttagaaagcttccaaggcttttttgtatccgtcttctattgcttcctgaactccgaggtgcgctccgccatcaggaaacgatggcatagatggcaagacaaacatagtatccgcgctcgggttgctcgggccatgtctattcccactagccctacccgggtgtcgttccattcaataaagcaatccaccgctgtgtag

SEQ ID NO: 57222 - DNA, 1128 bp, Artificial Sequence
  derived and/or modified sequence
atgggcggccacccccagctgcggctggtgaaggccctgctgctgctgggcctgaaccccgtctccgcctccttgcaggaccagcactgtgaatctttgagtctggcgtctaacatcagcgataatggttaccgggaatgcctggctaatgggtcttgggctgcacgagtcaactattccgaatgtcaggagatcctgaacgaggagaaaaagtcaaaggttcactatcatgtggcggtgataattaattacctaggtcattgtatctcccttgtggcgttactggtggcctttgtgctctttcttaggctgcggagtatccgatgtttgcgaaatatcattcactggaatctgatatcagccttcatcctgcggaacgctacttggttcgtggtgcagttgaccatgagtcctgaggtgcatcagagcaatgtcggatggtgtcgcctcgtcaccgccgcatataattattttcacgttacaaactttttctggatgtttggagagggctgttacttgcacaccgccatagtgctcacctattctaccgaccggcttcggaagtggatgttcatctgcataggctggggtgtaccatttccaattatagttgcatgggctatcgggaaactctattacgataacgaaaagtgctggtttgggaagcgccccggtgtatatactgattatatatatcaaggtccgatgatccttgtactgctgatcaacttcatctttttatttaatatcgtgcgcatactgatgactaaactccgcgcctctaccacctccgagactatacaatatcgtaaggctgtgaaggcaacccttgtcctgctcccgctgctgggcattacctatatgctgttctttgtgaatcccggcgaggatgaggtaagccgcgtggtgttcatctattttaattctttcctcgagtcattccagggcttttttgtgtccgtcttctattgctttcttaattccgaggttaggtccgcaatcagaaaacgctggcatagatggcaggataaacactccatccgtgcaagagtggctagggcaatgagcatacctacatcacccactcgggtgtcttttcattccatcaagcagtccactgctgtgtag

SEQ ID NO: 57223 - DNA, 1128 bp, Artificial Sequence
  derived and/or modified sequence
atggggggtcacccccagctgaggctggtgaaggctctgctgctgctgggattaaacccagtctccgcctccctccaggaccagcactgtgaaagcctgtctctggcgagtaatatctccgataacggctatcgggagtgtctcgccaacggttcctgggcagcacgagtgaactatagtgaatgtcaggagattctgaatgaggagaagaaatcgaaagtccactaccacgtcgccgtgatcatcaattatctcggacattgcatttccctcgtggcccttctcgttgcctttgttctattcctgcgcctccggtccattcggtgcctaaggaatatcattcattggaaccttatctccgcctttattcttcgcaacgccacttggttcgttgtgcagttaaccatgtccccggaggtccatcagagcaacgtggggtggtgtcgacttgttacggcagcgtataattatttccacgtaaccaatttcttttggatgtttggggagggatgctacctgcataccgcaatagtgttgacctatagcactgaccgactccgaaagtggatgtttatttgcatcggctggggggtcccctttcctattatcgtagcatgggcaatcggaaagctctactatgataacgaaaaatgttggttcggcaagcggcctggcgtgtataccgattacatttaccagggcccaatgatcctggtgcttctcatcaatttcatcttccttttcaacatcgtgaggattctgatgaccaaactgcgggctagcaccacttccgagactattcagtaccgcaaggcagtgaaggctaccctcgtgctgctcccactgcttggaatcacctacatgctcttcttcgtgaaccccggagaggacgaagtttcgagagtggtgttcatctattttaacagcttcttggaatcatttcagggattctttgtttcagtcttttattgcttcctgaatagcgaagtgcgaagtgccattcggaagcgctggcatcgctggcaggataagcacagcattcgcgctcgggttgccagagccatgagcattccaacatctcctacccgagtctcgttccacagcattaaacagagcaccgcggtgtag

SEQ ID NO: 57224 - DNA, 2456 bp, Artificial Sequence
  derived and/or modified sequence
ggcgaggccggcaagaggcggccgcgggccgggctgcgtcgggaaacggcggccagacttccccgggaaggggcgagcgagagccgggccgggccgggccgggccgcggggccgggaagcgccgagccgggcatctcctcaccaggcagcgaccgaggagcccggccgcccaccccgtgccgcccgagcccgcagccgcccgccggtccctctgggatgtccgtaggacccgggcattcaggacggtagccgagcgagcccgaggatgggagggcacccgcagctccgtctcgtcaaggcccttctccttctggggctgaaccccgtctctgcctccctccaggaccagcactgcgagagcctgtccctggccagcaacatctcagacaatggctaccgggagtgcctggccaatggcagctgggccgcccgcgtgaattactccgagtgccaggagatcctcaatgaggagaaaaaaagcaaggtgcactaccatgtcgcagtcatcatcaactacctgggccactgtatctccctggtggccctcctggtggcctttgtcctctttctgcggctcaggagcatccggtgcctgcgaaacatcatccactggaacctcatctccgccttcatcctgcgcaacgccacctggttcgtggtccagctaaccatgagccccgaggtccaccagagcaacgtgggctggtgcaggttggtgacagccgcctacaactacttccatgtgaccaacttcttctggatgttcggcgagggctgctacctgcacacagccatcgtgctcacctactccactgaccggctgcgcaaatggatgttcatctgcattggctggggtgtgcccttccccatcattgtggcctgggccattgggaagctgtactacgacaatgagaagtgctggtttggcaaaaggcctggggtgtacaccgactacatctaccagggccccatgatcctggtcctgctgatcaatttcatcttccttttcaacatcgtccgcatcctcatgaccaagctccgggcatccaccacgtctgagaccattcagtacaggaaggctgtgaaagccactctggtgctgctgcccctcctgggcatcacctacatgctgttcttcgtcaatcccggggaggatgaggtctcccgggtcgtcttcatctacttcaactccttcctggaatccttccagggcttctttgtgtctgtgttctactgtttcctcaatagtgaggtccgttctgccatccggaagaggtggcaccggtggcaggacaagcactcgatccgtgcccgagtggcccgtgccatgtccatccccacctccccaacccgtgtcagctttcacagcatcaagcagtccacagcagtctgagctggcaggtcatggagcagcccccaaagagctgtggctggggggatgacggccaggctccctgaccaccctgcctgtggaggtgacctgttaggtctcatgcccactcccccaggagcagctggcactgacagcctgggggggccgctctccccctgcagccgtgcaggactctagctcatgagtggaaagtcacctacaggactgggccgggcccagggcctctggcttccctgcccaatcctccctggagaagggacatgggaatgaattgaaatggggcgctggacacctacagcagcacgcatgtccctccaaggctgtcttctcccagagcacaagaaggccagcccactgggccctggggctgccctcggcaaccgtggggaggccatttgctgccctggggcatcatgggcaactcgtgacagcctctgactcaccacgatgacgcctctggacctcggtgatgccttccgacaccactgggaaccaagggccctcactcaggaaccctggagacagaagtcaggtgtcatcatcagacttgcggccacagcactagagtcacccccccaggcctccagaaccttactggcactgtggcactgccaccagcaatgccctgccttgctgccttcaccctgaacatttagtaccctgcaggccaggccagcttcccctcacttaaccaccccataccagtcacctcctgctccttttcctcttttgtgagaagatgggggctggagggggcagagtggcctgtgagcaagagccaggggtgtcccagtcccagcctctggggcagagcttgtagccctggatggcctctggggcaggaccactagctaagcaagccaggagaagacccctgcccaagtggctcttgggacaacgtgctgcttacactccaggtgtggaccggccgcagcccccactgacctgcccatgtccagagggactggacagccagggcagggctttggggggcactagaagatgagggtgtcggctgtgaggcgggtggctggtataaataatatttatcttttcaaccagc

SEQ ID NO: 57225 - protein, 401 aa, Artificial Sequence
  derived and/or modified sequence
MGGHPQLRLVKALLLLGLNPVSASLQDQHCESLSLASNISGLQCNASVDLIGTCWPRSPAGQLVVRPCPAFFYGVRYNTTNNGYRECLANGSWAARVNYSECQEILNEEKKSKVHYHVAVIINYLGHCISLVALLVAFVLFLRLRSIRCLRNIIHWNLISAFILRNATWFVVQLTMSPEVHQSNVGWCRLVTAAYNYFHVTNFFWMFGEGCYLHTAIVLTYSTDRLRKWMFICIGWGVPFPIIVAWAIGKLYYDNEKCWFGKRPGVYTDYIYQGPMILVLLINFIFLFNIVRILMTKLRASTTSETIQYRKAVKATLVLLPLLGITYMLFFVNPGEDEVSRVVFIYFNSFLESFQVRSAIRKRWHRWQDKHSIRARVARAMSIPTSPTRVSFHSIKQSTAV

SEQ ID NO: 57226 - protein, 125 aa, Artificial Sequence
  derived and/or modified sequence
MGGHPQLRLVKALLLLGLNPVSASLQDQHCESLSLASNISGLQCNASVDLIGTCWPRSPAGQLVVRPCPAFFYGVRYNTTNNGYRECLANGSWAARVNYSECQEILNEEEPGTQAQPGRAHRGGT

SEQ ID NO: 57227 - DNA, 2535 bp, Artificial Sequence
  derived and/or modified sequence
ggcgaggccggcaagaggcggccgcgggccgggctgcgtcgggaaacggcggccagacttccccgggaaggggcgagcgagagccgggccgggccgggccgggccgcggggccgggaagcgccgagccgggcatctcctcaccaggcagcgaccgaggagcccggccgcccaccccgtgccgcccgagcccgcagccgcccgccggtccctctgggatgtccgtaggacccgggcattcaggacggtagccgagcgagcccgaggatgggagggcacccgcagctccgtctcgtcaaggcccttctccttctggggctgaaccccgtctctgcctccctccaggaccagcactgcgagagcctgtccctggccagcaacatctcaggactgcagtgcaacgcatccgtggacctcattggcacctgctggccccgcagccctgcggggcagctagtggttcggccctgccctgcctttttctatggtgtccgctacaataccacaaacaatggctaccgggagtgcctggccaatggcagctgggccgcccgcgtgaattactccgagtgccaggagatcctcaatgaggagaaaaaaagcaaggtgcactaccatgtcgcagtcatcatcaactacctgggccactgtatctccctggtggccctcctggtggcctttgtcctctttctgcggctcaggagcatccggtgcctgcgaaacatcatccactggaacctcatctccgccttcatcctgcgcaacgccacctggttcgtggtccagctaaccatgagccccgaggtccaccagagcaacgtgggctggtgcaggttggtgacagccgcctacaactacttccatgtgaccaacttcttctggatgttcggcgagggctgctacctgcacacagccatcgtgctcacctactccaccgaccggctgcgcaaatggatgttcatctgcattggctggggtgtgcccttccccatcattgtggcctgggccattgggaagctgtactacgacaatgagaagtgttggtttggcaaaaggcctggggtgtacaccgactacatctaccagggccccatgatcctggtcctgctgatcaatttcatcttccttttcaacatcgtccgcatcctcatgaccaagctccgggcatccaccacgtctgagaccattcagtacaggaaggctgtgaaagccactctggtgctgctgcccctcctgggcatcacctacatgctgttcttcgtcaatcccggggaggatgaggtctcccgggtcgtcttcatctacttcaactccttcctggaatccttccaggtccgttctgccatccggaagaggtggcaccggtggcaggacaagcactcgatccgtgcccgagtggcccgtgccatgtccatccccacctccccaacccgtgtcagctttcacagcatcaagcagtccacagcagtctgagctggcaggtcatggagcagcccccaaacagctgtggctggggggatgacggccaggctccctgaccaccctgcctgtggaggtgacctgttaggtctcatgcccactcccccaggagcagctggcactgacagcctggggggggccgctcttcccctgcagccgtgcaggactctagctcatgagtggaaagtcacctacaggactgggccgggcccagggcctctggcttccctgcccaatcctccctggagaagggacatgggaatgaattgaaatggggcgctggacacctacagcagcacgcatgtccctccaaggctgccttctcccagagcacaagaaggccagcccactggggcctggggctgccctcggcaaccgtggggaggccatttgctgccctggggcatcatgggcaactcgtgacagcctctgactcaccacgatgatgcctctggacctcggtgatgccttccgacaccactgggaaccaagggccctcgctcaggaaccctggagacagaagtcaggtgtcatcatcagacttgcggccacagcactagagtcacccccccaggcctccagaacctcactggcactgtggcactgccaccagcaatgccctgccttgctgccttcaccctgaacatttactaccctgcaggccaggccagcttcccctcacttaaccaccccacaccagtcacctcctgctccttttcctcttttgtgagaagatgggggctggagggggcagagtggcctgtgagcaagagccaggggtgtcccagtcccagcctctggggcagagcttgtagccctggatggcctctggggcaggaccactagctaagcaagccaggagaagacccctgcccaagtggctcttgggacaacgtgctgcttacactccaggtgtggaccggccgcagcccccactgacctgcccatgtccagagggactggacagccagggcagggctttggggggcactagaagatgagggtgtcggctgtgaggcgggtggctggtataaataatatttatcttttcaaccagc

SEQ ID NO: 57228 - DNA, 643 bp, Artificial Sequence
  derived and/or modified sequence
ggcgaggccggcaagaggcggccgcgggccgggctgcgtcgggaaacggcggccagacttccccgggaaggggcgagcgagagccgggccgggccgggccgggccgcggggccgggaagcgccgagccgggcatctcctcaccaggcagcgaccgaggagcccggccgcccaccccgtgccgcccgagcccgcagccgcccgccggtccctctgggatgtccgtaggacccgggcattcaggacggtagccgagcgagcccgaggatgggagggcacccgcagctccgtctcgtcaaggcccttctccttctggggctgaaccccgtctctgcctccctccaggaccagcactgcgagagcctgtccctggccagcaacatctcaggactgcagtgcaacgcatccgtggacctcattggcacctgctggccccgcagccctgcggggcagctagtggttcggccctgccctgcctttttctatggtgtccgctacaataccacaaacaatggctaccgggagtgcctggccaatggcagctgggccgcccgcgtgaattactccgagtgccaggagatcctcaatgaggaggagcctgggactcaggcacagcctgggagagcacaccgtggtgggacatga

SEQ ID NO: 57229 - DNA, 1206 bp, Artificial Sequence
  derived and/or modified sequence
atgggcggccacccccagctgagactggtgaaggccctgctgctgctgggcctgaaccccgtgagcgccagcctgcaggaccagcactgcgagagcctgagcctggccagcaacatcagcggcctgcagtgcaacgccagcgtggacctgatcggcacctgctggcccagaagccccgccggccagctggtggtgagaccctgccccgccttcttctacggcgtgagatacaacaccaccaacaacggctacagagagtgcctggccaacggcagctgggccgccagagtgaactacagcgagtgccaggagatcctgaacgaggagaagaagagcaaggtgcactaccacgtggccgtgatcatcaactacctgggccactgcatcagcctggtggccctgctggtggccttcgtgctgttcctgagactgagaagcatcagatgcctgagaaacatcatccactggaacctgatcagcgccttcatcctgagaaacgccacctggttcgtggtgcagctgaccatgagccccgaggtgcaccagagcaacgtgggctggtgcagactggtgaccgccgcctacaactacttccacgtgaccaacttcttctggatgttcggcgagggctgctacctgcacaccgccatcgtgctgacctacagcaccgacagactgagaaagtggatgttcatctgcatcggctggggcgtgcccttccccatcatcgtggcctgggccatcggcaagctgtactacgacaacgagaagtgctggttcggcaagagacccggcgtgtacaccgactacatctaccagggccccatgatcctggtgctgctgatcaacttcatcttcctgttcaacatcgtgagaatcctgatgaccaagctgagagccagcaccaccagcgagaccatccagtacagaaaggccgtgaaggccaccctggtgctgctgcccctgctgggcatcacctacatgctgttcttcgtgaaccccggcgaggacgaggtgagcagagtggtgttcatctacttcaacagcttcctggagagcttccaggtgagaagcgccatcagaaagagatggcacagatggcaggacaagcacagcatcagagccagagtggccagagccatgagcatccccaccagccccaccagagtgagcttccacagcatcaagcagagcaccgccgtgtag

SEQ ID NO: 57230 - DNA, 378 bp, Artificial Sequence
  derived and/or modified sequence
atgggcggccacccccagctgagactggtgaaggccctgctgctgctgggcctgaaccccgtgagcgccagcctgcaggaccagcactgcgagagcctgagcctggccagcaacatcagcggcctgcagtgcaacgccagcgtggacctgatcggcacctgctggcccagaagccccgccggccagctggtggtgagaccctgccccgccttcttctacggcgtgagatacaacaccaccaacaacggctacagagagtgcctggccaacggcagctgggccgccagagtgaactacagcgagtgccaggagatcctgaacgaggaggagcccggcacccaggcccagcccggcagagcccacagaggcggcacctag

SEQ ID NO: 57231 - DNA, 1206 bp, Artificial Sequence
  derived and/or modified sequence
atggggggtcaccctcagctgcgcctggtgaaggcacttctactgcttggcctgaacccggtttccgcttctttacaagaccagcactgcgagtccctgtccctggcctcaaacataagtggtttacaatgcaacgcttcggttgatctgattggcacctgctggcctaggagtcccgctgggcaattggttgtgaggccttgccccgccttcttttacggcgtgaggtacaatacaacgaataacggctatcgagagtgtttggctaacgggagctgggcagctcgcgttaattactctgagtgtcaggaaattctcaacgaggaaaagaagagtaaggtgcactaccatgtggcagtcattattaactatctgggacattgcatcagcctggtggcgctgttggtggctttcgtcctgtttcttcgcttaagaagcattcggtgcttacgcaacataatccactggaatctcatttccgccttcatccttcgcaacgccacttggttcgtggttcagctaacaatgtcccctgaagtgcaccagtccaacgtcgggtggtgccgtttagtgacagccgcttacaattattttcacgtaaccaactttttttggatgttcggcgagggctgttatctacacacagcgatcgtgcttacatatagcactgaccgcctgcgtaagtggatgttcatttgtatcggctggggcgttccgttccccatcattgtggcttgggccatcggcaagttgtactacgataacgaaaagtgttggttcggcaagagaccaggcgtgtatactgactatatttatcaggggcctatgatcttagtccttttaatcaattttattttcctgttcaacatagtgcgcattctcatgacgaaactccgagcttctaccacatcagagactattcagtatcgcaaggccgtgaaagcgaccctggtattgcttcctttgctcgggattacttatatgctcttcttcgtcaaccccggcgaagacgaagtatctcgtgttgtctttatctactttaacagctttctcgaaagtttccaggtgcggtccgctatcagaaaacggtggcacagatggcaggacaagcacagtattcgggcaagagtcgcaagagccatgtcaatccctacctcaccaacacgcgtgtcttttcatagcattaaacaatcaacagccgtgtag

SEQ ID NO: 57232 - DNA, 378 bp, Artificial Sequence
  derived and/or modified sequence
atgggcggtcaccctcagctgcggctagtcaaggccctgttgctcctcgggttaaatcccgtgtccgcctccttacaggaccagcactgcgagtcactctccctcgcatccaatatatcagggctacagtgcaacgcaagtgtggatctgatcgggacttgttggccacgatctcccgcaggccagctcgtggtgcggccatgtcccgccttcttttacggagtacggtataatacaaccaataacgggtatcgagagtgcctggccaatgggtcttgggccgcgagagtgaattactcagaatgccaagaaatccttaacgaagaggagcctgggacccaggcacagcctggacgagcccacaggggggggacctag

SEQ ID NO: 57233 - DNA, 1206 bp, Artificial Sequence
  derived and/or modified sequence
atgggcggccacccccagctgcggctggtgaaggccctgctgctgctgggcctgaaccctgtgtctgccagcctgcaggaccagcactgtgagagcctgagcctggccagcaacatcagcggcctgcagtgcaatgcctctgtggacctgattggcacctgctggcccaggagccctgctggccagctggtggtgcggccctgcccagccttcttctatggagtgcgctacaacaccaccaacaacggctaccgggagtgcctggccaacggctcctgggccgcccgggtgaactacagcgagtgccaggagatcctgaatgaggagaagaagagcaaggtgcactaccacgtggccgtcatcatcaactacctgggccactgcatcagcctggtggccctgctggtggcctttgtgctcttcctgcggctgcggagcatccgctgcctgaggaacatcatccactggaacctgatcagcgccttcatcctgagaaatgccacctggtttgtggtgcagctgaccatgagccctgaggtgcaccagagcaatgtgggctggtgccgcctggtgacagctgcctacaactacttccacgtgaccaacttcttctggatgtttggagagggctgctacctgcacacagccatcgtgctgacctacagcacagaccggctgaggaagtggatgttcatctgcatcggctggggcgtgcccttccccatcatcgtggcctgggccatcggcaagctgtactatgacaatgagaagtgctggtttgggaagaggcctggggtgtacacagactacatctaccagggccccatgatcctggtgctgctgatcaacttcatcttcctgttcaacatcgtgcgcatcctgatgaccaagctgcgggccagcaccaccagcgagaccatccagtacaggaaggctgtgaaggccaccctggtgctgctgcccctgctgggcatcacctacatgctgttctttgtgaaccctggagaagatgaggtgtcccgggtggtgttcatctacttcaacagcttcctggagagcttccaggtgcgcagcgccatcaggaagcgctggcaccgctggcaggacaagcacagcatccgggcccgggtggcccgggccatgagcatccccaccagccccaccagggtgtccttccacagcatcaagcagagcacagctgtgtag

SEQ ID NO: 57234 - DNA, 378 bp, Artificial Sequence
  derived and/or modified sequence
atgggcggccacccccagctgcggctggtgaaggccctgctgctgctgggcctgaaccctgtgtctgccagcctgcaggaccagcactgtgagagcctgagcctggccagcaacatcagcggcctgcagtgcaatgcctctgtggacctgattggcacctgctggcccaggagccctgctggccagctggtggtgcggccctgcccagccttcttctatggagtgcgctacaacaccaccaacaacggctaccgggagtgcctggccaacggctcctgggccgcccgggtgaactacagcgagtgccaggagatcctgaatgaggaggagcccggcacccaggcccagcccggccgggcccacagaggaggcacctag

SEQ ID NO: 57235 - DNA, 1206 bp, Artificial Sequence
  derived and/or modified sequence
atgggcggccacccccagctgcggctggtgaaggccctgctgctgctcggtctcaatccagtatccgcaagcttgcaggaccagcattgcgaatcccttagccttgccagtaatattagtgggcttcaatgtaacgcctctgtcgatttaattggaacctgttggccgcgtagccccgccggtcagctggtcgttcggccctgtccagccttcttttacggggtgagatataatacaacaaataatggctatagagaatgtttagctaacgggtcctgggctgctagggtgaactattcggagtgtcaggagattctcaacgaagagaaaaaatctaaagttcactaccatgtggctgttattatcaattacctcgggcattgtatttcattagtagctctgctggtggcatttgtgctgtttctgcgcctgagaagtatacgctgcctgcggaacatcattcactggaacttgattagtgcattcattttgagaaatgcaacctggttcgtagtccagctaaccatgtcccccgaggtgcatcagtccaacgttggttggtgtcgcctggtcacggccgcctacaattattttcacgtaactaatttcttttggatgttcggggaagggtgttacctgcatacagccatagtcctaacatactcaacagatcgcttacgcaagtggatgttcatttgcatcggctggggagtgccattcccaatcatcgtagcgtgggcaattggaaagctgtactacgacaatgaaaagtgttggtttggcaaaagaccaggcgtctacacagactatatctatcaggggcccatgattctggtgctgctcatcaacttcatctttttgttcaacatcgtacggattttaatgaccaagctgagagcaagcacaacatcggagaccatccaatatcgaaaggctgtgaaagccactctggttctcctccccctgttggggattacctacatgttgttttttgtgaacccgggggaagacgaagtttcgagggtggttttcatttatttcaattctttcctggaatccttccaggtgcgttccgctatcaggaagcgctggcaccgatggcaggacaagcattcaattcgagctcgcgtggccagggccatgagcatccctacgagtcccactagagtctccttccatagtatcaagcagagtaccgcggtatag

SEQ ID NO: 57236 - DNA, 378 bp, Artificial Sequence
  derived and/or modified sequence
atgggcggccacccccagctgcggctggtgaaggccctgctgctgttagggcttaacccagtctcagcttcgttgcaggaccaacattgcgaaagcctgagtctggcgtccaacatttcgggactccaatgcaacgcgagtgtggacctaatcggcacatgctggccaagatcccctgccgggcaacttgtggtgagaccatgtccagcattcttctatggtgtgaggtataataccactaacaacggatatcgcgagtgtctggcaaatggctcatgggccgctcgcgtcaattattctgaatgtcaggaaattcttaacgaggaggagccaggtacacaggcacagccaggacgggcccatcgcggcggcacttag

SEQ ID NO: 57237 - DNA, 1206 bp, Artificial Sequence
  derived and/or modified sequence
atggggggacacccgcagctgaggttggtcaaagctctgctcttgctgggactgaatcccgtatcagccagccttcaggaccagcattgcgaatcactgtccctggccagcaatatttcaggcctgcagtgtaatgccagcgtggacctgatcgggacatgctggcctagaagccccgctggccaattggttgtccgtccctgcccagctttcttttacggagttagatacaacacgaccaataacgggtacagggagtgtctggcgaacggatcttgggccgcaagagttaattatagcgagtgtcaggaaatactgaacgaggaaaagaagtcgaaagtgcactatcacgtagccgttataataaattacctcggccactgcatttctttagtcgcccttctcgtggccttcgtcctgtttctccgactccgcagcatcaggtgcctaagaaacatcatccactggaacctgatttcagcctttattctccggaacgcgacttggttcgtggtgcagctgactatgtcaccggaggtacaccagagcaatgtcgggtggtgtcgcctagttacggcagcgtataattatttccatgtcaccaattttttttggatgttcggggaaggttgctacctccatacagcaattgtgctgacatattcaaccgatcgccttcggaagtggatgttcatttgcattggatggggtgttcctttccctattatagtcgcttgggccattggaaagctgtactatgataacgaaaaatgctggtttggaaagcgaccgggtgtgtatacggactacatctaccaggggccaatgatattggtcctgcttatcaacttcatctttctcttcaatatcgtccgtatacttatgaccaaactacgggcatctacaacatccgagacgatccagtatcggaaggcagtcaaagcaaccctcgtgttgctccctctgctgggcatcacttatatgttgttttttgttaatccgggagaggacgaagtttctagagtagtattcatttatttcaacagtttcctggaatcatttcaggtaaggtccgccattcgtaaacgttggcatcgatggcaagacaagcattccatacgagcacgggtggccagagcaatgtccatcccaacgtctcccacacgcgtgtcctttcacagcatcaaacaaagcactgcagtgtag

SEQ ID NO: 57238 - DNA, 378 bp, Artificial Sequence
  derived and/or modified sequence
atgggaggacacccccagctgagactcgtgaaggctctgctgctgctgggcctgaatcccgtcagcgcttcactccaagaccagcactgtgagtccctgagcttggcatcaaacatctctggcctccagtgtaacgcaagcgttgacctcatcggtacttgctggccacgtagccccgctggacaactcgttgtcaggccctgtccagcgttcttttatggagtcagatacaatacaaccaacaatggatatagagaatgcctcgcaaatgggagttgggctgctcgagtgaattacagcgaatgtcaggaaattctgaatgaagaagagcccggaacgcaagcacagcctgggcgagctcatagaggaggcacttag

SEQ ID NO: 57239 - DNA, 1206 bp, Artificial Sequence
  derived and/or modified sequence
atggggggccatcctcagctgagactcgttaaagcgcttctcctgctggggttgaaccccgtgtctgcatctctgcaggatcaacattgtgaaagcctgagtttggcaagtaacatatctgggttgcagtgtaacgcctcagtcgatctgattggcacttgctggccccgctctcctgctggacaattggtggtaaggccatgtccagcctttttctacggagtccgctataacactaccaacaatggttatcgggagtgtttagccaacggctcttgggcggctagagtgaattattctgagtgccaggaaatattaaatgaagaaaaaaagagcaaagtccactatcacgtagctgtgatcattaactatctgggccattgtatatctctcgtagctttattggtggccttcgtgctattcctccgactccgctccatccgctgcctcagaaatatcatccactggaacttgataagcgccttcattctaaggaacgccacctggtttgttgttcagctgaccatgagtcctgaggtgcaccagtccaatgttggatggtgccgactggtgaccgcagcctataactattttcacgtgactaactttttctggatgttcggtgaagggtgctatctgcacacagccatcgtactgacctatagcaccgatcgtctgagaaagtggatgttcatctgcattggatggggtgtgcccttccccattattgtggcatgggcaatcggcaagctatactacgataatgaaaagtgttggtttggaaagaggcctggcgtttatactgattacatctaccaggggccgatgatacttgtgctcttaataaatttcatcttcctttttaatattgtgagaatcctcatgacgaaactgcgcgcttccactaccagtgagactattcagtatcgcaaagcagtgaaggcaaccctggtcctcttaccgttacttggcatcacatacatgctgttcttcgttaatcctggcgaagatgaagtaagtcgagtagtcttcatctacttcaattctttcctggaatctttccaggtacgttccgctatccggaagaggtggcaccgatggcaagataagcattccattcgagctagggtggcaagggcaatgagcattccaacatcccccacacgggtctcgtttcactccattaaacagagtaccgcggtgtag

SEQ ID NO: 57240 - DNA, 1206 bp, Artificial Sequence
  derived and/or modified sequence
atgggcggacatccccagcttaggctggtcaaagccctgctgctcctgggcctcaaccctgtgtctgcttccttacaggatcagcactgtgaatcactctcgctggcatccaatatcagcgggctgcagtgcaatgcttccgttgatttgatcggaacctgctggcccagaagcccagccgggcaactggtggtgcgaccctgccctgccttcttctatggcgttcggtataacactacaaacaacggatacagagagtgtctggccaatgggtcttgggctgcacgcgtaaattactcagagtgccaggagattttgaacgaggagaagaaaagtaaagtgcactatcatgtggctgtcattatcaactacctgggacactgtatctctctggtagccttgctagtagcattcgtccttttcctccggctgcgatcgatccgctgtttgcgaaacatcattcactggaatcttatttccgcctttatactgcgcaacgctacctggtttgtcgtacagctaaccatgtcacctgaggtgcatcagagcaatgttggctggtgccgcttagtcaccgctgcctacaactatttccatgtgaccaacttcttttggatgtttggggagggctgttacctgcacacagccatcgtcttaacctacagcacagatagactgcgcaagtggatgtttatctgtatcggatggggcgtgcccttccctatcatcgtagcctgggctattgggaaactgtactatgacaatgagaagtgttggtttggtaaacgtccaggggtctacactgattacatttatcagggacctatgattctggtgctcctaataaactttatattcctctttaatattgtgcgaatccttatgactaagcttagggcgagcaccactagcgaaacgattcagtatcggaaggctgtcaaagcaactttagtcctgctgccactcctgggcattacttacatgctctttttcgtcaaccccggggaggacgaagtttctcgggtggtctttatatattttaattctttcctggaaagtttccaggtacgttccgccatccgcaaaagatggcacagatggcaggacaagcacagcatcagggctagggtggcacgggccatgagcataccgacatctccaacacgggtcagcttccattccattaaacagtctactgccgtttag

SEQ ID NO: 57241 - DNA, 1206 bp, Artificial Sequence
  derived and/or modified sequence
atgggcggccacccccagctgcggctggtgaaggccctgctgctgctgggtctcaatccagtgagtgccagtttacaggatcagcactgcgagtcactctctttagcctcgaatatcagcggtctgcagtgtaacgccagcgtggatctgatcggtacatgttggcccagatctcccgccggtcagctggtggttagaccatgtccggcatttttttatggtgtcaggtacaacacgacaaataatggatacagggagtgcctggcaaacgggtcttgggccgcacgggtcaactacagcgagtgtcaagaaattttgaatgaagagaagaagagtaaagtgcattaccacgtagctgttatcatcaactatttggggcactgcataagcctggtggcgctgctggtggcattcgtgctcttcttgcggctgcgatcgatcaggtgcttaagaaatattatccattggaatttaatttcggcatttatcctgcgaaatgcaacgtggtttgtggtgcaactgacgatgtccccagaggttcatcaatccaacgtgggctggtgccggttggtgactgctgcatataattatttccacgtcacgaacttcttttggatgtttggcgaaggctgctaccttcacactgctatcgtcctgacctactctactgataggctcaggaagtggatgtttatctgcatcggatggggcgtgccttttccaattatcgtggcctgggccatcggcaagctgtattacgacaacgagaaatgttggttcgggaagcgtcccggtgtatacaccgactacatctaccagggcccaatgatcctcgtgctgctcatcaacttcatctttctgtttaatattgttagaattcttatgactaaacttagagcttctaccaccagtgagacaatccagtaccgaaaagctgtgaaagctactctggtgctactgccgctcttggggataacatatatgctgttttttgtcaaccctggtgaagacgaggtgagccgtgtagtattcatatacttcaattccttcctggaaagtttccaagtaaggtctgctatccgtaagcgctggcacaggtggcaagataagcacagcatccgggccagagtagctcgggctatgtcgattcccacaagtcccacccgggtgtccttccattctatcaagcagtctaccgccgtttag

SEQ ID NO: 57242 - DNA, 1206 bp, Artificial Sequence
  derived and/or modified sequence
atgggcggccacccccagctgcggctggtgaaggccctgctgctgctgggccttaaccccgttagcgcctctctgcaggaccagcactgtgagtctctgagtctcgcaagcaatataagtggtttgcagtgcaacgcttcggtggatctgattgggacttgctggcctcgctcccccgcaggccagctggtggtgcgaccctgtcctgcattcttttatggcgtcagatataatacgaccaataacggctacagagagtgcttagccaatgggtcatgggctgctcgagtgaactacagcgaatgtcaggagattttaaatgaagagaaaaagagcaaagtccattatcacgtggcagtcatcattaattatctggggcactgcatttccctggtggccttgctggtggcgtttgtactatttctgaggttacgaagtatacggtgcttgaggaacatcatccattggaatctgatttctgctttcatcttgcggaatgcgacatggttcgtcgtgcagcttaccatgagccccgaagtacatcaatctaacgtcggctggtgccgactagtgacagccgcctacaattactttcacgtgactaatttcttttggatgtttggcgagggatgttatctacacacggctattgtattgacttatagcaccgaccgcctgaggaaatggatgttcatctgcattggctggggagtgccctttcccatcattgtggcctgggcaattggaaagctatactacgacaatgaaaagtgttggttcgggaaacgccctggcgtgtatactgactatatttatcaggggccaatgattctggtcttgctgattaactttatctttttgtttaatattgttaggatcctgatgaccaagttgagggcatctactacatccgagactattcagtacagaaaggccgtaaaggccacgttggtattactcccacttctgggaattacatatatgttatttttcgtcaatccgggggaggacgaggtttctagggtcgtgtttatctattttaattctttcctggagtcattccaggttcgaagtgccatccgcaaacgctggcaccgctggcaagataagcactctatccgggcccgagttgcccgggctatgtccattcctaccagcccaacccgcgtgtcattccacagcatcaagcagtcaaccgctgtgtag

SEQ ID NO: 57243 - DNA, 1206 bp, Artificial Sequence
  derived and/or modified sequence
atgggcggtcacccacaactgaggctggtgaaagctctgctgttgctgggacttaacccggtctccgcctcattgcaggatcagcactgtgagtccttgagcctagccagcaacattagcggcttacagtgcaacgcgtccgtggatttaataggcacctgctggcccagatcaccagctgggcagcttgtcgtgcggccatgtcctgcttttttttatggagtgcggtacaatacaacgaacaacggctacagggaatgtctggccaatgggtcctgggccgctcgcgtgaattacagcgagtgccaggaaattcttaatgaagagaaaaagtctaaagtacactaccatgtagccgttatcatcaactacttgggacattgcatatctctggttgcactcctcgtggcgttcgtgttgtttctgcgcctgcgtagtatcaggtgcctgagaaacatcattcattggaatctgatctcagcttttatcttgagaaatgctacttggtttgtggtccagctcactatgagcccagaggttcaccagagtaatgtggggtggtgtcggcttgtgaccgcggcttataattacttccatgtgaccaacttcttctggatgttcggggaaggttgctatctgcacacagccattgtgctgacgtacagtacagaccgcctccgcaaatggatgtttatttgtatcggctggggagtaccgttccctatcattgtggcctgggctataggaaaactgtactacgacaatgagaagtgctggtttggcaaaaggccaggcgtctacaccgattacatttaccaaggaccgatgatacttgtacttctcatcaactttatatttctgttcaatatcgtgcgaatactgatgaccaaattacgggctagtactacttcagagacaatccagtaccggaaagccgtcaaggccacactagtgctgttgcctctccttggcataacatatatgttattctttgttaacccaggcgaagatgaggttagccgcgtggtctttatttacttcaattcattcctggagagcttccaggtccggtccgctatccgaaaacggtggcacaggtggcaggacaagcacagtattagggccagggtggcacgagcaatgagcatcccaacaagtcctacccgggtttcctttcatagcattaagcagtctaccgctgtctag

SEQ ID NO: 57244 - DNA, 1206 bp, Artificial Sequence
  derived and/or modified sequence
atgggtggacaccctcagctgagacttgtgaaggccctgctcctgctgggcctgaaccctgtgagtgcatccctccaagatcagcattgtgagtcattgagcctggccagcaacattagcggcctccagtgtaacgccagtgtcgacttaatcgggacatgctggccacggagcccagcaggtcaactcgtagttcggccttgtcccgcttttttctatggcgtaaggtacaatacaaccaataatggctaccgcgagtgcttggccaatggttcttgggctgcacgagttaattattccgaatgtcaggagatcctgaatgaagagaaaaagagcaaagtgcactaccacgtcgctgttattattaattaccttggacattgcatctccctggtggctttgctcgtcgcttttgtcctcttcctccggctccgttcgatccggtgtctgagaaacataattcactggaatctgatctcagcattcattcttaggaacgcaacctggtttgtagtccagctgaccatgtcccccgaggtccaccagtccaatgttgggtggtgtaggctcgttacagcagcctacaactacttccacgtcacaaacttcttttggatgttcggcgaaggctgttacctgcatactgcgattgtcctgacatacagcactgaccgtctgcggaaatggatgttcatatgtatcgggtggggcgtcccattccctattatagtggcatgggctataggtaagctttactatgataacgagaagtgctggtttgggaagcgcccaggtgtctataccgattacatctatcagggacctatgattttggtgttactgatcaattttatatttctgtttaatatcgtgagaatacttatgaccaaactcagagcttctaccacatctgaaactatccaatataggaaggcggtgaaggcgaccttagtgctcctgcctctgctgggaatcacatacatgctatttttcgtcaaccccggagaagacgaggtcagcagagttgtgttcatctacttcaacagctttttagaatccttccaggtccggagcgcaatccgcaaaagatggcaccggtggcaggataaacacagtataagggcgagggtggccagggcaatgtccatccctacaagccccaccagagtgtcctttcactcaattaagcagtccaccgctgtatag

SEQ ID NO: 57245 - DNA, 2534 bp, Artificial Sequence
  derived and/or modified sequence
ggcgaggccggcaagaggcggccgcgggccgggctgcgtcgggaaacggcggccagacttccccgggaaggggcgagcgagagccgggccgggccgggccgggccgcggggccgggaagcgccgagccgggcatctcctcaccaggcagcgaccgaggagcccggccgcccaccccgtgccgcccgagcccgcagccgcccgccggtccctctgggatgtccgtaggacccgggcattcaggacggtagccgagcgagcccgaggatgggagggcacccgcagctccgtctcgtcaaggcccttctccttctggggctgaaccccgtctctgcctccctccaggaccagcactgcgagagcctgtccctggccagcaacatctcaggactgcagtgcaacgcatccgtggacctcattggcacctgctggccccgcagccctgcggggcagctagtggttcggccctgccctgcctttttctatggtgtccgctacaataccacaaacaatggctaccgggagtgcctggccaatggcagctgggccgcccgcgtgaattactccgagtgccaggagatcctcaatgaggagaaaaaaagcaaggtgcactaccatgtcgcagtcatcatcaactacctgggccactgtatctccctggtggccctcctggtggcctttgtcctctttctgcggctcaggagcatccggtgcctgcgaaacatcatccactggaacctcatctccgccttcatcctgcgcaacgccacctggttcgtggtccagctaaccatgagccccgaggtccaccagagcaacgtgggctggtgcaggttggtgacagccgcctacaactacttccatgtgaccaacttcttctggatgttcggcgagggctgctacctgcacacagccatcgtgctcacctactccactgaccggctgcgcaaatggatgttcatctgcattggctggggtgtgcccttccccatcattgtggcctgggccattgggaagctgtactacgacaatgagaagtgctggtttggcaaaaggcctggggtgtacaccgactacatctaccagggccccatgatcctggtcctgctgatcaatttcatcttccttttcaacatcgtccgcatcctcatgaccaagctccgggcatccaccacgtctgagaccattcagtacaggaaggctgtgaaagccactctggtgctgctgcccctcctgggcatcacctacatgctgttcttcgtcaatcccggggaggatgaggtctcccgggtcgtcttcatctacttcaactccttcctggaatccttccaggtccgttctgccatccggaagaggtggcaccggtggcaggacaagcactcgatccgtgcccgagtggcccgtgccatgtccatccccacctccccaacccgtgtcagctttcacagcatcaagcagtccacagcagtctgagctggcaggtcatggagcagcccccaaagagctgtggctggggggatgacggccaggctccctgaccaccctgcctgtggaggtgacctgttaggtctcatgcccactcccccaggagcagctggcactgacagcctgggggggccgctctccccctgcagccgtgcaggactctagctcatgagtggaaagtcacctacaggactgggccgggcccagggcctctggcttccctgcccaatcctccctggagaagggacatgggaatgaattgaaatggggcgctggacacctacagcagcacgcatgtccctccaaggctgtcttctcccagagcacaagaaggccagcccactgggccctggggctgccctcggcaaccgtggggaggccatttgctgccctggggcatcatgggcaactcgtgacagcctctgactcaccacgatgacgcctctggacctcggtgatgccttccgacaccactgggaaccaagggccctcactcaggaaccctggagacagaagtcaggtgtcatcatcagacttgcggccacagcactagagtcacccccccaggcctccagaaccttactggcactgtggcactgccaccagcaatgccctgccttgctgccttcaccctgaacatttagtaccctgcaggccaggccagcttcccctcacttaaccaccccataccagtcacctcctgctccttttcctcttttgtgagaagatgggggctggagggggcagagtggcctgtgagcaagagccaggggtgtcccagtcccagcctctggggcagagcttgtagccctggatggcctctggggcaggaccactagctaagcaagccaggagaagacccctgcccaagtggctcttgggacaacgtgctgcttacactccaggtgtggaccggccgcagcccccactgacctgcccatgtccagagggactggacagccagggcagggctttggggggcactagaagatgagggtgtcggctgtgaggcgggtggctggtataaataatatttatcttttcaaccagc

SEQ ID NO: 57246 - DNA, 1206 bp, Artificial Sequence
  derived and/or modified sequence
atgggagggcacccgcagctccgtctcgtcaaggcccttctccttctggggctgaaccccgtctctgcctccctccaggaccagcactgcgagagcctgtccctggccagcaacatctcaggactgcagtgcaacgcatccgtggacctcattggcacctgctggccccgcagccctgcggggcagctagtggttcggccctgccctgcctttttctatggtgtccgctacaataccacaaacaatggctaccgggagtgcctggccaatggcagctgggccgcccgcgtgaattactccgagtgccaggagatcctcaatgaggagaaaaaaagcaaggtgcactaccatgtcgcagtcatcatcaactacctgggccactgtatctccctggtggccctcctggtggcctttgtcctctttctgcggctcaggagcatccggtgcctgcgaaacatcatccactggaacctcatctccgccttcatcctgcgcaacgccacctggttcgtggtccagctaaccatgagccccgaggtccaccagagcaacgtgggctggtgcaggttggtgacagccgcctacaactacttccatgtgaccaacttcttctggatgttcggcgagggctgctacctgcacacagccatcgtgctcacctactccactgaccggctgcgcaaatggatgttcatctgcattggctggggtgtgcccttccccatcattgtggcctgggccattgggaagctgtactacgacaatgagaagtgctggtttggcaaaaggcctggggtgtacaccgactacatctaccagggccccatgatcctggtcctgctgatcaatttcatcttccttttcaacatcgtccgcatcctcatgaccaagctccgggcatccaccacgtctgagaccattcagtacaggaaggctgtgaaagccactctggtgctgctgcccctcctgggcatcacctacatgctgttcttcgtcaatcccggggaggatgaggtctcccgggtcgtcttcatctacttcaactccttcctggaatccttccaggtccgttctgccatccggaagaggtggcaccggtggcaggacaagcactcgatccgtgcccgagtggcccgtgccatgtccatccccacctccccaacccgtgtcagctttcacagcatcaagcagtccacagcagtctga

SEQ ID NO: 57247 - protein, 179 aa, Artificial Sequence
  derived and/or modified sequence
MAILFAVVARGTTILAKHAWCGGNFLEDFERSRAFNFLNEIKKRFQTTYGSRAQTALPYAMNSEFSSVLAAQLKHHSENKGLDKVMETQAQVDELKGIMVRNIDLVAQRGERLELLIDKTENLVDSSVTFKTTSRNLARAMCMKNLKLTIIIIIVSIVFIYIIVSPLCGGFTWPSCVKK

SEQ ID NO: 57248 - DNA, 540 bp, Artificial Sequence
  derived and/or modified sequence
atggccatcctgttcgccgtggtggccagaggcaccaccatcctggccaagcacgcctggtgcggcggcaacttcctggaggacttcgagagaagcagagccttcaacttcctgaacgagatcaagaagagattccagaccacctacggcagcagagcccagaccgccctgccctacgccatgaacagcgagttcagcagcgtgctggccgcccagctgaagcaccacagcgagaacaagggcctggacaaggtgatggagacccaggcccaggtggacgagctgaagggcatcatggtgagaaacatcgacctggtggcccagagaggcgagagactggagctgctgatcgacaagaccgagaacctggtggacagcagcgtgaccttcaagaccaccagcagaaacctggccagagccatgtgcatgaagaacctgaagctgaccatcatcatcatcatcgtgagcatcgtgttcatctacatcatcgtgagccccctgtgcggcggcttcacctggcccagctgcgtgaagaagtag

SEQ ID NO: 57249 - DNA, 540 bp, Artificial Sequence
  derived and/or modified sequence
atggcaatcctgttcgccgtggttgccaggggcaccaccattctggccaagcatgcttggtgcggtggtaatttcttggaagactttgaacgaagccgggcttttaatttcctcaacgagatcaagaagaggttccagaccacttatggatcgcgagctcagactgctctgccttacgctatgaattccgaattctcgtctgtgcttgcagctcagctcaagcaccattccgagaataaggggctcgataaagtgatggaaacccaagcccaggtagatgaactgaagggcattatggtgcgcaatatcgacctggtcgcccagcggggcgagagacttgagctcctgattgataagacagagaatctggtggattcatctgtcactttcaagacaacatctcgcaacctggcgcgcgcgatgtgcatgaaaaatttgaagttaactattatcattataattgtctctatcgtatttatttacattattgttagcccactctgcggcggttttacctggccttcttgtgttaaaaagtag

SEQ ID NO: 57250 - DNA, 540 bp, Artificial Sequence
  derived and/or modified sequence
atggccatcctgtttgctgtggtggcccggggcaccaccatcctggccaagcacgcctggtgtggcggcaacttcctggaggactttgagaggagccgggccttcaacttcctgaatgagatcaagaagcgcttccagaccacctacggcagccgggcccagacagccctgccctatgccatgaacagcgagttcagctctgtgctggccgcccagctgaagcaccacagcgagaacaagggcctggacaaggtgatggagacccaggcccaggtggatgagctgaagggcatcatggtgagaaatattgacctggtggcccagagaggagagcggctggagctgctgattgacaagacagagaacctggtggacagctctgtgaccttcaagaccaccagcaggaacctggcccgggccatgtgcatgaagaacctgaagctgaccatcatcatcatcatcgtgtccatcgtgttcatctacatcatcgtgagccccctgtgtggcggcttcacctggcccagctgtgtgaagaagtag

SEQ ID NO: 57251 - DNA, 540 bp, Artificial Sequence
  derived and/or modified sequence
atggccatcctgttcgccgtggtggcccggggcaccaccatcctggccaagcacgcttggtgcggaggcaacttcctggaggattttgaaagatccagggccttcaattttctcaacgagatcaagaagcgcttccagacaacctacggcagccgcgcacagaccgccctgccttacgccatgaactctgaattctcatctgtcctcgctgctcagttgaaacatcactccgagaacaaaggtctggataaggtgatggagactcaggctcaggtggacgaacttaaaggaattatggttaggaatatagacctcgtcgctcaacgcggagagagattggagctgttgatcgacaagactgaaaatctcgtggactcttccgtgacgtttaaaactacaagtcggaacttagctcgagctatgtgtatgaagaacctgaaactcaccatcatcatcattattgtatctatcgtgtttatatatatcatcgtgtcacctttatgtggtggcttcacctggccgtcttgcgtgaaaaagtag

SEQ ID NO: 57252 - DNA, 540 bp, Artificial Sequence
  derived and/or modified sequence
atggcgatcctcttcgccgtggtggctagaggcactacaatccttgctaaacatgcatggtgtgggggaaactttctggaggactttgaaaggtccagggcatttaacttcttgaatgaaatcaagaagcgtttccagactacgtacggctctcgagcccagaccgctcttccctacgccatgaattctgagttttcctccgtcctcgctgctcagctgaagcatcatagcgaaaacaagggcctcgataaggtgatggagactcaggcacaggtagatgagttgaagggcatcatggtgaggaatatagatctggtagcccagcggggtgagagactcgaacttctcatcgacaagactgaaaacctcgtggattcctctgtcactttcaaaactaccagccggaatctggcacgagccatgtgtatgaagaaccttaagctaaccataatcattataattgtctccatcgtttttatctacattattgtaagcccactttgtggcggtttcacttggccttcttgtgtgaaaaagtag

SEQ ID NO: 57253 - DNA, 658 bp, Artificial Sequence
  derived and/or modified sequence
agttggcgaccctgcactgacccgcgtccctccgtcccgagcccgcgcgccctcagagggtgcccggacagactgaagccatggcgattctttttgctgttgttgccagggggaccactatccttgccaaacatgcttggtgtggaggaaacttcctggaggattttgaacgttcccgagcctttaattttctgaatgagataaagaagaggttccagactacttacggttcaagagcacagacagcacttccatatgccatgaatagcgagttctcaagtgtcttagctgcacagctgaagcatcactctgagaataagggcctagacaaagtgatggagactcaagcccaagtggatgaactgaaaggaatcatggtcagaaacatagatctggtagctcagcgaggagaaagattggaattattgattgacaaaacagaaaatcttgtggattcttctgtcaccttcaaaactaccagcagaaatcttgctcgagccatgtgtatgaagaacctcaagctcactattatcatcatcatcgtatcaattgtgttcatctatatcattgtttcacctctctgtggtggatttacatggccaagctgtgtgaagaaataggaaagaagaagttaccattaaccaaggatatgagagaa

SEQ ID NO: 57254 - protein, 372 aa, Artificial Sequence
  derived and/or modified sequence
MSWLFPLTKSASSSAAGSPGGLTSLQQQKQRLIESLRNSHSRLLPPQFPQEKPVISVYPPIRHHLMDKQGVYVTSPLVNNFTMHSDLGKIIQSLLDEFWKNPPVLAPTSTAFPYLYSNPSGMSPYASQGFPFLPPYPPQEANRSITSLSVADTVSSSTTSHTTAKPAAPSFGVLSNLPLPIPTVDASIPTSQNGFGYKMPDVPDAFPELSELSVSQLTDMNEQEEVLLEQFLTLPQLKQIITDKDDLVKSIEELARKNLLLEPSLEAKRQTVLDKYELLTQMKSTFEKKMQRQHELSESCSASALQARLKVAAHEAEEESDNIAEDFLEGKMEIDDFLSSFMEKRTICHCRRAKEEKLQQAIAMHSQFHAPL

SEQ ID NO: 57255 - DNA, 1119 bp, Artificial Sequence
  derived and/or modified sequence
atgagctggctgttccccctgaccaagagcgccagcagcagcgccgccggcagccccggcggcctgaccagcctgcagcagcagaagcagagactgatcgagagcctgagaaacagccacagcagactgctgcccccccagttcccccaggagaagcccgtgatcagcgtgtacccccccatcagacaccacctgatggacaagcagggcgtgtacgtgaccagccccctggtgaacaacttcaccatgcacagcgacctgggcaagatcatccagagcctgctggacgagttctggaagaacccccccgtgctggcccccaccagcaccgccttcccctacctgtacagcaaccccagcggcatgagcccctacgccagccagggcttccccttcctgcccccctaccccccccaggaggccaacagaagcatcaccagcctgagcgtggccgacaccgtgagcagcagcaccaccagccacaccaccgccaagcccgccgcccccagcttcggcgtgctgagcaacctgcccctgcccatccccaccgtggacgccagcatccccaccagccagaacggcttcggctacaagatgcccgacgtgcccgacgccttccccgagctgagcgagctgagcgtgagccagctgaccgacatgaacgagcaggaggaggtgctgctggagcagttcctgaccctgccccagctgaagcagatcatcaccgacaaggacgacctggtgaagagcatcgaggagctggccagaaagaacctgctgctggagcccagcctggaggccaagagacagaccgtgctggacaagtacgagctgctgacccagatgaagagcaccttcgagaagaagatgcagagacagcacgagctgagcgagagctgcagcgccagcgccctgcaggccagactgaaggtggccgcccacgaggccgaggaggagagcgacaacatcgccgaggacttcctggagggcaagatggagatcgacgacttcctgagcagcttcatggagaagagaaccatctgccactgcagaagagccaaggaggagaagctgcagcaggccatcgccatgcacagccagttccacgcccccctgtag

SEQ ID NO: 57256 - DNA, 1119 bp, Artificial Sequence
  derived and/or modified sequence
atgtcctggctatttcctctcactaagtctgctagctcatcagcggcagggtccccaggcggcctaacctcactgcagcagcagaagcagcgcctgattgagagcttgaggaattctcactctcgtctgctgccaccacagtttcctcaagagaaacccgtgatcagcgtttatcctcctatcagacatcatctcatggacaaacagggtgtctatgtgacttcccccctcgttaataattttactatgcactctgatcttggaaagatcatccagagcttgctggatgaattctggaaaaacccacccgtccttgcaccgacatctacggctttcccctatttgtacagtaatccctcaggcatgtctccatatgcatcccagggctttcctttcttgcccccctaccccccccaggaagccaataggtctattacctcattaagcgttgccgataccgtgtccagttccactaccagccatactactgcgaagcctgccgcaccttcatttggagtgctttcgaatcttccccttcccatccctaccgtggacgcatccatccccacctctcagaatgggttcgggtataagatgcccgatgtacctgatgcttttcccgagctgtcggagctgagtgtcagccaattgactgacatgaacgagcaggaagaagtgctgctcgaacagttcctgactctgccccaactcaaacagataatcacggataaagacgatttggtgaaaagcatcgaggagcttgctaggaagaatctcctgctggagccgtcactcgaagcaaagcgtcagacggttcttgataagtacgagctgctgacacagatgaaatcaacatttgagaagaaaatgcaacgacagcacgaacttagcgagtcctgcagtgcaagtgccctgcaagcgagacttaaggtggccgcccacgaagctgaggaagaatcagataacatcgcagaggactttctggaaggaaagatggagatcgacgattttctgagctctttcatggagaaaagaacgatttgccattgccgacgcgctaaggaagagaagctgcagcaggcaatcgccatgcactcacaattccatgcccctctgtag

SEQ ID NO: 57257 - DNA, 1119 bp, Artificial Sequence
  derived and/or modified sequence
atgtcctggctgttccccctgaccaagagcgccagcagcagcgctgctggcagccctgggggcctgaccagcctgcagcagcagaagcagaggctgattgagagcctgaggaacagccacagccggctgctgcccccccagttcccccaggagaagcctgtgatctctgtgtacccacccatccgccaccacctgatggacaagcagggcgtgtatgtgaccagccccctggtgaacaacttcaccatgcacagcgacctgggcaagatcatccagagcctgctggatgagttctggaagaacccccctgtgctggcccccaccagcacagccttcccctacctgtacagcaaccccagcggcatgagcccctatgccagccagggcttccccttcctgcccccctacccaccccaggaggccaacagaagcatcaccagcctgtctgtggccgacacagtgagcagcagcaccaccagccacaccacagccaagccagctgcccccagctttggagtgctgagcaacctgcccctgcccatccccaccgtggatgccagcatccccaccagccagaatggatttggctacaagatgccagatgtgcctgatgccttccctgagctgtctgagctgtctgtgtcccagctgacagacatgaatgagcaggaggaggtgctgctggagcagttcctgaccctgccccagctgaagcagatcatcacagacaaggatgacctggtgaagagcattgaggagctggccaggaagaacctgctgctggagcccagcctggaggccaagaggcagacagtgctggacaagtatgagctgctgacccagatgaagagcacctttgagaagaagatgcagaggcagcacgagctgtctgagagctgcagcgccagcgccctgcaggcccggctgaaggtggccgcccacgaggccgaggaggagagtgacaacattgctgaggacttcctggagggcaagatggagattgatgacttcctgagcagcttcatggagaagaggaccatctgccactgcagaagagccaaggaggagaagctgcagcaggccatcgccatgcacagccagttccacgcccccctgtag

SEQ ID NO: 57258 - DNA, 1119 bp, Artificial Sequence
  derived and/or modified sequence
atgagctggctgttccccctgaccaagagcgccagcagcagcgccgctggaagcccgggcgggcttactagtctgcagcaacaaaagcagagactgattgagtccctccgcaactcacactcacgtctcctcccccctcagtttcctcaagaaaaaccagtgatatcagtctaccccccaatcagacaccacctgatggacaagcagggtgtctacgttacaagtccccttgtaaacaatttcactatgcactcagacctcgggaagatcatccagagtctgctcgatgagttttggaaaaatcccccagtgttagcccctacatctaccgccttcccttacctttacagcaacccaagtggtatgagcccgtacgcctcacaaggctttccttttctgccaccttacccccctcaagaggcaaaccgtagtattacttcattatcagtcgctgacaccgtgagcagttctaccacttcacatactacagcaaagccagcagccccctcttttggagttctctccaatctgcccctgcccatcccaaccgtggacgctagtatcccaaccagtcagaatgggttcggatacaagatgccggacgtgccagatgcctttcccgaattatctgagctgagcgtgagtcaactaactgacatgaatgagcaagaagaggtgctgttggagcagttcttaaccctgccccagttgaaacagattataacggacaaggatgacttagtgaaaagcatagaggaattagccagaaagaatttgctattggaacccagcctggaagccaagaggcagacagtgctcgataaatacgagttactgacacagatgaagagcacattcgagaaaaagatgcaacgccagcacgagttatctgagagttgtagcgccagtgcccttcaggcaaggctcaaagtggcagcgcacgaagccgaagaagaaagcgataatatcgctgaggacttcctggaaggcaagatggagattgacgacttcctgtcttcattcatggagaagcgcactatctgtcactgtcgacgggcaaaagaggaaaagcttcaacaggccattgctatgcattctcagtttcacgcacccctttag

SEQ ID NO: 57259 - DNA, 1119 bp, Artificial Sequence
  derived and/or modified sequence
atgagttggctgtttcccttgaccaaatctgcttccagctccgcggctgggagtcccggtggcctgactagtcttcagcaacagaagcagcgacttatcgagtcactccggaacagccactctaggttgctgcccccacagttcccacaggagaagcctgtgatctctgtgtacccccctatacggcaccacctaatggacaagcagggtgtttacgtcacttcgccactggtgaacaatttcacgatgcatagcgacctggggaagatcattcagtcgttactggacgagttttggaagaacccccctgtcctggctccaacctctactgcattcccctacctctactctaatccgtccggcatgtctccgtatgcttcccaggggttccccttcctgcccccttaccccccacaagaggccaacaggagtatcacaagccttagtgtggcagacacagtgtcttcctccacaacaagtcatacaaccgcaaaacctgctgctcctagtttcggcgtgctcagtaatttaccattaccaatacctacggttgacgcctcgatccccacatctcaaaacggttttggctataagatgcctgatgtaccggacgcattcccagagctctctgagctgagcgtctctcaacttactgatatgaacgaacaggaggaggtgctcttagagcaattcctgacactcccacagcttaaacagatcattaccgacaaggacgacctggtgaaaagtatcgaggagttggcccgtaaaaatctcctgcttgaaccctctctggaggccaagcggcagacagttttggacaagtatgagctactcacacagatgaaatctacttttgagaagaagatgcaacggcagcatgagctctccgagagctgctccgcatctgccttacaagccagattgaaggtggcagcacatgaggcggaagaggagtctgataacattgcagaggactttctagagggaaagatggagattgatgacttcctatcatcgtttatggaaaagcggactatatgtcattgcaggagggcaaaggaagaaaaactgcagcaggctatcgccatgcacagccaattccacgcacctctgtag

SEQ ID NO: 57260 - DNA, 1307 bp, Artificial Sequence
  derived and/or modified sequence
cccagcgcttgggccacggacgtcccaccccgctcctctgtcgctggagaaccgccgggccgagccactgggagaagcaggccagagccttccagggcctccggcccgtggacccgaggaggatgagctggctttttcccctgaccaagagcgcctcctcctccgcggctgggtcccccggtggcctcaccagcctccagcagcagaagcagcgcctgatcgagtccctccggaactcacactccagattgcttcctccacagtttcctcaggaaaaaccagtgatcagtgtttatccaccaatacgacatcacttaatggataaacaaggagtgtatgttacctctccattagtaaacaattttacaatgcactcagatcttggaaaaattattcagagtctgttggatgagttttggaagaatcctccagttttagctcctacttcaacagcatttccttatctatacagtaacccaagtgggatgtctccttatgcttctcagggttttccatttcttcctccatatcctccacaagaagcaaacaggagtatcacttctttatctgttgctgacactgtttcttcttcaacaacaagtcataccacagccaagcctgccgctccttcatttggtgtcctttcaaatctgccattacccattcccacagtggatgcttcaataccgacaagccaaaatggttttgggtacaagatgccagatgtccctgatgcatttccagaactctcagaactaagtgtgtcacaactcacagatatgaatgaacaagaggaggtattactagaacagtttctgactttgcctcaactaaaacaaattattaccgacaaagatgacttagtaaaaagtattgaggaactagcaagaaaaaatctccttttggagcccagcttggaagccaaaagacaaactgttttagataagtatgaattacttacacagatgaagtccactttcgaaaagaagatgcaaaggcagcatgaacttagtgagagctgtagtgcaagtgcccttcaggcaagattgaaagtagctgcacatgaagctgaggaagaatctgataatattgcagaagacttcttggagggaaagatggaaatagatgattttctcagtagcttcatggaaaagagaacaatttgccactgtagaagagccaaggaagagaaacttcagcaggcgatagcaatgcacagccaatttcatgctccactatagattttcctggaaacatgaactgccaagagaggaatgggacacaaaaccaaacactgttttatattt

SEQ ID NO: 57261 - protein, 281 aa, Artificial Sequence
  derived and/or modified sequence
MQAVWDLEQGKYGFAVQRGRMPPTQPTHGQFALTNGDPLNCHSYLSGYISLLLRAEPYPTSRFGSQCMQPNNIMGIENICELAARMLFSAVEWARNIPFFPDLQITDQVALLRLTWSELFVLNAAQCSMPLHVAPLLAAAGLHASPMSADRVVAFMDHIRIFQEQVEKLKALHVDSAEYSCLKAIVLFTSDACGLSDVAHVESLQEKSQCALEEYVRSQYPNQPTRFGKLLLRLPSLRTVSSSVIEQLFFVRLVGKTPIETLIRDMLLSGSSFNWPYMAIQ

SEQ ID NO: 57262 - DNA, 846 bp, Artificial Sequence
  derived and/or modified sequence
atgcaagctgtctgggacctggagcagggcaaatatggcttcgccgtacagagggggaggatgccacccacacagccaacacacgggcagtttgctctgaccaacggtgacccactgaactgccattcctacctaagcgggtatatctccctcctgctaagggccgagccatatcctacctcccgcttcggaagtcaatgcatgcagccaaataacatcatgggaattgagaacatttgcgagctggctgcacgcatgttgtttagtgccgtggagtgggcccgtaacatacccttttttcccgacttgcagatcacagatcaggtggcactactccgtctgacctggagcgaattgttcgtcctgaacgcggcccagtgttccatgcccctccatgtggccccactgcttgcagccgctggccttcatgcctccccaatgtcagcagaccgggtggtagcgtttatggaccacattaggatattccaagaacaggttgaaaaattaaaggctctgcacgtggactcggctgaatacagctgtttaaaggccatcgtgttgtttacctccgatgcttgtggcctctcagatgtggcccatgtcgaatcactacaagagaaatcccagtgcgctcttgaggaatacgtgcggagccagtaccctaaccagcccacacgcttcggcaagctgctcctgaggctgccctccctccgcaccgtatcgagctccgtgatcgagcagttgttcttcgtacggctagttgggaagactcctattgaaaccctcatccgggatatgcttctatctggcagcagctttaactggccctatatggccatacaatag

SEQ ID NO: 57263 - DNA, 846 bp, Artificial Sequence
  derived and/or modified sequence
atgcaggccgtgtgggacctggagcagggcaagtatggctttgctgtgcagaggggccgcatgccacccacccagcccacccacggccagtttgccctgaccaatggagaccccctgaactgccacagctacctgagcggctacatcagcctgctgctgcgggcagagccctaccccaccagcagatttggcagccagtgcatgcagcccaacaacatcatgggcatcgagaacatctgtgagctggccgccaggatgctgttctctgctgtggagtgggccaggaacatccccttcttcccagacctgcagatcacagaccaggtggccctgctgcggctgacctggagcgagctgtttgtgctgaatgctgcccagtgcagcatgcccctgcacgtggcccccctgctggccgccgccggcctgcacgccagccccatgtctgctgacagagtggtggccttcatggaccacatccgcatcttccaggagcaggtggagaagctgaaggccctgcacgtggacagcgctgagtacagctgcctgaaggccatcgtgctcttcaccagtgatgcctgtggcctgagtgatgtggcccacgtggagagcctgcaggagaagagccagtgtgccctggaggagtatgtgcgcagccagtaccccaaccagcccaccaggtttgggaagctgctgctgcggctgcccagcctgaggacagtgagcagctctgtgattgagcagctgttctttgtgcggctggtgggcaagacccccatcgagaccctcatccgggacatgctgctgagcggcagcagcttcaactggccctacatggccatccagtag

SEQ ID NO: 57264 - DNA, 846 bp, Artificial Sequence
  derived and/or modified sequence
atgcaggccgtgtgggacctggagcagggcaagtacggcttcgccgtgcagaggggacgcatgccacccacgcagccaactcatggacagtttgccctgactaacggcgatcctttgaactgtcattcgtacctgagcggctacatttctctgctattgcgcgccgaaccatatcctacttcacgtttcggaagccaatgtatgcagccaaataatatcatgggcattgagaacatatgcgagcttgccgctcgcatgctgttttcagccgtggaatgggctcggaacattcctttcttccctgatctccaaatcacagaccaagtcgctctcctccgcctgacttggagtgaattgttcgtcctcaacgccgctcaatgcagcatgcctctgcacgtcgccccactgctggctgccgccgggctccatgcctcgcccatgtctgcagaccgggttgtggcatttatggaccatatacgcattttccaggagcaagtggagaaactgaaggccttacatgtcgatagtgctgagtacagctgcctaaaagccattgtactgtttacaagcgatgcctgtggcctttcagatgtcgcgcacgtggaatcacttcaggagaaaagtcaatgtgcccttgaggagtacgtgcggagtcagtacccaaaccagccaaccaggtttgggaagttattgctaagacttcctagcctaaggactgtgtcctctagcgtcatcgaacaacttttcttcgtgcgcctggtcggtaagacccctatcgaaacgttgatccgcgatatgttactttctggcagttcctttaattggccatacatggccatacagtag

SEQ ID NO: 57265 - DNA, 3501 bp, Artificial Sequence
  derived and/or modified sequence
ctccttccctcgtcctgggtcccggggtcctgggtacgtttggctagcctgctctggcggtgcagaggggcaggatgccgccgacccagccgacccacgggcagttcgcgctgaccaacggggatcccctcaactgccactcgtacctgtccggatatatttccctgctgttgcgcgcggagccctatcccacgtcgcgcttcggcagccaatgcatgcagcccaacaacatcatgggtatcgagaacatttgcgaactggccgcgaggatgctcttcagcgccgtcgagtgggcccggaacatccccttcttccccgacctgcagatcacggaccaggtggccctgcttcgcctcacctggagcgagctgtttgtgttgaatgcggcgcagtgctccatgcccctccacgtcgccccgctcctggccgccgccggcctgcatgcttcgcccatgtccgccgaccgggtggtcgcctttatggaccacatacggatcttccaagagcaagtggagaagctcaaggcgctgcacgttgactcagccgagtacagctgcctcaaggccatagtcctgttcacctcagatgcctgtggtctctctgatgtagcccatgtggaaagcttgcaggaaaagtctcagtgtgctttggaagaatacgttaggagccagtaccccaaccagccgacgagattcggaaagcttttgcttcgcctcccttccctccgcaccgtctcctcctcagtcatagagcaattgtttttcgtccgtttggtaggtaaaacccccatcgaaaccctcatccgggatatgttactgtccggcagcagttttaactggccgtatatggcaattcaataaataaataaaataagaagggggagtgaaacagagaaagaaaaggcaaaagactggtttgtttgcttaatttccttctgttaagaaaggatataaaaggatgttacaagtttgctaaaagaagagaggggaagaatttaatggactgtgaatttcaaaaaaaaaaaaaaagactgtcaaatgaacttttacagaatgcattaaaaaaaaaaaaaaactcctgtgtcggtcagaacaacttgctacttatcatttttgtataaaaaggaaattagtctttttctttttttggtaaatttttgaaaaatattgctaaaagtgcatttaaggagattgggagacaattagcagaatggagaaagtaagtcttttttttttccaaattattaattgtcctgtgtctatgtacctctagctgttcttttttgtacttttctggttccaaaccagtttattctgtggttctataataagttttgatataatcttggcttcttaaaaactgtgtatcattaaaatatatgttctgcaagaattaaaactgagtccatgaaaataccataggaagacataaaactttaaaaggcaactcaaagatgatggaaacgcacttacaagtggtgaccaaaatttttaggtgaagtcgagcactctaattagagaactggaggaaccacatataacacttaacttcccctaccctgcccctccccaaaagaaaccatgacaaacctagcttttaaaaaatattttaagaaagagaatgaactgtggaatttattggcagccaaggaatgtgtccaagacacatgctgaggttttgaataaaaagtgaacttttgtaatttgaattgggtcccgcttagttcttgaattgttatgaaaatcctatatctgtttgtatatttgcaaaccctttgtattataattgttgatattttccctttttaaaaaataccattgaaatcagcatgacaaaaataacactgttggcacttataggtaacgtgattgattcagtatcttagagtttacagtttgtgttttaaaaaaactgaaggttttttttttaagtgcaacatttctgtatactgtaaaagttataataactgaactgtttggtcgagtctttgtgtgttatattccaaggaaaattgaaagtattcagaaattaaaatattatttgatatctgaaacctggctgtccccactcactgtctttacatctagaagagcccctgtgagctctcgcttagctggccgggcggggggtggtgggggggggcatttgtttactcccctcagtcagtttgttcaaaggtggactactgtatttgcctgtttaatttgggtgtgtgtgtgttggggggggagctgaagttaatggtttatctatggtttaggaagtgccatactgatatagtaaaccacccccattcacctaatcctccttttaattaaaaatggattttccaggaaaaaaaaaaaggcccttatatttgtcacacttaagtgcctgcttagggaaggtattgtgaaaaagtattagaaatcttgagatcagtatctattttatgatcagaaaaaaatactcttttgtacatttctgacagttactcagaagatcgttcaagcaagctaatcacagcattgtaactagaggacagttgtttgcagtgagtttttccttaagtaggtacgattttttaaaatattctgtgattctactctagcgtggttgttgagagagtttcaaattcagtgatacaggttctaagactgaaaggtctacttttaatgtatatatgataacttgcagttggtttccctctcccctccccccctttaccttcagtctgtgagagcatgaccacagggtcaagggaatcttttccattggagttatgtacataaaaacacatcgacattttgacatttcagattgtgtggctacaatctgtactgctcttgggatcctttgtccttagaagccaaattaaggaagagaaagcaggacagagaaaaagaaagaaggaaggagggaaactttacagggtgtgctgatttggaagtagtaactatttcttttggagtctttttttcatttttcctctttctcttttcctggtttggaggaagctcggtgctgggagcttgcaattttgttcttattcaaggtttccaacccacccccccaccgccagtacttcatcatgttgtggtttaattctaattggtgggggggggggaggactagtgagggaggtgaaagaacagggataattttgtaaagtgtattaaacgttaatattcagatccagtcaatacatgcagaccagtaaaatctgatttgtgcagagttctccatctgactctcacttatttctgtagatatatacatatataaatacaagtatgttcttacggcacagtattgctgacctttagttcgaggttttgtcggttgttgttgattttcttcctcttgcaagtgctatccatgtgagtgtgtgaagtttctctaataagtaaaacacaggcccttttccttgtttgttttgtgttagtttattgtaaacagccatttgttgtaaattattattggcattaaattataatttatgattttcaaagcaaaagacaa

SEQ ID NO: 57266 - DNA, 2214 bp, Artificial Sequence
  derived and/or modified sequence
aggatcactccagacatctcctacctacggtttggggttttttttcttaaaggcgaggcttgcattcctcagcagctatgtacaaagctccctgaaaccttgtctctctaaagttagtgtgcagggttttccaaggctgagagagcctaatacatggggaagcacttccttgaggtggaagatctctcccttcacctttcctctttttccctgcaggctagtgcctactttttatcagtttgcacaatcgcttagataaacaccgaggaggagattctctttaattatcaaagacacatcttttcagggggccaacaaagcatttatttcacccgccaaactaaaggagagttattccagtttaggaggaagatgcaagcggtttgggaccttgaacaaggcaaatatggttttgcggtgcagaggggcaggatgccgccgacccagccgacccacgggcagttcgcgctgaccaacggggatcccctcaactgccactcgtacctgtccggatatatttccctgctgttgcgcgcggagccctatcccacgtcgcgcttcggcagccaatgcatgcagcccaacaacatcatgggtatcgagaacatttgcgaactggccgcgaggatgctcttcagcgccgtcgagtgggcccggaacatccccttcttccccgacctgcagatcacggaccaggtggccctgcttcgcctcacctggagcgagctgtttgtgttgaatgcggcgcagtgctccatgcccctccacgtcgccccgctcctggccgccgccggcctgcatgcttcgcccatgtccgccgaccgggtggtcgcctttatggaccacatacggatcttccaagagcaagtggagaagctcaaggcgctgcacgttgactcagccgagtacagctgcctcaaggccatagtcctgttcacctcagatgcctgtggtctctctgatgtagcccatgtggaaagcttgcaggaaaagtctcagtgtgctttggaagaatacgttaggagccagtaccccaaccagccgacgagattcggaaagcttttgcttcgcctcccttccctccgcaccgtctcctcctcagtcatagagcaattgtttttcgtccgtttggtaggtaaaacccccatcgaaaccctcatccgggatatgttactgtccggcagcagttttaactggccgtatatggcaattcaataaataaataaaataagaagggggagtgaaacagagaaagaaaaggcaaaagactggtttgtttgcttaatttccttctgttaagaaaggatataaaaggatgttacaagtttgctaaaagaagagaggggaagaatttaatggactgtgaatttcaaaaaaaaaaaaaaagactgtcaaatgaacttttacagaatgcattaaaaaaaaaaaaaaactcctgtgtcggtcagaacaacttgctacttatcatttttgtataaaaaggaaattagtctttttctttttttggtaaatttttgaaaaatattgctaaaagtgcatttaaggagattgggagacaattagcagaatggagaaagtaagtcttttttttttccaaattattaattgtcctgtgtctatgtacctctagctgttcttttttgtacttttctggttccaaaccagtttattctgtggttctataataagttttgatataatcttggcttcttaaaaactgtgtatcattaaaatatatgttctgcaagaattaaaactgagtccatgaaaataccataggaagacataaaactttaaaaggcaactcaaagatgatggaaacgcacttacaagtggtgaccaaaatttttaggtgaagtcgagcactctaattagagaactggaggaaccacatataacacttaacttcccctaccctgcccctccccaaaagaaaccatgacaaacctagcttttaaaaaatattttaagaaagagaatgaactgtggaatttattggcagccaaggaatgtgtccaagacacatgctgaggttttgaataaaaagtgaacttttgtaatttgaattgggtcccgcttagttcttgaattgttatgaaaatcctatatctgtttgtatatttgcaaaccctttgtattataattgttgatattttccctttttaaaaaataccattgaaatcagcatgacaaaaataacactgttggcactta

SEQ ID NO: 57267 - DNA, 1712 bp, Artificial Sequence
  derived and/or modified sequence
gcgaggggccctgggcggctgctttcgctctgcgcgagttgggtctttgtgatataaaattcgccgagcgccgcgagccgtgctttgccaatggcgcgctcggcgcggggcgcgggctccgggttggggcgagccaacgccggggtttctttgtgtttctgcgagagcgactctcccggtccggagtcagataacagcctgggcccgagcctcgccggctttccccggcccttacaggccctgcccaggctccgctagtgccggccgcctgctccctgcctctcccggcttcctctctctttagccggcctctctctctccgccctctccctccgtctctttctccgagcacactgattagacagacgccagacctccgctctctgcttgtctctcactgggggggttccccgccgggctggggctggggcttcggggtttgtgggagagtcgttccggagtggccacaggccgtctggggtggaccctcgtgccttttgcaaaagcgcctcaccctccccccagactcgcccctcccgctccctctcctccaatcaataagaaatatcagctgtttagcagtaaagaagaaagatgccctcagaatgctacatcccgcccacagcgccggggaccccgaggcaaggtggccaattctgggtcctcggcggaccagccccgagcgggcctcggagcggtgcagaggggcaggatgccgccgacccagccgacccacgggcagttcgcgctgaccaacggggatcccctcaactgccactcgtacctgtccggatatatttccctgctgttgcgcgcggagccctatcccacgtcgcgcttcggcagccaatgcatgcagcccaacaacatcatgggtatcgagaacatttgcgaactggccgcgaggatgctcttcagcgccgtcgagtgggcccggaacatccccttcttccccgacctgcagatcacggaccaggtggccctgcttcgcctcacctggagcgagctgtttgtgttgaatgcggcgcagtgctccatgcccctccacgtcgccccgctcctggccgccgccggcctgcatgcttcgcccatgtccgccgaccgggtggtcgcctttatggaccacatacggatcttccaagagcaagtggagaagctcaaggcgctgcacgttgactcagccgagtacagctgcctcaaggccatagtcctgttcacctcagatgcctgtggtctctctgatgtagcccatgtggaaagcttgcaggaaaagtctcagtgtgctttggaagaatacgttaggagccagtaccccaaccagccgacgagattcggaaagcttttgcttcgcctcccttccctccgcaccgtctcctcctcagtcatagagcaattgtttttcgtccgtttggtaggtaaaacccccatcgaaaccctcatccgggatatgttactgtccggcagcagttttaactggccgtatatggcaattcaataaataaataaaataagaagggggagtgaaacagagaaagaaaaggcaaaagactggtttgtttgcttaatttccttctgttaagaaaggatataaaaggatgttacaagtttgctaaaagaagagaggggaagaatttaatggactgtgaatttcaaaaaaaaaaaaaaagactgtcaaatgaacttttacagaatgcattaaaaaaaaaaaaaaa

SEQ ID NO: 57268 - DNA, 846 bp, Artificial Sequence
  derived and/or modified sequence
atgcaggccgtgtgggatctggagcagggaaagtacggatttgcagtccagaggggtaggatgccaccgactcaaccaactcatggtcagttcgctctgactaatggcgatccactaaattgccatagttacctgtccgggtatatctctctcctgctgcgagccgaaccttatcccacctctcgtttcggctcacagtgtatgcagcccaacaacatcatgggtatcgaaaacatttgcgaactggcagccaggatgctgtttagcgctgttgagtgggccaggaatatccccttttttcctgatctccagatcacagatcaagtggcgttgttacgattgacttggagtgaactgtttgtgttaaatgccgcacagtgttcgatgccgctccacgtcgccccactgctcgctgcagccggtctgcacgcttcccccatgagcgccgatcgcgtcgtcgcatttatggaccacattagaatatttcaggaacaagtagagaagttaaaggcgttgcacgtcgactcagcagaatactcatgtctgaaggcaattgtcttatttacctcagacgcctgcggtctgagtgacgtggcccacgtggaaagcctccaggagaagagtcagtgcgctctggaggagtatgtaaggagtcaatacccaaatcagccaacaagattcggcaagctgttgctgagattgccctcacttcggacagttagtagttcagtcatcgaacagttgttcttcgttaggcttgtgggcaaaacgcctatagagactttaatccgcgatatgctgttgagcggttcctcttttaattggccctatatggccatacagtag

SEQ ID NO: 57269 - DNA, 846 bp, Artificial Sequence
  derived and/or modified sequence
atgcaggccgtgtgggacctggagcagggcaagtacggcttcgccgtgcagagaggcagaatgccccccacccagcccacccacggccagttcgccctgaccaacggcgaccccctgaactgccacagctacctgagcggctacatcagcctgctgctgagagccgagccctaccccaccagcagattcggcagccagtgcatgcagcccaacaacatcatgggcatcgagaacatctgcgagctggccgccagaatgctgttcagcgccgtggagtgggccagaaacatccccttcttccccgacctgcagatcaccgaccaggtggccctgctgagactgacctggagcgagctgttcgtgctgaacgccgcccagtgcagcatgcccctgcacgtggcccccctgctggccgccgccggcctgcacgccagccccatgagcgccgacagagtggtggccttcatggaccacatcagaatcttccaggagcaggtggagaagctgaaggccctgcacgtggacagcgccgagtacagctgcctgaaggccatcgtgctgttcaccagcgacgcctgcggcctgagcgacgtggcccacgtggagagcctgcaggagaagagccagtgcgccctggaggagtacgtgagaagccagtaccccaaccagcccaccagattcggcaagctgctgctgagactgcccagcctgagaaccgtgagcagcagcgtgatcgagcagctgttcttcgtgagactggtgggcaagacccccatcgagaccctgatcagagacatgctgctgagcggcagcagcttcaactggccctacatggccatccagtag

SEQ ID NO: 57270 - protein, 261 aa, Artificial Sequence
  derived and/or modified sequence
MPPTQPTHGQFALTNGDPLNCHSYLSGYISLLLRAEPYPTSRFGSQCMQPNNIMGIENICELAARMLFSAVEWARNIPFFPDLQITDQVALLRLTWSELFVLNAAQCSMPLHVAPLLAAAGLHASPMSADRVVAFMDHIRIFQEQVEKLKALHVDSAEYSCLKAIVLFTSDACGLSDVAHVESLQEKSQCALEEYVRSQYPNQPTRFGKLLLRLPSLRTVSSSVIEQLFFVRLVGKTPIETLIRDMLLSGSSFNWPYMAIQ

SEQ ID NO: 57271 - DNA, 786 bp, Artificial Sequence
  derived and/or modified sequence
atgccaccaacacagccaacacatggacaattcgcccttaccaatggcgatcctctcaactgccacagttacttgtcaggttatatttcactcctcctcagagccgagccgtatccaacaagccggttcggtagccagtgtatgcaacccaacaacatcatgggcatcgaaaacatctgcgagctggccgcgcgcatgctgttctcagctgttgagtgggcaagaaatattccattcttccctgacctgcagatcaccgatcaggtcgcactccttaggctcacctggtctgagctgttcgttctgaatgctgcccaatgctccatgccattacatgtagcgcctttactggccgccgcaggactgcatgcgtcacctatgtctgctgaccgggtcgtggcattcatggatcacattcgaatattccaggagcaggtggagaagcttaaggctcttcacgttgattctgctgagtacagctgcctgaaggctatcgtcttgtttactagcgacgcctgcggcctgagtgatgttgcgcacgttgagtcattacaagagaaatcacagtgtgcgctcgaagaatacgtacgctcgcagtatcccaaccagcctactagatttggaaagctcctgttacggctgcccagcctcagaaccgtgagtagctcggtgattgagcagttattttttgttaggttggtaggcaagacaccaatagagacactcatacgcgacatgcttctgtccggctcatcatttaattggccctatatggctattcagtag

SEQ ID NO: 57272 - DNA, 786 bp, Artificial Sequence
  derived and/or modified sequence
atgcctccaacgcagccaacgcacggccagttcgccctgaccaacggtgatcccctgaattgtcactcctacctatctgggtatatcagcctgctgctgcgggcagagccctacccaacgtcgcggtttggatcccagtgcatgcagccgaacaacataatgggtatcgaaaacatctgtgaactagcagccagaatgctctttagcgccgtggagtgggcccgaaatatcccttttttccccgatctgcagattacagatcaggttgcgctgcttaggttgacctggtccgagctgttcgttctgaacgcagcccagtgttcgatgcccctccacgtcgcccccttgttggccgcggcaggactgcatgcgtcacctatgtccgcagacagggtcgtggcctttatggaccacattcgcatcttccaggagcaagtggagaaactaaaggcactacatgtggacagcgcggaatattcttgtctcaaggcaatcgtcctgttcacctcagacgcatgcgggctgtctgacgtcgcgcacgtggagagcctgcaagagaagagtcagtgtgctctggaggaatatgtcaggtcgcagtaccccaaccagcctaccaggttcgggaagctgctgttgaggctgcccagcctgagaactgtaagctcctcggtgattgagcaactatttttcgtgaggctggtaggaaagaccccaatcgagaccctgatccgggatatgctgctgagcgggagcagcttcaattggccttatatggcgatccagtag

SEQ ID NO: 57273 - DNA, 786 bp, Artificial Sequence
  derived and/or modified sequence
atgccacccacccagcccacccacggccagtttgccctgaccaatggagaccccctgaactgccacagctacctgagcggctacatcagcctgctgctgcgggcagagccctaccccaccagcagatttggcagccagtgcatgcagcccaacaacatcatgggcatcgagaacatctgtgagctggccgccaggatgctgttctctgctgtggagtgggccaggaacatccccttcttcccagacctgcagatcacagaccaggtggccctgctgcggctgacctggagcgagctgtttgtgctgaatgctgcccagtgcagcatgcccctgcacgtggcccccctgctggccgccgccggcctgcacgccagccccatgtctgctgacagagtggtggccttcatggaccacatccgcatcttccaggagcaggtggagaagctgaaggccctgcacgtggacagcgctgagtacagctgcctgaaggccatcgtgctcttcaccagtgatgcctgtggcctgagtgatgtggcccacgtggagagcctgcaggagaagagccagtgtgccctggaggagtatgtgcgcagccagtaccccaaccagcccaccaggtttgggaagctgctgctgcggctgcccagcctgaggacagtgagcagctctgtgattgagcagctgttctttgtgcggctggtgggcaagacccccatcgagaccctcatccgggacatgctgctgagcggcagcagcttcaactggccctacatggccatccagtag

SEQ ID NO: 57274 - DNA, 786 bp, Artificial Sequence
  derived and/or modified sequence
atgccccccacccagcccacccacggccagttcgccctgaccaacggtgacccgctcaactgtcattcctatctatcaggctatatttccctgcttcttcgggccgagccctaccctacgtcaagattcggctcccagtgcatgcagcccaataatattatgggtatagagaatatttgcgaactggctgcccggatgctgttctcagcggtggaatgggcgaggaatattccattcttccctgacctccaaatcactgatcaagtggcactcctgcggctcacgtggtcggagctgtttgttctgaatgccgcccagtgctccatgcccttgcacgtcgcccctcttttagccgccgcaggcctgcatgcaagccctatgtctgctgatagggtcgtggcctttatggatcacattcgtattttccaagaacaggttgagaagctgaaggccctgcacgttgattctgcagagtattcctgtctcaaagccattgtattgttcacatccgacgcctgcggactatcagacgtggcacatgtggaatctctgcaggaaaagtcccagtgtgccctggaggagtacgttcgaagccagtatcctaatcagcccacacggtttggcaagttactgctacgcctgccgagccttcgcacggtcagcagctctgtcatcgagcagctcttcttcgtaagactcgtgggtaaaacacccattgaaacactcattagggatatgttgctctccgggtcatcattcaactggccgtatatggctattcagtag

SEQ ID NO: 57275 - DNA, 786 bp, Artificial Sequence
  derived and/or modified sequence
atgccccccacccagcccacccacggccagttcgccctgaccaacggagatcccctaaactgccactcgtacctgtctgggtacatcagccttcttttgagggccgagccctaccccacctcaaggttcggaagtcagtgcatgcaacccaacaacatcatgggtatcgaaaacatttgcgagttggctgcacggatgctgtttagtgctgtggaatgggcacgtaatattccattttttcctgacctgcaaataacagatcaggtagccctgttgcggctcacctggagcgagttattcgtactcaatgcagcgcagtgtagcatgccgctgcacgttgcacctctgttggcagctgccggattacatgcctcccctatgagcgcagatcgggtagtggcgtttatggaccacattaggatattccaggaacaggtcgagaagctaaaggcactgcacgtcgattccgccgagtattcgtgcttgaaggctattgtgctttttacatcagacgcctgtggtctaagcgatgttgcacacgtggagtcactgcaggagaagagccagtgcgcactggaggaatacgtccgatctcagtatccaaaccagcctacccggttcggtaagttactcctccgccttcctagcctcaggaccgtcagtagtagcgttatcgagcaattgttttttgtgagactggtaggaaaaactcctatagaaactctcattcgcgatatgttgctgagcgggtcctcgttcaactggccttacatggcgatacagtag

SEQ ID NO: 57276 - DNA, 786 bp, Artificial Sequence
  derived and/or modified sequence
atgcctcccacccaacctacccacggccagtttgccctgacaaatggcgacccactgaactgccactcgtacctgtctggctatataagtctcttgcttagggccgagccttaccctacatccagattcgggtcccaatgtatgcagcccaacaatattatgggaattgaaaatatttgcgagctggcggcaagaatgctttttagtgctgtggagtgggctagaaatataccattcttccccgacttgcagattacagatcaggttgcacttctgcgcctgacctggagcgagctttttgtgcttaatgcagcacagtgctctatgcccctgcatgttgcccctctgttggccgcagcgggactccacgcttcacctatgagtgcggaccgcgtagtggcttttatggaccatatccgcatcttccaggaacaagtcgaaaagctgaaggccttgcatgtagattccgctgagtactcatgtcttaaggctatagttttgtttacctccgacgcttgcggattgtctgacgtagcccatgtcgaaagcttgcaggagaagtcccagtgcgctcttgaggagtatgtgcgatcacagtatccgaaccagcccaccagattcggaaaactgctactacgcctcccatctctacggactgtttcctcatccgtgattgagcaattgttttttgtccgattggtgggcaaaacccccatagaaacacttatccgcgacatgctgttatcaggttccagtttcaactggccctacatggctatacagtag

SEQ ID NO: 57277 - DNA, 786 bp, Artificial Sequence
  derived and/or modified sequence
atgcctccgacgcaaccaacacatgggcaattcgctctgactaatggagatcctttgaactgccactcttacctgtccggatatatcagcctcctgctcagggcagagccttatcctacttccaggtttggttcacaatgcatgcaacctaacaacataatggggatagagaacatttgcgaactggcggctcggatgctcttcagcgctgtggaatgggccaggaacatcccattcttccccgaccttcagattactgatcaagtcgccctcttgcgtttgacctggagcgagctgttcgtcttgaacgcggctcagtgctctatgcctttgcatgtggcacccctgctggccgcagccggtctgcacgctagccctatgagcgcagatcgtgtggtcgccttcatggatcacatccggatcttccaggaacaggtggagaaactgaaggcattacacgttgactctgcagaatacagctgcctcaaggccattgttctgtttacttcggacgcctgtgggctgagcgatgtggcccatgtggaaagtttgcaggagaagtctcaatgtgctctggaggagtatgtgcggagccaatacccaaaccaacccacccgtttcggcaagctcctcctccgactgcccagtctgcgcacagtgtcaagtagcgtgatagagcagttatttttcgtgaggttggtgggtaaaacacccatcgagacgctgataagggacatgctcctgtctggtagctcttttaactggccatatatggctattcagtag

SEQ ID NO: 57278 - DNA, 786 bp, Artificial Sequence
  derived and/or modified sequence
atgccccccacccagcccacccacggccagttcgccctgaccaacggcgaccccctgaactgccacagctacctgagcggctacatcagcctgctgctgagagccgagccctaccccaccagcagattcggcagccagtgcatgcagcccaacaacatcatgggcatcgagaacatctgcgagctggccgccagaatgctgttcagcgccgtggagtgggccagaaacatccccttcttccccgacctgcagatcaccgaccaggtggccctgctgagactgacctggagcgagctgttcgtgctgaacgccgcccagtgcagcatgcccctgcacgtggcccccctgctggccgccgccggcctgcacgccagccccatgagcgccgacagagtggtggccttcatggaccacatcagaatcttccaggagcaggtggagaagctgaaggccctgcacgtggacagcgccgagtacagctgcctgaaggccatcgtgctgttcaccagcgacgcctgcggcctgagcgacgtggcccacgtggagagcctgcaggagaagagccagtgcgccctggaggagtacgtgagaagccagtaccccaaccagcccaccagattcggcaagctgctgctgagactgcccagcctgagaaccgtgagcagcagcgtgatcgagcagctgttcttcgtgagactggtgggcaagacccccatcgagaccctgatcagagacatgctgctgagcggcagcagcttcaactggccctacatggccatccagtag

SEQ ID NO: 57279 - protein, 642 aa, Artificial Sequence
  derived and/or modified sequence
MARHRNVRGYNYDEDFEDDDLYGQSVEDDYCISPSTARLYSCLDHMREVLGDAVPDEILIEAVLKNKFDVQKALSGVLEQDRVQSLKDKNEATVSTGKIAKGKPVDSQTSRSESEIVPKVAKMTVSGKKQTMGFEVPGVSSEENGHSFHTPQKGPPIEDAIASSDVLETASKSANPPHTIQASEEQSSTPAPVKKSGKLRQQIDVKAELEKRQGGKQLLNLVVIGHVDAGKSTLMGHMLYLLGNINKRTMHKYEQESKKAGKASFAYAWVLDETGEERERGVTMDVGMTKFETTTKVITLMDAPGHKDFIPNMITGAAQADVAVLVVDASRGEFEAGFETGGQTREHGLLVRSLGVTQLAVAVNKMDQVNWQQERFQEITGKLGHFLKQAGFKESDVGFIPTSGLSGENLITRSQSSELTKWYKGLCLLEQIDSFKPPQRSIDKPFRLCVSDVFKDQGSGFCITGKIEAGYIQTGDRLLAMPPNETCTVKGITLHDEPVDWAAAGDHVSLTLVGMDIIKINVGCIFCGPKVPIKACTRFRARILIFNIEIPITKGFPVLLHYQTVSEPAVIKRLISVLNKSTGEVTKKKPKFLTKGQNALVELQTQRPIALELYKDFKELGRFMLRYGGSTIAAGVVTEIKE

SEQ ID NO: 57280 - DNA, 1929 bp, Artificial Sequence
  derived and/or modified sequence
atggctcgtcaccggaatgtcagaggctataactacgacgaagacttcgaggacgacgacctctatgggcagagcgtggaagacgactactgcatttctccttccaccgcccggctgtattcttgcctggaccacatgcgcgaggttctaggagatgccgtcccagatgagatcttaattgaagccgttcttaagaataaattcgacgtgcagaaagccctgtctggggtgttggagcaggaccgcgtgcagtcactcaaagacaaaaacgaagccacagtgagcaccggaaagatcgccaaagggaagcccgtcgatagccagacctcacgttcagaatcggaaatagtgccaaaggtggctaagatgacagtctcaggtaagaagcaaactatgggctttgaggtgccaggggtgtcgagcgaagaaaatggccattcctttcatactcctcagaaaggacctcccatcgaagatgccattgcctcatctgacgtgctggaaacggcctcaaaatcagcgaatcccccccataccattcaagcttctgaggagcaatcctctacacccgccccagtcaagaaatccggaaagctccgacagcagattgatgtgaaagccgagctcgagaaaagacagggcggtaaacagttacttaaccttgtcgtcattgggcatgtggatgcgggaaagtccaccctgatgggacatatgctttatttactgggcaatatcaataaacgcaccatgcataaatatgaacaagagtcgaaaaaggccggcaaggcctcatttgcatacgcctgggtgctggacgagacgggagaggaacgggagcgaggagtcacaatggacgtcggtatgacaaagtttgaaactaccacaaaagtgatcacattgatggatgcacccgggcacaaagatttcattcctaatatgattacaggcgccgctcaggctgacgtggctgttctggtggtggacgcctccaggggagagttcgaggcggggtttgaaacaggagggcagacacgtgagcatggattgctcgtgcgatccctcggcgtgacccagttagctgtggccgtcaataaaatggatcaggttaattggcagcaggagcgctttcaggagatcacggggaagctgggtcacttcttgaagcaggctggcttcaaagagtcagacgttggcttcatccccacctctgggctgagcggggagaacttgattacacggtctcagtcgtcagagctgaccaaatggtacaagggactgtgcttgttggaacaaatagattcattcaaaccccctcaacgctcaattgacaagccctttcgactctgtgtaagtgatgtgtttaaggaccaggggtctggcttttgtattacaggtaaaatcgaggccggctatatacagaccggcgaccggctcctggccatgcctcctaatgagacctgtactgttaagggtatcactctccatgatgaacccgtcgattgggctgcagctggggaccatgtttccttgaccctcgtgggaatggacataataaagattaacgtggggtgtatattctgtgggccgaaggtacccattaaggcctgcacacggtttagggcccggatcctgatcttcaacattgagattcccataacgaaaggatttcctgttctgttgcactaccaaacagtttctgagccggctgttatcaaacgtctcatttcagtgttgaataagagtaccggtgaggtgaccaaaaagaagcctaaattcctcactaaaggtcagaatgctctcgtcgaactacagacccaaaggccaattgcgctcgagctgtacaaagatttcaaagagcttggccggtttatgttgcggtatggaggcagtacaatagctgccggagtggtgaccgagataaaagaatag

SEQ ID NO: 57281 - DNA, 1227 bp, Artificial Sequence
  derived and/or modified sequence
atggggcacatgctctatctacttggaaacataaataagcggactatgcacaaatatgaacaagagtccaagaaagcagggaaggcatctttcgcctatgcttgggtcctggacgagaccggggaagagagggaacggggggttaccatggatgtgggcatgaccaaattcgaaaccacgaccaaggtaatcactttaatggacgctcctggacataaagacttcattccaaatatgatcaccggtgcagcccaggcagatgtagctgttctcgtagtggacgcctccagaggcgaatttgaggccggttttgaaaccggggggcagacccgcgaacacgggttgttggtgcgctccctgggagttacgcagctggctgttgctgttaataaaatggatcaggtcaattggcaacaggaacgctttcaagagattactggcaagctgggacatttcctgaaacaggcgggattcaaagaaagtgacgtaggctttattccaacatctgggctgagcggcgagaacctgatcactcggagtcaatcttctgagcttacaaaatggtataaaggcctttgccttctggagcagatagactccttcaaacctcctcagcgctccatcgataaaccctttcgattgtgcgtttcggacgtgttcaaggaccaggggtccggattctgcatcaccggaaaaatcgaagcaggctatatacagacaggcgaccgcctcctggcaatgccacccaatgagacatgtaccgttaagggcatcacattacacgacgagcctgtcgactgggccgccgcaggcgatcacgtaagtctgacgctagtcggaatggacattatcaaaattaatgtaggctgcattttttgtggtcctaaagtgccgattaaggcgtgcacaaggttccgcgctagaattctgatattcaacatagagataccgatcaccaagggctttcccgtgttgctccactaccagactgtcagcgaaccagcagttatcaaaaggttaatctctgtgctgaacaagagcactggcgaggttactaagaaaaagccgaaatttctgacaaaaggtcagaatgcactggtggaactacaaacccaacgcccgattgccctggaactgtataaggactttaaagaacttgggcggtttatgttgcggtatgggggaagtacaattgcagccggtgtagtaacagaaattaaggagtag

SEQ ID NO: 57282 - DNA, 2703 bp, Artificial Sequence
  derived and/or modified sequence
gcagaggcctgcgggaagccaagatggcgcataggggttctccaggctgcagttggcgccttatcagtatctaagcggagtgttttggaaggagttaaggggctgtggcaaacgccctctccgccgtcatggcccggcatcggaatgttcgaggctataactacgatgaagattttgaagatgatgatctctacggccagtctgtagaggatgattattgtatttcgccgtcaacagctcgtctttattcatgccttgatcacatgagagaggtacttggagatgctgtgccagatgaaatattaattgaagcagttctgaagaacaagtttgatgtgcagaaggctttgtcaggggttctggaacaagatagagtgcagagtttgaaggacaagaatgaggcaacagtatctacaggaaagatagcaaaaggaaaaccagtagattcccagacatcgcgaagtgaatctgaaattgtgccaaaagttgctaaaatgactgtatctggaaagaagcaaactatgggatttgaagtgcctggagtatcttctgaagaaaatggtcatagtttccacacacctcaaaaaggaccgcccattgaagatgccattgcttcttccgatgttcttgagactgcttctaaatctgctaatccaccccacacgattcaagcatcagaagagcagagttcaaccccagcaccggtgaaaaagtctggcaagctgaggcagcaaatagatgtgaaggcggaactggagaagcggcaaggagggaagcagctactcaacttagtggtcattggtcatgttgatgctgggaaaagtactctgatgggccatatgctttatcttctgggtaatataaacaaaagaactatgcataagtatgaacaggagtctaaaaaggctggcaaagcttcgtttgcatatgcatgggtcttggatgaaactggcgaagaaagggaaaggggagtaaccatggatgttggtatgacaaagtttgaaaccacaaccaaagttattacattaatggatgctccaggccataaggacttcattccaaatatgattacaggagcagcccaggcggatgtagctgttttagttgtagatgccagcaggggagagtttgaagctggatttgagactggaggacaaacacgagagcatggactcttggtccgttctctgggagtgacgcagcttgcagttgcagttaataaaatggatcaggttaattggcaacaagaaaggtttcaagagattactggaaaacttgggcactttcttaagcaagcaggttttaaggagagtgatgtaggttttattcctacaagtggtctcagtggtgaaaatctaatcacaagatctcagtcaagtgaactcacaaaatggtataaaggactatgtttattagaacaaattgattcctttaagcctccccagcgatctattgacaaaccttttagattatgtgtgtccgatgttttcaaagatcaaggatctggattttgcataactggtaaaatagaagctggttatatccaaactggtgaccgactactggcaatgcctcctaatgaaacttgtaccgtgaaaggaatcactctgcatgatgaacctgtcgactgggcggcagcaggcgatcatgttagtcttactttggttgggatggatatcatcaaaatcaatgttggctgcatattttgtggccccaaagtacccattaaagcttgcactcgtttcagagcccgaatcctcatctttaatattgaaattcctatcactaaaggatttcctgtgctgttacactaccaaactgtcagtgaacccgccgttattaaacgattgattagtgtcttaaacaaaagcacgggtgaagtcacaaagaaaaagcctaagtttttgactaaaggccagaatgcattggtagagctacagacacaaagaccaatagctcttgagctatataaagactttaaagagctggggaggttcatgctacgttacggtggttctacaatagctgctggtgttgtcactgagataaaagaatgatgggtcagaatttctaccacgtttctggatacagtgaaatagctaacctctgtttcaagaatgcagttattaagtcaaaggaacaatgtgcaattgatatgtttttagatgagagagaaaaattaaagctaaaattagctgcaaagaagtattaataatcacctctgcaaaaattctaagttgccaactggcaaagaaagtctaatgttaaaaacaactttgcctttgaaacgttaataaatggatttactttgctaagatttatggcaagtgtcaaaaatagtatctgaagatactgaatcatcatgaaatgaactctacttctggccaaagcacaatgtatttgcagttttctcttttgattcaattatactgcacatgttttaaggaaaagtaacttaattgggtttttcaggcagttgatatttgacctaagctttttttttttttttttttccagttaatgctaagaaaagatttggggaaggttataataaaagtattttgtggtgaccataagaatgtccctccccaaacaagtaaacttgtgaaagtttaatttggaattagtggaagctgttcctttgaaagccaagatattatttaagttgtaaagccagctaataaaatgccttagtttgagcat

SEQ ID NO: 57283 - DNA, 1585 bp, Artificial Sequence
  derived and/or modified sequence
ttgaagatgatgatctctacggccagtctgtagaggatgattattgtatttcgccgtcaacagctgctcagtttatttattcacggcgtgacaaaccttccgttgagcctgtggaagaatatgattatgaagatctgaaagaatcttccaattctgtttcaaaccatcagctcagtggatttgatcaagcagctactcaacttagtggtcattggtcatgttgatgctgggaaaagtactctgatgggccatatgctttatcttctgggtaatataaacaaaagaactatgcataagtatgaacaggagtctaaaaaggctggcaaagcttcgtttgcatatgcatgggtcttggatgaaactggcgaagaaagggaaaggggagtaaccatggatgttggtatgacaaagtttgaaaccacaaccaaagttattacattaatggatgctccaggccataaggacttcattccaaatatgattacaggagcagcccaggcggatgtagctgttttagttgtagatgccagcaggggagagtttgaagctggatttgagactggaggacaaacacgagagcatggactcttggtccgttctctgggagtgacgcagcttgcagttgcagttaataaaatggatcaggttaattggcaacaagaaaggtttcaagagattactggaaaacttgggcactttcttaagcaagcaggttttaaggagagtgatgtaggttttattcctacaagtggtctcagtggtgaaaatctaatcacaagatctcagtcaagtgaactcacaaaatggtataaaggactatgtttattagaacaaattgattcctttaagcctccccagcgatctattgacaaaccttttagattatgtgtgtccgatgttttcaaagatcaaggatctggattttgcataactggtaaaatagaagctggttatatccaaactggtgaccgactactggcaatgcctcctaatgaaacttgtaccgtgaaaggaatcactctgcatgatgaacctgtcgactgggcggcagcaggcgatcatgttagtcttactttggttgggatggatatcatcaaaatcaatgttggctgcatattttgtggccccaaagtacccattaaagcttgcactcgtttcagagcccgaatcctcatctttaatattgaaattcctatcactaaaggatttcctgtgctgttacactaccaaactgtcagtgaacccgccgttattaaacgattgattagtgtcttaaacaaaagcacgggtgaagtcacaaagaaaaagcctaagtttttgactaaaggccagaatgcattggtagagctacagacacaaagaccaatagctcttgagctatataaagactttaaagagctggggaggttcatgctacgttacggtggttctacaatagctgctggtgttgtcactgagataaaagaatgatgggtcagaatttctaccacgtttctggatacagtgaaatagctaacctctgtttcaagaatgcagttattaagtcaaaggaacaatgtgcaattgatatgtttttagatgagag

SEQ ID NO: 57284 - DNA, 1929 bp, Artificial Sequence
  derived and/or modified sequence
atggcccggcacagaaatgtgcggggctacaactatgatgaggactttgaagatgatgacctgtatggccagagcgtggaggatgactactgcatcagccccagcacagcccggctgtacagctgcctggaccacatgagggaggtgctgggagatgctgtgcctgatgagatcctgattgaggccgtgctgaagaacaagtttgatgtgcagaaggccctgtctggagtgctggagcaggacagagtgcagagcctgaaggacaagaatgaggccaccgtgtccacaggcaagatcgccaagggcaagcctgtggacagccagaccagccgctctgagagcgagatcgtgcccaaggtggccaagatgacagtgtctgggaagaagcagaccatgggctttgaggtgcctggggtgtccagtgaagaaaatggccacagcttccacaccccccagaagggcccccccattgaagatgccatcgccagcagtgatgtgctggagacagccagcaagagcgccaaccccccccacaccatccaggccagcgaggagcagagcagcaccccagcccctgtgaagaagagcggcaagctgcggcagcagattgatgtgaaggccgagctggagaagaggcagggcggcaagcagctgctgaacctggtggtgattggccacgtggatgctgggaagagcaccctgatgggccacatgctgtacctgctgggcaacatcaacaagaggaccatgcacaagtatgagcaggagagcaagaaggccggcaaggccagctttgcctatgcctgggtgctggatgagaccggggaggagcgggagcggggcgtgaccatggatgtgggcatgaccaagtttgagaccaccaccaaggtgatcaccctgatggatgcccctggccacaaggacttcatccccaacatgatcactggagctgcccaggctgatgtggccgtgctggtggtggatgccagcagaggagaatttgaggccggctttgagaccggcggccagacccgggagcacggcctgctggtgcgcagcctgggcgtgacccagctggccgtggccgtgaacaagatggaccaggtgaactggcagcaggagcgcttccaggagatcaccgggaagctgggccacttcctgaagcaggccggcttcaaggagagtgatgtgggcttcatccccaccagcggcctgagcggggagaacctgatcaccaggagccagagcagcgagctgaccaagtggtacaagggcctgtgcctgctggagcagattgacagcttcaagccaccccagaggagcattgacaagcccttccggctgtgtgtgtctgatgtgttcaaggaccagggcagcggcttctgcatcaccgggaagattgaagctggctacatccagacaggagaccggctgctggccatgcccccaaatgagacctgcaccgtgaagggcatcaccctgcatgatgagcctgtggactgggccgccgccggggaccacgtgtccctgaccctggtgggcatggacatcatcaagatcaacgtgggctgcatcttctgtggccccaaggtgcccatcaaggcctgcacccgcttccgggcccgcatcctgatcttcaacatcgagatccccatcaccaagggcttccctgtgctgctgcactaccagacagtgtctgagcctgctgtgatcaagaggctcatctctgtgctgaacaagagcactggagaggtgaccaagaagaagcccaagttcctgaccaagggccagaatgccctggtggagctgcagacccagaggcccatcgccctggagctgtacaaggacttcaaggagctgggccgcttcatgctgcgctatggaggcagcaccatcgccgccggcgtggtgacagagatcaaggagtag

SEQ ID NO: 57285 - DNA, 1227 bp, Artificial Sequence
  derived and/or modified sequence
atgggccacatgctgtacctgctgggcaacatcaacaagaggaccatgcacaagtatgagcaggagagcaagaaggccggcaaggccagctttgcctatgcctgggtgctggatgagaccggggaggagcgggagcggggcgtgaccatggatgtgggcatgaccaagtttgagaccaccaccaaggtgatcaccctgatggatgcccctggccacaaggacttcatccccaacatgatcactggagctgcccaggctgatgtggccgtgctggtggtggatgccagcagaggagaatttgaggccggctttgagaccggcggccagacccgggagcacggcctgctggtgcgcagcctgggcgtgacccagctggccgtggccgtgaacaagatggaccaggtgaactggcagcaggagcgcttccaggagatcaccgggaagctgggccacttcctgaagcaggccggcttcaaggagagtgatgtgggcttcatccccaccagcggcctgagcggggagaacctgatcaccaggagccagagcagcgagctgaccaagtggtacaagggcctgtgcctgctggagcagattgacagcttcaagccaccccagaggagcattgacaagcccttccggctgtgtgtgtctgatgtgttcaaggaccagggcagcggcttctgcatcaccgggaagattgaagctggctacatccagacaggagaccggctgctggccatgcccccaaatgagacctgcaccgtgaagggcatcaccctgcatgatgagcctgtggactgggccgccgccggggaccacgtgtccctgaccctggtgggcatggacatcatcaagatcaacgtgggctgcatcttctgtggccccaaggtgcccatcaaggcctgcacccgcttccgggcccgcatcctgatcttcaacatcgagatccccatcaccaagggcttccctgtgctgctgcactaccagacagtgtctgagcctgctgtgatcaagaggctcatctctgtgctgaacaagagcactggagaggtgaccaagaagaagcccaagttcctgaccaagggccagaatgccctggtggagctgcagacccagaggcccatcgccctggagctgtacaaggacttcaaggagctgggccgcttcatgctgcgctatggaggcagcaccatcgccgccggcgtggtgacagagatcaaggagtag

SEQ ID NO: 57286 - DNA, 1929 bp, Artificial Sequence
  derived and/or modified sequence
atggcccggcaccggaacgtgcggggctacaactacgacgaggacttcgaagatgatgacctttacggccagtctgtagaggatgattactgtatttccccatccaccgccaggctttattcgtgcctggatcatatgagggaggtcttgggagacgccgtgccagacgagattttaattgaggctgtcctcaagaacaagttcgacgtgcaaaaggccttatccggtgtgctggaacaggaccgtgtacagtctctgaaggataagaatgaagctactgtgagcacaggtaagatcgctaagggcaaacccgtagattctcagacatcccggtctgaatcagagatcgtacccaaggttgctaagatgaccgtttctgggaagaagcagacgatggggttcgaagtacctggcgtctcatctgaggaaaatggccacagcttccacacaccgcagaaagggcctcccatagaggacgctatcgcctcttccgacgtgttggagaccgcatccaagtctgccaaccctccgcacaccatacaggctagtgaggagcagtcgagtactcccgccccggttaaaaaatctggaaagctgcggcaacaaatagatgtcaaggccgaattggaaaagagacaaggcggtaagcagctgttgaatcttgtcgtgatcggtcacgttgatgccggaaagtccactctgatgggacacatgctgtatctactggggaacataaacaagcgaaccatgcataagtacgagcaggaaagcaagaaagccggcaaagcttcctttgcctatgcatgggttctggatgagaccggggaagagcgcgagcggggggtgaccatggacgttggtatgactaaattcgagactaccaccaaggtgatcaccctgatggatgcgcctgggcacaaggattttataccaaatatgatcaccggtgctgcgcaggccgacgttgcagttctggtagtggacgcatcgaggggcgaattcgaggccggttttgagacgggaggacaaacacgcgagcacggactgctcgtcagaagcctgggcgtgactcagctcgctgtggccgtaaacaagatggatcaagtcaattggcaacaggagagattccaggagattacgggcaaactgggacatttccttaaacaggccggattcaaggagagtgatgtgggcttcatacccactagcggactctccggcgaaaacttgataactagatcccagtcttcagagcttacaaagtggtacaaggggctgtgcctgctggaacagatcgattcctttaagccaccacagcgctcaatcgataagccattcagattgtgcgtgtctgatgtgtttaaagaccagggctctggcttctgtatcacaggaaagatcgaggccggatacattcagacaggtgatcgtctgctcgcaatgcctccaaatgaaacctgcaccgtgaaaggcatcacgctccacgacgagccagtggattgggccgcagctggcgatcatgtctcccttactcttgtcggcatggatattattaagattaatgtgggctgcatcttctgcggtccgaaagtgcctataaaagcatgcacaaggttccgcgcccgtatcctgattttcaatatcgaaatacctataacaaagggcttcccagtgctgttacattatcaaactgtttcagagcccgccgtcattaagcgtctgatctctgtactgaataagtcgacaggcgaggttacaaagaaaaaaccaaagttcctgactaaaggtcagaacgctctagttgaattacaaacacagcgcccaatagctcttgagctttataaagacttcaaggagcttggccgctttatgttgcggtatggaggatcaacgatcgctgcaggggtggttacggagatcaaggaatag

SEQ ID NO: 57287 - DNA, 1227 bp, Artificial Sequence
  derived and/or modified sequence
atgggccacatgctgtacctgctgggcaacatcaacaagcggaccatgcataagtatgagcaggaatccaaaaaggccggcaaagcatctttcgcatacgcatgggttctggacgaaacaggggaagaacgggaacgtggggtgaccatggatgtcggcatgaccaagttcgagactacaacaaaggttatcaccctaatggacgcccccggccacaaggactttattcccaacatgattacaggcgcggcccaggccgatgtggcggtgcttgtagtcgacgcctcacgaggagaatttgaggctgggtttgaaaccggaggccagaccagggaacatgggctgctggtcagaagtctgggggtgactcagttggctgtagcggtgaacaagatggaccaggtgaactggcagcaagagcgctttcaggaaattactggaaaactcggacacttccttaagcaagctggattcaaagagtccgacgtcggcttcatccctacatcagggttgtcaggcgagaatttaattacacgctcccaatcttctgagttgacaaagtggtacaaagggctatgtttgctggagcaaattgactctttcaagccaccccagcggtccattgataagccctttcgcttgtgcgtgagcgacgtgtttaaagatcaaggatcgggtttttgcataaccggaaaaatcgaggccggatacattcagaccggagaccggttgctggctatgccgccaaacgagacgtgcaccgtcaagggcataaccttgcacgatgaacccgtggactgggccgccgcaggcgaccacgtgtcgcttactctggtgggcatggacattatcaagattaatgtaggatgcatcttctgcggcccaaaagtgcctatcaaggcttgtactcgctttagggcccgcattttaatctttaacattgaaatccctatcactaaaggttttcctgtcctgctgcactaccaaactgtcagtgaacccgcggtaataaaaaggctgatatcagtgctgaacaagagcaccggtgaggtgacaaaaaagaagccaaagtttctgacaaagggccagaatgcgctggtcgaactgcaaacacagcggccaattgctctagaattgtataaagattttaaggagctcggccgattcatgctcagatacggaggctctacaatcgcggcaggagtcgtgaccgagataaaagaatag

SEQ ID NO: 57288 - DNA, 1929 bp, Artificial Sequence
  derived and/or modified sequence
atggctcgccacagaaacgttaggggctataactatgatgaggacttcgaagacgatgatctgtacggccagtcagtcgaagatgattactgcatcagcccatcaaccgcccgattgtactcttgtctggaccatatgcgcgaggtgctgggtgacgctgtgcccgacgaaatcctcatcgaggctgtgctgaaaaacaagttcgacgtacaaaaggccctgtccggtgtgttggagcaggatcgggttcagtcactgaaagataagaacgaggccacagtgagtacagggaaaattgcaaagggaaaaccggttgactctcagacctctagatctgaaagtgagattgtgccaaaggttgccaagatgaccgtgtccgggaagaagcagacaatgggattcgaggtgcccggagtatcttcggaagagaatggacacagctttcacaccccacagaaagggcctcccattgaggacgccatcgcctcatccgacgtactcgagactgcgagtaaatccgccaatccacctcatactatacaagccagtgaagaacaaagctccaccccagcccctgtcaaaaaatccgggaagctcagacagcagattgatgtaaaggctgagctcgaaaagaggcaaggaggcaagcaattactcaatctggtagttattggccacgtagatgccggtaagtctaccctgatgggacacatgctctacctgcttgggaacattaataagcgaaccatgcacaaatatgagcaggagtcgaaaaaggcgggtaaagcttcttttgcttatgcatgggtcctggatgagacaggagaggagcgagagcggggagtgaccatggatgttggaatgaccaagttcgaaactaccaccaaggtcatcactctgatggacgccccaggacacaaggatttcattcccaatatgatcactggcgcagcccaggcagacgtggccgtgctagtagtggatgctagcagaggcgagttcgaagccggatttgaaactggcggacagaccagagagcacggtttgttggtcagatctcttggggtcacacagctggccgttgccgtgaacaagatggaccaggttaactggcagcaagagaggttccaagagataaccggaaagctgggacatttcctaaaacaggctggcttcaaggaaagtgatgtgggattcattccaacctcaggtctgagcggggagaacctcatcacacggagtcagagctctgagttgaccaaatggtataaaggcctgtgtttgctggagcagattgatagcttcaaaccaccgcaaaggagtattgataagccgttcagactctgcgtgtccgacgtgtttaaggaccaggggtccggattttgtatcaccggcaaaattgaggctggctatattcagacaggtgaccggctcctcgctatgccaccgaacgagacctgcacggtcaagggcataaccttgcacgatgaaccagtcgactgggcggcagccggtgatcacgtctcgctgacgctggttggaatggacatcatcaagattaacgtgggctgcattttctgcggacctaaggtccccatcaaggcttgcacaaggtttcgtgctaggatcctgattttcaacattgaaattccgattaccaagggtttccccgttctcctgcactatcagacggtgagcgaacccgcagtaatcaagcgtctgatctcagtcctgaacaagagcactggagaggtgactaagaaaaagccaaagttcctcaccaaagggcagaacgcactcgtggagctgcagactcagcggcctattgccttggagctgtacaaagactttaaggagctcggcagatttatgttaagatatggcggaagcactattgcagcaggcgtcgtgaccgaaatcaaagagtag

SEQ ID NO: 57289 - DNA, 1227 bp, Artificial Sequence
  derived and/or modified sequence
atgggccatatgctttatctgttgggaaatattaacaagagaactatgcacaagtacgagcaggagtctaagaaggccggtaaggccagctttgcttacgcgtgggtgttggatgaaacaggagaggagagggagcggggagtgacgatggatgttggaatgaccaaatttgagacaacaaccaaggtcatcacacttatggatgcccctggccataaagactttattcccaatatgatcacaggtgctgcacaggccgatgttgcagttctggtagtggacgcttccagaggggaattcgaggcaggatttgaaactggcggacagacacgggaacatggtcttctggtgcggtctcttggcgtcacccaactcgccgtggcagtgaacaagatggaccaagtaaattggcagcaggaacgctttcaggagattaccggaaagctgggccattttctgaagcaagccggttttaaagagtccgatgtcggctttattccaacctcgggcctgtctggggagaacttgatcacaaggtcccaaagtagcgagctcactaagtggtacaagggactgtgtctgctggagcagatagactccttcaagccgccacagagatcgatcgataagccttttcgattatgcgtttccgatgttttcaaagatcagggaagtggattttgtatcacgggaaaaatcgaagctggctacatccagacgggagaccgacttctggccatgcccccaaacgaaacatgcaccgtaaagggaatcactctgcatgacgagcccgtggattgggctgccgcaggggaccacgtgagtctgacactggtgggcatggacatcatcaagatcaacgtgggatgtatcttttgtggacccaaggtgcccatcaaggcgtgtacaagatttagggctcgcatcctcatttttaacatcgaaattccaattactaaaggctttcccgtactgttgcactaccaaacagtgtccgagcctgctgtgatcaaacggctcatcagcgtgctgaacaagagtaccggcgaggtgaccaagaaaaagcccaagttcttaaccaaggggcagaatgcccttgttgagttgcagacacagcgaccaatcgccttggagttgtataaggacttcaaggagttgggcagattcatgctcagatatgggggaagcacgatcgccgctggagtcgtgaccgagattaaggagtag

SEQ ID NO: 57290 - DNA, 1929 bp, Artificial Sequence
  derived and/or modified sequence
atggccagacacagaaacgtgagaggctacaactacgacgaggacttcgaggacgacgacctgtacggccagagcgtggaggacgactactgcatcagccccagcaccgccagactgtacagctgcctggaccacatgagagaggtgctgggcgacgccgtgcccgacgagatcctgatcgaggccgtgctgaagaacaagttcgacgtgcagaaggccctgagcggcgtgctggagcaggacagagtgcagagcctgaaggacaagaacgaggccaccgtgagcaccggcaagatcgccaagggcaagcccgtggacagccagaccagcagaagcgagagcgagatcgtgcccaaggtggccaagatgaccgtgagcggcaagaagcagaccatgggcttcgaggtgcccggcgtgagcagcgaggagaacggccacagcttccacaccccccagaagggcccccccatcgaggacgccatcgccagcagcgacgtgctggagaccgccagcaagagcgccaaccccccccacaccatccaggccagcgaggagcagagcagcacccccgcccccgtgaagaagagcggcaagctgagacagcagatcgacgtgaaggccgagctggagaagagacagggcggcaagcagctgctgaacctggtggtgatcggccacgtggacgccggcaagagcaccctgatgggccacatgctgtacctgctgggcaacatcaacaagagaaccatgcacaagtacgagcaggagagcaagaaggccggcaaggccagcttcgcctacgcctgggtgctggacgagaccggcgaggagagagagagaggcgtgaccatggacgtgggcatgaccaagttcgagaccaccaccaaggtgatcaccctgatggacgcccccggccacaaggacttcatccccaacatgatcaccggcgccgcccaggccgacgtggccgtgctggtggtggacgccagcagaggcgagttcgaggccggcttcgagaccggcggccagaccagagagcacggcctgctggtgagaagcctgggcgtgacccagctggccgtggccgtgaacaagatggaccaggtgaactggcagcaggagagattccaggagatcaccggcaagctgggccacttcctgaagcaggccggcttcaaggagagcgacgtgggcttcatccccaccagcggcctgagcggcgagaacctgatcaccagaagccagagcagcgagctgaccaagtggtacaagggcctgtgcctgctggagcagatcgacagcttcaagcccccccagagaagcatcgacaagcccttcagactgtgcgtgagcgacgtgttcaaggaccagggcagcggcttctgcatcaccggcaagatcgaggccggctacatccagaccggcgacagactgctggccatgccccccaacgagacctgcaccgtgaagggcatcaccctgcacgacgagcccgtggactgggccgccgccggcgaccacgtgagcctgaccctggtgggcatggacatcatcaagatcaacgtgggctgcatcttctgcggccccaaggtgcccatcaaggcctgcaccagattcagagccagaatcctgatcttcaacatcgagatccccatcaccaagggcttccccgtgctgctgcactaccagaccgtgagcgagcccgccgtgatcaagagactgatcagcgtgctgaacaagagcaccggcgaggtgaccaagaagaagcccaagttcctgaccaagggccagaacgccctggtggagctgcagacccagagacccatcgccctggagctgtacaaggacttcaaggagctgggcagattcatgctgagatacggcggcagcaccatcgccgccggcgtggtgaccgagatcaaggagtag

SEQ ID NO: 57291 - DNA, 1227 bp, Artificial Sequence
  derived and/or modified sequence
atgggccacatgctgtacctgctgggcaacatcaacaagagaaccatgcacaagtacgagcaggagagcaagaaggccggcaaggccagcttcgcctacgcctgggtgctggacgagaccggcgaggagagagagagaggcgtgaccatggacgtgggcatgaccaagttcgagaccaccaccaaggtgatcaccctgatggacgcccccggccacaaggacttcatccccaacatgatcaccggcgccgcccaggccgacgtggccgtgctggtggtggacgccagcagaggcgagttcgaggccggcttcgagaccggcggccagaccagagagcacggcctgctggtgagaagcctgggcgtgacccagctggccgtggccgtgaacaagatggaccaggtgaactggcagcaggagagattccaggagatcaccggcaagctgggccacttcctgaagcaggccggcttcaaggagagcgacgtgggcttcatccccaccagcggcctgagcggcgagaacctgatcaccagaagccagagcagcgagctgaccaagtggtacaagggcctgtgcctgctggagcagatcgacagcttcaagcccccccagagaagcatcgacaagcccttcagactgtgcgtgagcgacgtgttcaaggaccagggcagcggcttctgcatcaccggcaagatcgaggccggctacatccagaccggcgacagactgctggccatgccccccaacgagacctgcaccgtgaagggcatcaccctgcacgacgagcccgtggactgggccgccgccggcgaccacgtgagcctgaccctggtgggcatggacatcatcaagatcaacgtgggctgcatcttctgcggccccaaggtgcccatcaaggcctgcaccagattcagagccagaatcctgatcttcaacatcgagatccccatcaccaagggcttccccgtgctgctgcactaccagaccgtgagcgagcccgccgtgatcaagagactgatcagcgtgctgaacaagagcaccggcgaggtgaccaagaagaagcccaagttcctgaccaagggccagaacgccctggtggagctgcagacccagagacccatcgccctggagctgtacaaggacttcaaggagctgggcagattcatgctgagatacggcggcagcaccatcgccgccggcgtggtgaccgagatcaaggagtag

SEQ ID NO: 57292 - protein, 284 aa, Artificial Sequence
  derived and/or modified sequence
MEAIKKKMQMLKLDKENAIDRAEQAEADKKAAEDKCKQVEEELTHLQKKLKGTEDELDKYSEDLKDAQEKLELTEKKASDAEGDVAALNRRIQLVEEELDRAQERLATALQKLEEAEKAADESERGMKVIENRAMKDEEKMEIQEMQLKEAKHIAEEADRKYEEVARKLVILEGELERAEERAEVSELKCGDLEEELKNVTNNLKSLEAASEKYSEKEDKYEEEIKLLSDKLKEAETRAEFAERTVAKLEKTIDDLEEKLAQAKEENVGLHQTLDQTLNELNCI

SEQ ID NO: 57293 - DNA, 855 bp, Artificial Sequence
  derived and/or modified sequence
atggaggccatcaagaagaagatgcagatgctgaagctggacaaggagaacgccatcgacagagccgagcaggccgaggccgacaagaaggccgccgaggacaagtgcaagcaggtggaggaggagctgacccacctgcagaagaagctgaagggcaccgaggacgagctggacaagtacagcgaggacctgaaggacgcccaggagaagctggagctgaccgagaagaaggccagcgacgccgagggcgacgtggccgccctgaacagaagaatccagctggtggaggaggagctggacagagcccaggagagactggccaccgccctgcagaagctggaggaggccgagaaggccgccgacgagagcgagagaggcatgaaggtgatcgagaacagagccatgaaggacgaggagaagatggagatccaggagatgcagctgaaggaggccaagcacatcgccgaggaggccgacagaaagtacgaggaggtggccagaaagctggtgatcctggagggcgagctggagagagccgaggagagagccgaggtgagcgagctgaagtgcggcgacctggaggaggagctgaagaacgtgaccaacaacctgaagagcctggaggccgccagcgagaagtacagcgagaaggaggacaagtacgaggaggagatcaagctgctgagcgacaagctgaaggaggccgagaccagagccgagttcgccgagagaaccgtggccaagctggagaagaccatcgacgacctggaggagaagctggcccaggccaaggaggagaacgtgggcctgcaccagaccctggaccagaccctgaacgagctgaactgcatctag

SEQ ID NO: 57294 - DNA, 855 bp, Artificial Sequence
  derived and/or modified sequence
atggaagccataaagaagaagatgcagatgttgaagttggataaagagaacgcgatcgatcgggcagagcaagcggaagcagacaaaaaggcagccgaggacaaatgcaagcaggtcgaggaggagttaacacacctccagaagaagttaaagggaactgaggatgaactggacaaatactccgaagatctgaaggatgcgcaggagaaacttgagcttaccgagaaaaaagcatctgacgcggagggcgatgtcgcagccctgaaccgccgcatccagcttgtcgaggaagagcttgatagagcccaagagcggctggctactgcactacaaaaactggaagaggcagagaaggccgcagatgagagcgagcgagggatgaaggtcattgagaatagggctatgaaggacgaggaaaaaatggagattcaggagatgcagcttaaagaggccaaacatattgccgaagaggccgaccgaaaatatgaggaggtggctaggaagctggtgattttggagggcgagttagagagagcagaagagcgtgccgaagttagcgaactcaaatgtggcgatttggaagaagagttgaagaatgtcaccaacaatctcaagagcctggaggctgcctctgagaaatactccgaaaaagaagataagtacgaggaagaaatcaaattgttgtctgataaactgaaggaagccgagacacgcgccgaattcgcagagcggacagtggcaaagctggaaaaaaccatcgatgacctggaggagaaactggctcaggccaaggaagagaatgtaggcttgcaccagactttagatcagacattgaatgagctgaactgtatctag

SEQ ID NO: 57295 - DNA, 855 bp, Artificial Sequence
  derived and/or modified sequence
atggaggccatcaaaaagaagatgcagatgctcaagctggataaagagaacgcaattgatcgggcagagcaagcggaggctgacaagaaggccgccgaggacaaatgtaaacaggtggaggaggagctgacacacctccagaaaaagctgaaaggcaccgaggacgaactggacaagtacagcgaggatcttaaggacgctcaggagaagctcgagctgactgaaaaaaaagcttcagacgcagagggagatgtcgcggctctgaacaggcgcattcagctcgttgaggaagaactcgatcgcgcccaagaacgcctagcaaccgcactccagaaactagaagaggcagagaaagccgccgacgagagcgagcgcgggatgaaggtgattgaaaatagagccatgaaagatgaggagaagatggagatccaagaaatgcagttgaaggaggcaaagcatattgcagaagaggccgatcgaaaatatgaggaagtggctagaaagttggtgatcctagaaggggagctagaaagagctgaggagagggcagaggtcagtgagctgaagtgcggagacctggaggaggaactcaaaaacgttactaacaacttgaaatccttggaggccgcaagcgagaagtattcggagaaggaagataagtacgaagaagaaataaagctgttgagcgataagttaaaggaggctgagactagggccgaatttgcagagcggactgttgcaaagctggaaaagaccattgatgacctggaggagaaactagcccaggccaaagaagaaaacgtggggctgcaccagacccttgatcaaacactgaacgaactcaactgcatctag

SEQ ID NO: 57296 - DNA, 855 bp, Artificial Sequence
  derived and/or modified sequence
atggaggccatcaagaagaagatgcagatgctgaagctggacaaggaaaatgccatcgacagagctgagcaggccgaggccgacaagaaggctgctgaggacaagtgcaagcaggtggaggaggagctgacccacctgcagaagaagctgaagggcacagaagatgagctggacaagtacagcgaggacctgaaggatgcccaggagaagctggagctgacagagaagaaggccagtgatgctgaaggagatgtggccgccctgaacagacgcatccagctggtggaggaggagctggaccgggcccaggagcggctggccacagccctgcagaagctggaggaggccgagaaggccgcagatgaaagtgagcggggcatgaaggtgattgaaaatagagccatgaaggatgaggagaagatggagatccaggagatgcagctgaaggaggccaagcacatcgccgaggaggccgacagaaaatatgaggaggtggccaggaagctggtgatcctggagggggagctggagagagctgaggagagagctgaggtgtctgagctgaagtgtggggacctggaggaggagctgaagaatgtgaccaacaacctgaagagcctggaggccgccagcgagaagtacagcgagaaggaggacaagtatgaggaggagatcaagctgctgagtgacaagctgaaggaggccgagaccagggctgagtttgctgagaggacagtggccaagctggagaagaccattgatgacctggaggagaagctggcccaggccaaggaggagaatgtgggcctgcaccagaccctggaccagaccctgaatgagctgaactgcatctag

SEQ ID NO: 57297 - DNA, 855 bp, Artificial Sequence
  derived and/or modified sequence
atggaggccatcaagaagaagatgcagatgctgaagctggacaaggagaatgccatagatcgagccgaacaggccgaggctgataagaaggctgctgaggacaagtgtaaacaggtggaggaagaactaactcatctccaaaagaagttgaaagggacagaagacgagctggacaagtacagcgaggatctgaaggatgcccaggaaaagctggaactgacagagaagaaggcctctgacgctgaaggggatgtcgcagccctcaacagaagaattcaattagtggaagaggaactcgacagagcgcaggagaggcttgctacagctcttcagaagttggaggaggctgagaaagcggcagatgaatcagaaagagggatgaaagtaattgagaatcgtgcgatgaaagatgaggaaaaaatggagattcaggaaatgcagctgaaagaagctaaacacatcgccgaagaagctgatcgaaaatacgaagaggtggcacgcaagctggtcattcttgaaggggagttggaacgggctgaggaaagagctgaggtgtcagaactgaagtgcggggacttggaggaggagcttaaaaacgtgactaataatctgaagtccctcgaggccgctagtgagaaatatagcgaaaaggaagataagtacgaagaggagatcaaactgcttagcgacaagctaaaggaagccgagaccagggctgaattcgcagaacgtaccgtggctaaattggagaagacaatcgatgacctcgaagagaaattggcccaggcgaaggaagaaaatgtaggccttcatcagacattagatcagaccctaaacgagctgaactgcatctag

SEQ ID NO: 57298 - DNA, 855 bp, Artificial Sequence
  derived and/or modified sequence
atggaggccatcaagaagaagatgcagatgctgaagctggacaaggagaacgccatagatagggccgagcaggcggaggccgataaaaaggccgctgaggataaatgtaagcaggtggaggaggagcttactcacctgcagaagaagctcaagggcacagaagatgaactcgataaatatagtgaggacctgaaggacgcacaggagaagctcgaactgaccgagaaaaaagcctctgacgctgaaggagacgtcgcggcacttaaccgccggattcagctggtggaggaggaactcgaccgagctcaggaacggcttgccaccgcactgcagaaactggaggaggctgaaaaggctgctgatgagtctgagagaggaatgaaagtaatcgaaaatcgtgcaatgaaggacgaagaaaagatggagatccaagagatgcagctcaaagaagccaaacacatagccgaagaggcagatcgcaaatatgaggaggtagcccgtaaactcgtcatcctcgagggcgagcttgagagagctgaggaacgcgccgaggttagcgaattaaaatgcggcgatttagaggaggaactgaagaatgtcactaataacttaaaatccttggaagcagcctctgagaaatatagtgagaaagaagacaagtacgaggaggaaatcaagctgctgtctgacaaactgaaggaggctgaaacgagggccgaattcgctgaacgcacagtagcaaaattagagaagactatcgatgaccttgaagagaagttggcccaggcaaaggaagaaaacgttggtctgcaccagacccttgaccagactctgaatgaattgaattgcatttag

SEQ ID NO: 57299 - DNA, 855 bp, Artificial Sequence
  derived and/or modified sequence
atggaggccattaagaagaaaatgcagatgttaaagctagacaaagagaatgccatcgaccgggctgagcaggccgaagcagacaaaaaagccgctgaggacaagtgcaagcaggtggaagaggagctgacacatctgcagaagaagctcaaagggacagaagatgagctggataagtattctgaggatctcaaggacgcccaggaaaagctagagctgacggaaaagaaggccagcgatgccgagggtgacgttgccgctctgaatcgccgaattcagctggtggaagaggagctggaccgcgctcaggagagactggcaactgctctgcaaaagctggaggaggccgaaaaagcagctgacgagtcggagagaggaatgaaagtaattgaaaaccgagccatgaaggacgaggagaagatggaaatccaggaaatgcagttgaaagaggccaagcatatcgcggaagaagccgatcggaaatatgaagaggtggcccgaaagcttgtgatactcgagggggaactggaacgcgctgaagagagagccgaggtgtccgaacttaagtgcggcgatctggaggaagagctcaaaaatgttacaaacaaccttaagagcttggaggctgcaagcgagaaatatagtgagaaggaggacaagtacgaggaagaaattaaactgctaagcgacaaactgaaggaagctgagacacgagccgaatttgccgagcgtactgtcgctaagctggagaaaactatcgacgacttggaggagaaactggctcaggctaaggaggagaatgtggggctgcaccagaccctggatcagacactaaacgagttaaactgtatctag

SEQ ID NO: 57300 - DNA, 855 bp, Artificial Sequence
  derived and/or modified sequence
atggaggctatcaagaaaaagatgcagatgttaaagctggataaagaaaatgcaatcgatagggccgagcaggccgaggcggacaagaaggcagctgaggataagtgcaaacaagtggaggaggaactgacccatctgcagaagaagttgaaaggcactgaggacgaactggataaatattcagaggaccttaaggatgcccaggagaagctagaattaacagagaagaaagcttcagacgccgaaggggacgttgcagccctcaaccgcagaatacagctggtggaggaggagctggacagggcacaggaacgcctggcaacagcgttgcagaagttggaggaggccgagaaagccgcagacgaaagtgagagggggatgaaagtgattgagaatcgcgcaatgaaagacgaggagaagatggagatacaggaaatgcagcttaaggaggcgaagcacatagccgaagaggccgacagaaagtacgaagaggttgccaggaagctcgtcatcctcgagggggaactcgaacgagctgaggagagggccgaggtctctgagctgaagtgcggggatctagaggaggaactgaagaacgtcaccaacaacctgaaaagcctcgaggctgcgtccgaaaaatactcggaaaaggaagataaatatgaagaagaaattaagctgctgtcagacaagcttaaggaagctgagaccagagccgagtttgccgagagaaccgtggccaagctggaaaaaacgattgatgatctggaagaaaaactagcacaagctaaggaggagaatgtgggcctgcatcagacgcttgatcaaacgctgaacgaactcaattgcatttag

SEQ ID NO: 57301 - DNA, 2630 bp, Artificial Sequence
  derived and/or modified sequence
ataaggccctctcctccaccctgccaggctcactctgccccacagccacagcccctgactgccgcagcccccacagagcccgccgcgcaccccacgtcccccacgccagcgcccagccatggaggccatcaagaagaaaatgcagatgctgaagttggacaaggagaatgccatcgaccgcgcggagcaggcggaggcggataagaaagccgctgaggacaagtgcaagcaggtggaggaggagctgacgcacctccagaagaaactaaaagggacagaggacgagctggataaatattccgaggacctgaaggacgcgcaggagaagctggagctcacggagaagaaggcctccgacgctgaaggtgatgtggccgccctcaaccgacgcatccagctcgttgaggaggagttggacagggctcaggaacgactggccacggccctgcagaagctggaggaggcagaaaaagctgcagatgagagtgagagaggaatgaaggtgatagaaaaccgggccatgaaggatgaggagaagatggagattcaggagatgcagctcaaagaggccaagcacattgcggaagaggctgaccgcaaatacgaggaggtagctcgtaagctggtcatcctggagggtgagctggagagggcagaggagcgtgcggaggtgtctgaactaaaatgtggtgacctggaagaagaactcaagaatgttactaacaatctgaaatctctggaggctgcatctgaaaagtattctgaaaaggaggacaaatatgaagaagaaattaaacttctgtctgacaaactgaaagaggctgagacccgtgctgaatttgcagagagaacggttgcaaaactggaaaagacaattgatgacctggaagagaaacttgcccaggccaaagaagagaacgtgggcttacatcagacactggatcagacactaaacgaacttaactgtatataagcaaaacagaagagtcttgttccaacagaaactctggagctccgtgggtctttctcttctcttgtaagaagttccttttgttattgccatcttcgctttgctggaaatgtcaagcaaattatgaatacatgaccaaatattttgtatcggagaagctttgagcaccagttaaatctcattccttccctttttttttcaaatggcaccagctttttcagctctcttattttttccttaagtagcatttattcctaaggtaggcagggtatttcctagtaagcatactttcttaagacggaggccatttggttcctgggagaataggcagccccacactttgaagaatacagaccccagtatctagtcgtggatataattaaaacgctgaagaccataaccttttgggtcaactgttggtcaaactataggagagaccagggaccatcacatgggtagggattttccatccagagccaataaaaggactggtgggggccgggggtggctattgtgggaagtcataacccacagatagatcaacctaagaatcctggcccttctccactctccaccatgcaggacaaacatcttctcaagcagtcaacgtagaatgcttgggaaatagtcataattacccacatatagtaattaatagatggtaattaattgatccttgatgtgatgttcttttgcatatttccttcattctaaagttgttccctggccgggagcgttggctttcgcctgtaatcccaacactttgggaggccaggacagatcacttgaggtcaggagttcgagaccagcccagccaacatggcgaaaccatgtctctactaaaaatacaaaaattatggtgacgcctgcctgtagtcccagctactcgggaggctgaggcaggaggatcgcttgaacccaggaagtggagactgcagtgagccgatatcgcaccacagcgctccagcctggtcgacagagtgagactccatctcaagaaaaaataaaaataaagttgttctctgaagagcaaatgtctcattccagtaatgacccactcagcaggaatatggtggagttcagtccaattcaggtcagccatatccaaaagaccacaagtcattactaagttgagcaaaagagtttttatctattagcagaaagggcctctctggcagcagagattaaaaactggcccaacttcatttccatacttcagggaacagcaaattgaggatttacttatctaggacttgaattccttctttgggaccaagttaataaaagaccaagaaactcctgattaaactggataatgaaggattctgtagacagggctgcacgtatcggctttgtttgacttctcttttctcagttaacatctcagagctagaacattccacattccccagcagcgtgtgggggctgactaaagtttacaattccaactaaaaatcaccctgcttctggcttatctgaatcccttacccaccccaccccaccaccctactcctatttattcagcaccacactacccaggaaatacactagcaaattgtgcaatggaataaaatccacactttagattcttgcaactgtatcatatgtaatagtatcactttttctacattttggtcaaataaatttttacataaactac

SEQ ID NO: 57302 - DNA, 1542 bp, Artificial Sequence
  derived and/or modified sequence
actctgccccacagccacagcccctgactgccgcagcccccacagagcccgccgcgcaccccacgtcccccacgccagcgcccagccatggaggccatcaagaagaaaatgcagatgctgaagttggacaaggagaatgccatcgaccgcgcggagcaggcggaggcggataagaaagccgctgaggacaagtgcaagcaggtggaggaggagctgacgcacctccagaagaaactaaaagggacagaggacgagctggataaatattccgaggacctgaaggacgcgcaggagaagctggagctcacggagaagaaggcctccgacgctgaaggtgatgtggccgccctcaaccgacgcatccagctcgttgaggaggagttggacagggctcaggaacgactggccacggccctgcagaagctggaggaggcagaaaaagctgcagatgagagtgagagaggaatgaaggtgatagaaaaccgggccatgaaggatgaggagaagatggagattcaggagatgcagctcaaagaggccaagcacattgcggaagaggctgaccgcaaatacgaggaggtagctcgtaagctggtcatcctggagggtgagctggagagggcagaggagcgtgcggaggtgtctgaactaaaatgtggtgacctggaagaagaactcaagaatgttactaacaatctgaaatctctggaggctgcatctgaaaagtattctgaaaaggaggacaaatatgaagaagaaattaaacttctgtctgacaaactgaaagaggctgagacccgtgctgaatttgcagagagaacggttgcaaaactggaaaagacaattgatgacctggaagagaaacttgcccaggccaaagaagagaacgtgggcttacatcagacactggatcagacactaaacgaacttaactgtatataagcaaaacagaagagtcttgttccaacagaaactctggagctccgtgggtctttctcttctcttgtaagaagttccttttgttattgccatcttcgctttgctggaaatgtcaagcaaattatgaatacatgaccaaatattttgtatcggagaagctttgagcaccagttaaatctcattccttccctttttttttcaaatggcaccagctttttcagctctcttattttttccttaagtagcatttattcctaaggtaggcagggtatttcctagtaagcatactttcttaagacggaggccatttggttcctgggagaataggcagccccacactttgaagaatacagaccccagtatctagtcgtggatataattaaaacgctgaagaccataaccttttgggtcaactgttggtcaaactataggagagaccagggaccaccctactcctatttattcagcaccacactacccaggaaatacactagcaaattgtgcaatggaataaaatccacactttagattcttgcaactgtatcatatgtaatagtatcactttttctacattttggtcaaataaatttttacataaactac

SEQ ID NO: 57303 - DNA, 486 bp, Artificial Sequence
  derived and/or modified sequence
atgaaggagctgcaggacatcgccagactgagcgacagattcatcagcgtggagctggtggacgagagcctgttcgactggaacgtgaagctgcaccaggtggacaaggacagcgtgctgtggcaggacatgaaggagaccaacaccgagttcatcctgctgaacctgaccttccccgacaacttccccttcagcccccccttcatgagagtgctgagccccagactggagaacggctacgtgctggacggcggcgccatctgcatggagctgctgacccccagaggctggagcagcgcctacaccgtggaggccgtgatgagacagttcgccgccagcctggtgaagggccagggcagaatctgcagaaaggccggcaagagcaagaagagcttcagcagaaaggaggccgaggccaccttcaagagcctggtgaagacccacgagaagtacggctgggtgaccccccccgtgagcgacggctag

SEQ ID NO: 57304 - DNA, 486 bp, Artificial Sequence
  derived and/or modified sequence
atgaaagaactgcaggacattgccagactcagtgataggttcatctcagttgaactcgtcgacgaatctctgtttgattggaacgtaaagctccaccaagtggacaaggacagcgtcctctggcaagacatgaaggaaacaaataccgaattcattctgctgaacctaaccttccccgacaactttcctttctctccaccgtttatgcgcgtgcttagccctcggctggagaacggatacgttctcgacggcggcgctatttgcatggaactcctgacaccacgcggctggagttctgcgtacactgtggaggccgttatgagacagtttgccgcctctctcgtcaaagggcaagggcgtatatgtagaaaggctggcaagagtaagaagtcattctctcgcaaggaggccgaggcaacatttaaatctttggtaaagacccacgagaagtatggctgggtcaccccaccagtgagtgacggctag

SEQ ID NO: 57305 - DNA, 486 bp, Artificial Sequence
  derived and/or modified sequence
atgaaggagctgcaggacatcgcccggctgagtgaccgcttcatctctgtggagctggtggatgagagcctgtttgactggaatgtgaagctgcaccaggtggacaaggacagcgtgctgtggcaggacatgaaggagaccaacacagagttcatcctgctgaacctgaccttcccagacaacttccccttcagcccccccttcatgagggtgctgagcccccggctggagaatggctacgtgctggatggaggagccatctgcatggagctgctgaccccccggggctggagcagcgcctacacagtggaggccgtgatgaggcagtttgctgccagcctggtgaagggccagggccgcatctgcaggaaggccggcaagagcaagaagagcttcagcaggaaggaggccgaggccaccttcaagagcctggtgaagacccatgagaagtatggctgggtgaccccacctgtgtctgatggatag

SEQ ID NO: 57306 - DNA, 486 bp, Artificial Sequence
  derived and/or modified sequence
atgaaggagctgcaggacatcgcccggctgagcgaccggttcatctcggtggaattggtggatgagagcctgtttgattggaacgttaagctgcaccaggttgacaaggactcagtactctggcaggatatgaaagaaactaacactgaattcatacttctcaatctcacctttcccgacaactttcctttctcacctccattcatgcgggtccttagtccccgtctggagaatgggtatgtgctcgatggcggtgccatatgtatggagctgctaacaccccggggatggagcagtgcctacactgtagaggctgttatgcgtcagtttgcagcctccctggtcaaggggcagggccgaatctgccggaaggcgggtaaatcgaagaagtctttctcccgcaaggaagcggaagccacatttaagagtctcgtgaaaacccatgagaagtacggctgggtgacaccccctgtgtcggatggatag

SEQ ID NO: 57307 - DNA, 486 bp, Artificial Sequence
  derived and/or modified sequence
atgaaagaactccaggacattgcgcgactctcggacagatttatcagtgtcgaactagtagatgagagtctttttgactggaatgttaagcttcatcaggtcgacaaagactctgtgctgtggcaggatatgaaggaaactaatacagagtttatcctgctcaatttaaccttccctgataatttcccattcagcccaccttttatgcgggtgctgtcccctcgattagaaaatgggtacgtgctagacggtggagccatttgcatggagctgctgactccgagaggctggagtagtgcctacacagtcgaggcagttatgcgtcagttcgccgcttctttggtcaagggccaggggaggatttgtaggaaggctggaaagtcaaaaaagtctttcagccgtaaggaggccgaagctacttttaagtccctggtgaaaactcatgaaaaatacggctgggtgactccacctgtatcggatggatag

SEQ ID NO: 57308 - protein, 46 aa, Artificial Sequence
  derived and/or modified sequence
MCSLASGATGYSHLLKKHFHTVSLSISLILTAWFINMDLNFMDTLS

SEQ ID NO: 57309 - protein, 469 aa, Artificial Sequence
  derived and/or modified sequence
MCSLASGATGYSHLLKKHFHTVSLSISLILTAWFINMNPTVEYMNSIYNPVPWEKEEYLKPVLEDDLLLQFDVEDLYEPVSVPFSYPNGLSENTSVVEKLKHMEARALSAEAALARAREDLQKMKQFAQDFVMHTDVRTCSSSTSVIADLQEDEDGVYFSSYGHYGIHEEMLKDKIRTESYRDFIYQNPHIFKDKVVLDVGCGTGILSMFAAKAGAKKVLGVDQSEILYQAMDIIRLNKLEDTITLIKGKIEEVHLPVEKVDVIISEWMGYFLLFESMLDSVLYAKNKYLAKGGSVYPDICTISLVAVSDVNKHADRIAFWDDVYGFKMSCMKKAVIPEAVVEVLDPKTLISEPCGIKHIDCHTTSISDLEFSSDFTLKITRTSMCTAIAGYFDIYFEKNCHNRVVFSTGPQSTKTHWKQTVFLLEKPFSVKAGEALKGKVTVHKSKKDPRSLTVTLTLNNSTQTYGLQ

SEQ ID NO: 57310 - DNA, 141 bp, Artificial Sequence
  derived and/or modified sequence
atgtgcagcctggccagcggcgccaccggctacagccacctgctgaagaagcacttccacaccgtgagcctgagcatcagcctgatcctgaccgcctggttcatcaacatggacctgaacttcatggacaccctgagctag

SEQ ID NO: 57311 - DNA, 1410 bp, Artificial Sequence
  derived and/or modified sequence
atgtgcagcctggccagcggcgccaccggctacagccacctgctgaagaagcacttccacaccgtgagcctgagcatcagcctgatcctgaccgcctggttcatcaacatgaaccccaccgtggagtacatgaacagcatctacaaccccgtgccctgggagaaggaggagtacctgaagcccgtgctggaggacgacctgctgctgcagttcgacgtggaggacctgtacgagcccgtgagcgtgcccttcagctaccccaacggcctgagcgagaacaccagcgtggtggagaagctgaagcacatggaggccagagccctgagcgccgaggccgccctggccagagccagagaggacctgcagaagatgaagcagttcgcccaggacttcgtgatgcacaccgacgtgagaacctgcagcagcagcaccagcgtgatcgccgacctgcaggaggacgaggacggcgtgtacttcagcagctacggccactacggcatccacgaggagatgctgaaggacaagatcagaaccgagagctacagagacttcatctaccagaacccccacatcttcaaggacaaggtggtgctggacgtgggctgcggcaccggcatcctgagcatgttcgccgccaaggccggcgccaagaaggtgctgggcgtggaccagagcgagatcctgtaccaggccatggacatcatcagactgaacaagctggaggacaccatcaccctgatcaagggcaagatcgaggaggtgcacctgcccgtggagaaggtggacgtgatcatcagcgagtggatgggctacttcctgctgttcgagagcatgctggacagcgtgctgtacgccaagaacaagtacctggccaagggcggcagcgtgtaccccgacatctgcaccatcagcctggtggccgtgagcgacgtgaacaagcacgccgacagaatcgccttctgggacgacgtgtacggcttcaagatgagctgcatgaagaaggccgtgatccccgaggccgtggtggaggtgctggaccccaagaccctgatcagcgagccctgcggcatcaagcacatcgactgccacaccaccagcatcagcgacctggagttcagcagcgacttcaccctgaagatcaccagaaccagcatgtgcaccgccatcgccggctacttcgacatctacttcgagaagaactgccacaacagagtggtgttcagcaccggcccccagagcaccaagacccactggaagcagaccgtgttcctgctggagaagcccttcagcgtgaaggccggcgaggccctgaagggcaaggtgaccgtgcacaagagcaagaaggaccccagaagcctgaccgtgaccctgaccctgaacaacagcacccagacctacggcctgcagtag

SEQ ID NO: 57312 - DNA, 141 bp, Artificial Sequence
  derived and/or modified sequence
atgtgctctcttgccagtggggccaccggctactctcatctcttaaagaaacactttcacacagtgtctctgtctatctccctcatcctgactgcctggttcattaatatggatttgaatttcatggacacactctcctag

SEQ ID NO: 57313 - DNA, 1410 bp, Artificial Sequence
  derived and/or modified sequence
atgtgctccctggctagtggcgctacagggtattcccacttgcttaaaaagcattttcatactgttagcttgagtattagcctcatcctgacggcctggttcattaacatgaatccgacagtggaatacatgaactccatttacaaccccgtgccttgggagaaggaggaatatctgaagccagtgctggaagatgaccttctcctgcagttcgacgttgaagatctgtatgaaccagtgtccgtgccattcagttatccgaatggtctgtctgagaacacatcagtggttgaaaagctcaagcatatggaagcaagggcacttagtgcagaggcagccctggccagagccagagaagatctacagaaaatgaagcagttcgcacaggactttgtaatgcatacagacgtgaggacgtgtagctctagcacttcggtgatcgctgatctgcaagaagatgaggacggcgtgtacttttcaagctatggacattatggcatccacgaagagatgcttaaagacaagatccggacagagagctaccgcgattttatctaccagaatccgcacatattcaaggataaggtcgtgctggacgtgggctgcggcaccggcattctgagcatgtttgccgccaaggcaggggcaaagaaggtgcttggggttgaccagtccgagatcctgtatcaagccatggacattatccggctcaacaaacttgaggacacgatcacattgatcaaaggaaaaatcgaggaggtgcacctgccagtggagaaagtggatgtaattatttcagagtggatggggtacttccttcttttcgaatctatgctggactcagtactgtatgccaaaaacaagtatctggccaaaggtggttctgtctacccagacatttgcaccatttcacttgtggccgtatctgatgtgaacaagcacgctgatcgaattgccttttgggatgatgtttacggattcaaaatgtcatgcatgaaaaaggccgttatcccggaagccgtggtggaggtgcttgaccctaagaccctgatttccgagccttgcggcattaaacacatcgactgtcatactacttcgatcagtgacctcgagttctcatcagacttcacgctaaagatcacaaggacctccatgtgcactgctatcgctggatactttgatatctacttcgagaaaaattgtcataatcgcgtggtcttctccacaggacctcagtccactaaaacccactggaagcagaccgtgttcctgcttgagaaacccttcagtgtgaaagcaggtgaagccttgaagggcaaagtcactgttcacaaaagcaaaaaagaccctcgaagcctgaccgtgactttaacgcttaataattctacacaaacctatgggctccagtag

SEQ ID NO: 57314 - DNA, 141 bp, Artificial Sequence
  derived and/or modified sequence
atgtgcagcctggccagcggggccaccggctacagccacctgctgaagaagcacttccacacagtgtccctgagcatcagcctcatcctgacagcctggttcatcaacatggacctgaacttcatggacaccctgtcctag

SEQ ID NO: 57315 - DNA, 1410 bp, Artificial Sequence
  derived and/or modified sequence
atgtgcagcctggccagcggggccaccggctacagccacctgctgaagaagcacttccacacagtgtccctgagcatcagcctcatcctgacagcctggttcatcaacatgaaccccaccgtggagtacatgaacagcatctacaaccctgtgccctgggagaaggaggagtacctgaagcctgtgctggaggatgacctgctgctgcagtttgatgtggaggacctgtatgagcctgtgtctgtgcccttctcctaccccaacggcctgtctgagaacacctctgtggtggagaagctgaagcacatggaggcccgggccctgtctgctgaggccgccctggcccgggcccgggaggacctgcagaagatgaagcagtttgcccaggactttgtgatgcacacagatgtgaggacctgcagcagcagcacctctgtgattgctgacctgcaggaggatgaagatggagtgtacttcagcagctatggccactacggcatccacgaggagatgctgaaggacaagatcagaacagagagctacagagacttcatctaccagaacccccacatcttcaaggacaaggtggtgctggatgtgggctgcggcaccggcatcctgtccatgtttgctgccaaggccggggccaagaaggtgctgggcgtggaccagagcgagatcctgtaccaggccatggacatcatccggctgaacaagctggaggacaccatcaccctcatcaagggcaagattgaggaggtgcacctgcctgtggagaaggtggatgtgatcatcagcgagtggatgggctacttcctgctgtttgagagcatgctggacagcgtgctgtatgccaagaacaagtacctggccaagggcggctctgtgtacccagacatctgcaccatcagcctggtggccgtgtctgatgtgaacaagcatgctgaccgcatcgccttctgggatgatgtgtatggcttcaagatgagctgcatgaagaaggctgtgattcctgaggccgtggtggaggtgctggaccccaagaccctcatcagcgagccctgtggcatcaagcacatcgactgccacaccaccagcatcagtgacctggagttcagcagtgacttcaccctgaagatcaccaggacctccatgtgcacagccatcgccggctactttgacatctactttgagaagaactgccacaacagagtggtgttcagcacaggcccccagagcaccaagacccactggaagcagacagtgttcctgctggagaagcccttctctgtgaaggccggggaggccctgaagggcaaggtgacagtgcacaagagcaagaaggaccccaggagcctgactgtgaccctgaccctgaacaacagcacccagacctacggcctgcagtag

SEQ ID NO: 57316 - DNA, 141 bp, Artificial Sequence
  derived and/or modified sequence
atgtgcagcctggccagcggcgccaccggctacagccacctgctgaagaaacactttcatacagtctccttgtctatcagcttgatactgactgcttggttcattaacatggacttgaattttatggatacactaagttag

SEQ ID NO: 57317 - DNA, 1410 bp, Artificial Sequence
  derived and/or modified sequence
atgtgcagcctggccagcggcgccaccggctacagccacctgctgaaaaagcatttccacactgtctccctgtctattagcctgattctgacagcctggttcatcaacatgaacccaactgtggaatacatgaactctatatacaatcctgtaccctgggagaaagaagaataccttaaacccgtcctggaggacgacctcttgcttcagtttgacgtggaggacttatatgaacctgtcagcgtgcctttcagctaccctaacggcctttcagaaaatacaagcgttgttgagaaactaaagcacatggaggcacgtgcgctatctgctgaggcagccctggcccgggcccgcgaagacctgcagaagatgaaacagtttgcccaagatttcgttatgcacacggacgtgcggacctgctcttccagtacctccgtaatcgccgatctccaggaggacgaagacggggtgtacttctctagctacggtcactacggcatccatgaagagatgctgaaggataaaatccgcaccgaaagctacagagattttatttatcagaatcctcatattttcaaggacaaggtcgtcctggacgtggggtgcggaactggaatcttgtccatgtttgctgctaaggccggcgctaaaaaagtgttaggagtcgatcaatccgagattctttatcaggcaatggacatcatcagacttaataaattggaggacaccatcaccctcattaaaggcaagattgaggaggttcatttgccagtagagaaggtagatgttattatttcagagtggatgggttatttcctgctttttgagtccatgctggactctgtcttgtatgctaagaataagtacctcgccaaagggggatccgtgtatccggacatatgcaccattagcctcgtcgccgtctcggacgtcaacaaacacgctgacaggatcgctttctgggacgacgtatacggcttcaaaatgtcatgtatgaaaaaagcagttatccctgaagccgtggttgaagtgctggaccccaagaccctgatcagtgaaccctgcggaattaaacatatcgactgtcatacaacctctatctcagacctagaattttccagcgactttactttaaaaataactcgaacttccatgtgcacggcaattgccggctacttcgatatttattttgaaaagaactgccataatcgcgttgtcttcagtactggaccacagtctacaaagacgcactggaagcagacagtcttcctcctagaaaagcctttcagcgtgaaggcaggcgaggctctaaaggggaaagtcaccgtgcataagtcgaaaaaggatccccggtccctaactgttaccttaacgcttaataactcaacccagacttacggactgcagtag

SEQ ID NO: 57318 - DNA, 141 bp, Artificial Sequence
  derived and/or modified sequence
atgtgcagtctcgccagtggggctacaggatacagccatctgctcaagaaacattttcacacggtttctctgtccatctctcttatcctcacagcctggttcatcaacatggacctgaacttcatggacaccctctcttag

SEQ ID NO: 57319 - DNA, 1410 bp, Artificial Sequence
  derived and/or modified sequence
atgtgttcactggcgtcaggtgccactggctatagccacctgctgaagaagcattttcacactgtatcgttgtccatctcccttattttaactgcgtggttcataaacatgaatcccactgttgaatacatgaactcaatttacaatcctgtcccttgggagaaggaagagtacctgaaaccggtgctggaagacgatctgctgttacaattcgacgtggaggacctgtacgaacctgtgtctgtcccttttagttatcccaatggcctgagcgaaaatacatccgtcgtggagaagctgaaacacatggaagcccgagccttgagtgctgaggcagccctggccagggccagagaggacctccagaagatgaaacagtttgctcaagactttgtcatgcacaccgatgtgcgcacgtgtagctctagtacaagtgtcatcgcagatctccaagaagatgaagacggggtttacttttcgtcatacggccactatgggatacatgaggagatgttgaaagacaagataagaactgaaagctacagagactttatctatcagaatccacatattttcaaggacaaagtggtactcgatgtggggtgcggtacaggcatcttgagcatgttcgctgcaaaggctggcgctaaaaaggttctgggagtcgatcagtccgaaatcctatatcaggcgatggatataatcagactgaataagcttgaggataccatcaccctaattaagggtaaaattgaggaagtgcacctgccagtggagaaagtagacgtgatcatttcggaatggatggggtacttcttgctctttgagagcatgctagactcagtgctctatgcaaagaataagtatttggccaaaggaggcagtgtgtatcctgatatttgtactatttctctcgtcgccgtttcagacgtgaacaagcacgcggaccggatagcattctgggacgatgtctatgggtttaaaatgagctgcatgaagaaggccgtcatccccgaagcagttgtagaggttctggacccaaaaacactcatttcggagccttgcggtataaaacatatcgactgccacacaacttccattagtgatctagagtttagctccgattttaccctaaagataacaaggaccagcatgtgcaccgctatcgccggatatttcgatatatacttcgaaaagaactgccacaatcgcgtcgtcttcagcacaggtcctcagtccactaaaacgcactggaaacaaaccgtctttctcttagaaaaacccttttcagtcaaggctggagaggctctgaagggaaaagttacagtgcataagtctaagaaggacccgcgatcgctgacggttaccctgacccttaacaactccacgcaaacctacgggctgcagtag

SEQ ID NO: 57320 - DNA, 1736 bp, Artificial Sequence
  derived and/or modified sequence
agacacgccgggctctcggggcaccacagccatgtgctcgttagcgtcaggcgctaccggttattcacatctgctgaagaaacattttcacactgtaagtctgagcatcagtttaatattgacagcatggttcataaacatgaatcctacagttgagtacatgaattccatatacaacccagtgccttgggagaaagaagagtatttgaagccagtattagaagatgaccttttacttcaatttgatgtagaagatctttatgaaccggtgtcagtacccttctcataccccaatggactcagtgaaaatacatctgttgttgaaaaattgaaacatatggaagccagggcactgtctgctgaagccgcattggccagagcacgtgaggatctgcaaaaaatgaaacaatttgctcaggattttgtgatgcacacagatgtcagaacctgctcgtcatctactagtgtcattgcggacctccaggaggatgaggatggtgtttatttcagctcatacgggcattatgggatacatgaagaaatgctaaaggacaaaatacgaacagaaagctaccgagatttcatataccaaaatccacatatcttcaaagacaaggtagttttggatgttgggtgtggaactggaattctctctatgtttgctgctaaagctggggcgaagaaggttcttggagttgatcaatctgaaatactttaccaggcaatggatattataagactaaataaacttgaagatactattacactaattaaaggaaagattgaagaagttcatcttcctgtagaaaaagtagatgttatcatatctgagtggatgggctattttcttctgtttgagtctatgttagattctgtcctttatgcaaagaacaaatacttggcaaaaggaggctcggtctaccctgacatttgcactatcagccttgtagcagtgagtgatgtgaataaacatgctgatagaattgctttttgggatgatgtctatggcttcaagatgtcctgcatgaagaaagcagttattccagaagctgttgtggaagttttagatccgaagactcttatttcagaaccttgtggtattaagcatatagattgccatacgacgtctatctcagatttggaattttcatcagattttaccctgaaaatcacaaggacatccatgtgcacggcaattgctggctactttgatatatattttgagaagaattgccacaacagggtcgtgttctctacgggccctcagagcaccaaaacacactggaaacaaacagtatttctactggaaaaaccattttcagttaaagcaggtgaagccttgaaaggaaaggtcacagttcacaagagtaagaaagatccacgttctctcaccgtgaccctcacgttgaataattcaactcaaacttatggtctccagtgaaacagccataaaagcacactaccttgtagtttttaatgtgggggtagagtgggtcagcaggagggagctggttttatgtgagcagatggatggatgatggaccctttcctaatgagcctcctcaataagagagaagttctcattgtgggaatctgacatagttcagctgaggaagagaatcagctgatcctcatggtctgccacgtaatcattttcttagacgtttgctccaccagatttaaccaaatgtaactcccacattgagtttatctatattgaaaatcatttacattgg

SEQ ID NO: 57321 - protein, 691 aa, Artificial Sequence
  derived and/or modified sequence
MCFRTKLSVSWVPLFLLLSRVFSTETDKPSAQDSRSRGSSGQPADLLQVLSAGDHPPHNHSRSLIKTLLEKTGCPRRRNGMQGDCNLCFEPDALLLIAGGNFEDQLREEVVQRVSLLLLYYIIHQEEICSSKLNMSNKEYKFYLHSLLSLRQDEDSSFLSQNETEDILAFTRQYFDTSQSQCMETKTLQKKSGIVSSEGANESTLPQLAAMIITLSLQGVCLGQGNLPSPDYFTEYIFSSLNRTNTLRLSELDQLLNTLWTRSTCIKNEKIHQFQRKQNNIITHDQDYSNFSSSMEKESEDGPVSWDQTCFSARQLVEIFLQKGLSLISKEDFKQMSPGIIQQLLSCSCHLPKDQQAKLPPTTLEKYGYSTVAVTLLTLGSMLGTALVLFHSCEENYRLILQLFVGLAVGTLSGDALLHLIPQVLGLHKQEAPEFGHFHESKGHIWKLMGLIGGIHGFFLIEKCFILLVSPNDKQGLSLVNGHVGHSHHLALNSELSDQAGRGKSASTIQLKSPEDSQAAEMPIGSMTASNRKCKAISLLAIMILVGDSLHNFADGLAIGAAFSSSSESGVTTTIAILCHEIPHEMGDFAVLLSSGLSMKTAILMNFISSLTAFMGLYIGLSVSADPCVQDWIFTVTAGMFLYLSLVEMLPEMTHVQTQRPWMMFLLQNFGLILGWLSLLLLAIYEQNIKI

SEQ ID NO: 57322 - protein, 611 aa, Artificial Sequence [sequence omitted]

SEQ ID NO: 57323 - DNA, 2076 bp, Artificial Sequence
  derived and/or modified sequence
atgtgcttcagaaccaagctgagcgtgagctgggtgcccctgttcctgctgctgagcagagtgttcagcaccgagaccgacaagcccagcgcccaggacagcagaagcagaggcagcagcggccagcccgccgacctgctgcaggtgctgagcgccggcgaccaccccccccacaaccacagcagaagcctgatcaagaccctgctggagaagaccggctgccccagaagaagaaacggcatgcagggcgactgcaacctgtgcttcgagcccgacgccctgctgctgatcgccggcggcaacttcgaggaccagctgagagaggaggtggtgcagagagtgagcctgctgctgctgtactacatcatccaccaggaggagatctgcagcagcaagctgaacatgagcaacaaggagtacaagttctacctgcacagcctgctgagcctgagacaggacgaggacagcagcttcctgagccagaacgagaccgaggacatcctggccttcaccagacagtacttcgacaccagccagagccagtgcatggagaccaagaccctgcagaagaagagcggcatcgtgagcagcgagggcgccaacgagagcaccctgccccagctggccgccatgatcatcaccctgagcctgcagggcgtgtgcctgggccagggcaacctgcccagccccgactacttcaccgagtacatcttcagcagcctgaacagaaccaacaccctgagactgagcgagctggaccagctgctgaacaccctgtggaccagaagcacctgcatcaagaacgagaagatccaccagttccagagaaagcagaacaacatcatcacccacgaccaggactacagcaacttcagcagcagcatggagaaggagagcgaggacggccccgtgagctgggaccagacctgcttcagcgccagacagctggtggagatcttcctgcagaagggcctgagcctgatcagcaaggaggacttcaagcagatgagccccggcatcatccagcagctgctgagctgcagctgccacctgcccaaggaccagcaggccaagctgccccccaccaccctggagaagtacggctacagcaccgtggccgtgaccctgctgaccctgggcagcatgctgggcaccgccctggtgctgttccacagctgcgaggagaactacagactgatcctgcagctgttcgtgggcctggccgtgggcaccctgagcggcgacgccctgctgcacctgatcccccaggtgctgggcctgcacaagcaggaggcccccgagttcggccacttccacgagagcaagggccacatctggaagctgatgggcctgatcggcggcatccacggcttcttcctgatcgagaagtgcttcatcctgctggtgagccccaacgacaagcagggcctgagcctggtgaacggccacgtgggccacagccaccacctggccctgaacagcgagctgagcgaccaggccggcagaggcaagagcgccagcaccatccagctgaagagccccgaggacagccaggccgccgagatgcccatcggcagcatgaccgccagcaacagaaagtgcaaggccatcagcctgctggccatcatgatcctggtgggcgacagcctgcacaacttcgccgacggcctggccatcggcgccgccttcagcagcagcagcgagagcggcgtgaccaccaccatcgccatcctgtgccacgagatcccccacgagatgggcgacttcgccgtgctgctgagcagcggcctgagcatgaagaccgccatcctgatgaacttcatcagcagcctgaccgccttcatgggcctgtacatcggcctgagcgtgagcgccgacccctgcgtgcaggactggatcttcaccgtgaccgccggcatgttcctgtacctgagcctggtggagatgctgcccgagatgacccacgtgcagacccagagaccctggatgatgttcctgctgcagaacttcggcctgatcctgggctggctgagcctgctgctgctggccatctacgagcagaacatcaagatctag

SEQ ID NO: 57324 - DNA, 1836 bp, Artificial Sequence
  derived and/or modified sequence
atgcagggcgactgcaacctgtgcttcgagcccgacgccctgctgctgatcgccggcggcaacttcgaggaccagctgagagaggaggtggtgcagagagtgagcctgctgctgctgtactacatcatccaccaggaggagatctgcagcagcaagctgaacatgagcaacaaggagtacaagttctacctgcacagcctgctgagcctgagacaggacgaggacagcagcttcctgagccagaacgagaccgaggacatcctggccttcaccagacagtacttcgacaccagccagagccagtgcatggagaccaagaccctgcagaagaagagcggcatcgtgagcagcgagggcgccaacgagagcaccctgccccagctggccgccatgatcatcaccctgagcctgcagggcgtgtgcctgggccagggcaacctgcccagccccgactacttcaccgagtacatcttcagcagcctgaacagaaccaacaccctgagactgagcgagctggaccagctgctgaacaccctgtggaccagaagcacctgcatcaagaacgagaagatccaccagttccagagaaagcagaacaacatcatcacccacgaccaggactacagcaacttcagcagcagcatggagaaggagagcgaggacggccccgtgagctgggaccagacctgcttcagcgccagacagctggtggagatcttcctgcagaagggcctgagcctgatcagcaaggaggacttcaagcagatgagccccggcatcatccagcagctgctgagctgcagctgccacctgcccaaggaccagcaggccaagctgccccccaccaccctggagaagtacggctacagcaccgtggccgtgaccctgctgaccctgggcagcatgctgggcaccgccctggtgctgttccacagctgcgaggagaactacagactgatcctgcagctgttcgtgggcctggccgtgggcaccctgagcggcgacgccctgctgcacctgatcccccaggtgctgggcctgcacaagcaggaggcccccgagttcggccacttccacgagagcaagggccacatctggaagctgatgggcctgatcggcggcatccacggcttcttcctgatcgagaagtgcttcatcctgctggtgagccccaacgacaagcagggcctgagcctggtgaacggccacgtgggccacagccaccacctggccctgaacagcgagctgagcgaccaggccggcagaggcaagagcgccagcaccatccagctgaagagccccgaggacagccaggccgccgagatgcccatcggcagcatgaccgccagcaacagaaagtgcaaggccatcagcctgctggccatcatgatcctggtgggcgacagcctgcacaacttcgccgacggcctggccatcggcgccgccttcagcagcagcagcgagagcggcgtgaccaccaccatcgccatcctgtgccacgagatcccccacgagatgggcgacttcgccgtgctgctgagcagcggcctgagcatgaagaccgccatcctgatgaacttcatcagcagcctgaccgccttcatgggcctgtacatcggcctgagcgtgagcgccgacccctgcgtgcaggactggatcttcaccgtgaccgccggcatgttcctgtacctgagcctggtggagatgctgcccgagatgacccacgtgcagacccagagaccctggatgatgttcctgctgcagaacttcggcctgatcctgggctggctgagcctgctgctgctggccatctacgagcagaacatcaagatctag

SEQ ID NO: 57325 - DNA, 2076 bp, Artificial Sequence
  derived and/or modified sequence
atgtgcttcaggaccaagctaagtgtctcatgggtccctttgttccttctgttatccagggtcttcagtacggaaactgacaagcccagtgcccaggattcgaggtcgaggggcagcagcgggcagccagcagacctgttgcaagtgctgtcagctggcgaccaccctccacacaaccattcgagaagcctgattaagaccctgctggaaaaaaccggatgccccagacggcggaacggaatgcaaggagactgcaacttgtgttttgagcctgacgccctattactcatagctggaggcaactttgaggatcagctgcgagaagaagtcgtgcaaagggtaagcctcctgctgctgtattatatcatacatcaggaagaaatatgtagctctaagcttaacatgtcaaacaaggagtacaaattctatcttcattccctgctgagtctgagacaggatgaggattctagttttttgtcgcagaacgaaaccgaagacatcttggccttcacaagacaatacttcgacacttctcagagtcagtgcatggagactaagaccctccaaaagaaaagtggcattgtgtctagcgagggagcaaatgagtccacattaccccaattagccgctatgatcatcacactcagcctgcagggagtgtgtctcggacagggaaacctgccttctcccgactatttcactgagtacattttttcttccctgaacaggacaaacactttgcgtttgagcgaattggatcagcttctgaacactctttggaccagatccacttgtataaaaaacgaaaaaattcatcagtttcagcggaagcaaaacaatatcattacccatgatcaagattactctaatttctcttcatccatggaaaaggagtccgaagacggacccgtgagctgggaccagacttgtttttcggctagacagctggttgaaatcttcctgcagaagggcctgagcctcataagtaaggaagattttaaacaaatgtccccaggaatcattcagcaactcctgagctgctcatgccatttacctaaggaccaacaggcgaagctccccccaacgactcttgagaaatatggttactctaccgtggccgtgaccctgttgaccctgggctccatgttgggcactgctcttgtgttgtttcattcatgcgaagagaactaccggctgatcctgcaactcttcgtcggactcgccgtgggcacactgagcggcgatgccctgctgcacctcataccccaggtgctgggcctccataaacaggaagcccctgagttcgggcactttcacgagagcaagggccatatttggaagctaatgggcttgatcggcggtattcatggcttcttcttgattgaaaaatgtttcatactgctggttagtcccaatgataagcagggtttgagcttggtgaatggacacgttgggcatagtcaccacttggcattgaactcagagttgagtgaccaagccggaaggggcaaatcagctagcacaattcagcttaaatcacccgaggatagtcaagcagctgaaatgccgattgggagcatgactgcgagtaaccgcaaatgtaaagctatctcactccttgccattatgattttggtgggagatagcctgcacaacttcgccgacggtctcgctatcggggcagctttctcatctagctcagagagcggcgtcactacaactatcgcaatcctgtgtcatgaaatccctcatgaaatgggtgactttgccgtgctcctgagttcaggactctccatgaagacagccattctgatgaacttcatctcatctctgactgccttcatgggattgtatataggactttcagtgtccgctgatccatgcgtccaggactggatcttcacggtcacagctggtatgttcttatatctttccctggtcgagatgctcccagaaatgacccatgtccaaactcaacggccgtggatgatgttcctcctgcagaactttggcttgatattgggatggctttcccttttactgctggctatttatgaacaaaatataaagatctag

SEQ ID NO: 57326 - DNA, 1836 bp, Artificial Sequence
  derived and/or modified sequence
atgcagggtgattgcaacttgtgttttgaaccagatgccttactcctcattgcaggtggcaactttgaagaccagcttcgcgaagaggtggttcagcgagtgagtctgctcctattatactatattattcaccaggaagaaatctgttcttccaaacttaatatgtctaacaaggagtacaaattctatcttcactcactgcttagcttgcggcaggatgaggactcaagctttctgtcccagaatgaaacagaggatatcctggcctttacccgtcagtactttgataccagccaatcccagtgtatggagaccaaaactctccagaagaagtccggcatcgtgtctagcgagggagccaatgagagtaccctgccccaactggcagccatgatcatcaccctctctttgcagggcgtctgtctgggacaaggcaaccttccaagtccagattacttcactgagtacatctttagctctctgaacagaactaacaccctcagattaagtgaacttgatcaactgctgaatacgctatggacccgaagcacatgcatcaagaacgagaaaatacaccagttccaacggaaacagaataatatcataacccacgaccaggactatagcaatttctcttcgagtatggaaaaggagagtgaagatgggccagtcagttgggatcagacatgtttctcagcacggcagctggtcgagatcttcctccagaagggcttaagcttgataagcaaagaggatttcaagcagatgtccccagggataattcagcagttactctcctgctcatgtcacctgcccaaagaccagcaggccaagttacctccaaccaccctggagaagtacgggtactcgacggtcgctgttactttactaaccctggggtccatgctgggcactgccctggtgctgtttcattcatgcgaagaaaattaccggttgatactccagcttttcgtgggattggcagtgggtacactgtcaggagatgctctgctccatctgatcccacaggttctaggtctccacaaacaggaagcacccgagtttggccattttcacgagtccaaaggtcatatttggaagctaatgggattgataggaggcattcatggcttcttcttgatcgagaaatgtttcatacttctcgtgtctccgaatgataagcagggcctgtccctggtcaacggccatgttgggcattctcaccacttagcgcttaactctgaactctcagaccaagctggccgcgggaagtcagcgtcaacgatccagctcaaaagtccggaggactctcaggcagccgaaatgcctatcggaagcatgaccgcctccaatcgcaagtgcaaggcaatttctctgttagccataatgatcctcgtgggagactccttacacaactttgcagatggcctagcaataggagcagctttcagctccagtagtgaaagcggcgtgaccacaacaattgctatcttatgtcacgaaataccacacgaaatgggggatttcgctgtccttcttagctctggcttatcaatgaagaccgcaatcttgatgaactttatctcttcactcactgcctttatgggactttatatcggcctcagtgtatcagccgatccttgcgtgcaggattggattttcaccgttactgcaggtatgttcctctatctgagcctcgtcgagatgctgcctgaaatgacgcacgtgcagacgcaacggccttggatgatgtttcttctgcagaatttcggtctcatcctgggctggctaagcctgctgcttctagccatttatgagcagaatattaaaatttag

SEQ ID NO: 57327 - DNA, 2076 bp, Artificial Sequence
  derived and/or modified sequence
atgtgcttccgcaccaagctgtctgtgtcctgggtgcccctcttcctgctgctgagcagggtcttcagcacagaaacagacaagcccagcgcccaggacagccgcagccggggcagcagcggccagcctgctgacctgctgcaggtgctgtctgctggggaccaccccccccacaaccacagccgcagcctcatcaagaccctgctggagaagacaggctgccccaggagaagaaatggcatgcagggcgactgcaacctgtgctttgagccagatgccctgctgctgattgctgggggcaactttgaggaccagctgcgggaggaggtggtgcagagggtgtccctgctgctgctgtactacatcatccaccaggaggagatctgcagcagcaagctgaacatgagcaacaaggagtacaagttctacctgcacagcctgctgagcctgcggcaggatgaggacagcagcttcctgagccagaatgaaacagaggacatcctggccttcacccggcagtactttgacaccagccagagccagtgcatggagaccaagaccctgcagaagaagagcggcatcgtgtcctctgagggcgccaatgaaagcaccctgccccagctggccgccatgatcatcaccctgagcctgcagggcgtgtgcctgggccagggcaacctgcccagcccagactacttcacagagtacatcttcagcagcctgaacagaaccaacaccctgcggctgtctgagctggaccagctgctgaacaccctgtggaccaggagcacctgcatcaagaatgagaagatccaccagttccagaggaagcagaacaacatcatcacccatgaccaggactacagcaacttcagcagctccatggagaaggagagtgaagatggccctgtgtcctgggaccagacctgcttcagcgcccggcagctggtggagatcttcctgcagaagggcctgagcctcatcagcaaagaagacttcaagcagatgagccctggcatcatccagcagctgctgagctgcagctgccacctgcccaaggaccagcaggccaagctgccccccaccaccctggagaagtatggctacagcacagtggccgtgaccctgctgaccctgggctccatgctgggcacagccctggtgctcttccacagctgtgaggagaactaccgcctcatcctgcagctgtttgtgggcctggccgtgggcaccctgtctggagatgccctgctgcacctgatcccccaggtgctgggcctgcacaagcaggaggcccctgagtttggccacttccacgagagcaagggccacatctggaagctgatgggcctcatcggcggcatccacggcttcttcctgattgagaagtgcttcatcctgctggtgagccccaatgacaagcagggcctgagcctggtgaatggacatgtgggccacagccaccacctggccctgaacagcgagctgagtgaccaggccggccggggcaagagcgccagcaccatccagctgaagagccctgaggacagccaggccgctgagatgcccatcggctccatgacagccagcaacaggaagtgcaaggccatcagcctgctggccatcatgatcctggtgggggacagcctgcacaactttgctgatggcctggccatcggggccgccttcagcagcagcagcgagagcggcgtgaccaccaccatcgccatcctgtgccacgagatcccccatgagatgggagactttgctgtgctgctgagcagcggcctgtccatgaagacagccatcctgatgaacttcatcagcagcctgacagccttcatgggcctgtacatcggcctgtctgtgtctgctgacccctgtgtgcaggactggatcttcaccgtgacagctggcatgttcctgtacctgagcctggtggagatgctgcctgagatgacccacgtgcagacccagaggccctggatgatgttcctgctgcagaactttggcctcatcctgggctggctgagcctgctgctgctggccatctatgagcagaacatcaagatctag

SEQ ID NO: 57328 - DNA, 1836 bp, Artificial Sequence
  derived and/or modified sequence
atgcagggcgactgcaacctgtgctttgagccagatgccctgctgctgattgctgggggcaactttgaggaccagctgcgggaggaggtggtgcagagggtgtccctgctgctgctgtactacatcatccaccaggaggagatctgcagcagcaagctgaacatgagcaacaaggagtacaagttctacctgcacagcctgctgagcctgcggcaggatgaggacagcagcttcctgagccagaatgaaacagaggacatcctggccttcacccggcagtactttgacaccagccagagccagtgcatggagaccaagaccctgcagaagaagagcggcatcgtgtcctctgagggcgccaatgaaagcaccctgccccagctggccgccatgatcatcaccctgagcctgcagggcgtgtgcctgggccagggcaacctgcccagcccagactacttcacagagtacatcttcagcagcctgaacagaaccaacaccctgcggctgtctgagctggaccagctgctgaacaccctgtggaccaggagcacctgcatcaagaatgagaagatccaccagttccagaggaagcagaacaacatcatcacccatgaccaggactacagcaacttcagcagctccatggagaaggagagtgaagatggccctgtgtcctgggaccagacctgcttcagcgcccggcagctggtggagatcttcctgcagaagggcctgagcctcatcagcaaagaagacttcaagcagatgagccctggcatcatccagcagctgctgagctgcagctgccacctgcccaaggaccagcaggccaagctgccccccaccaccctggagaagtatggctacagcacagtggccgtgaccctgctgaccctgggctccatgctgggcacagccctggtgctcttccacagctgtgaggagaactaccgcctcatcctgcagctgtttgtgggcctggccgtgggcaccctgtctggagatgccctgctgcacctgatcccccaggtgctgggcctgcacaagcaggaggcccctgagtttggccacttccacgagagcaagggccacatctggaagctgatgggcctcatcggcggcatccacggcttcttcctgattgagaagtgcttcatcctgctggtgagccccaatgacaagcagggcctgagcctggtgaatggacatgtgggccacagccaccacctggccctgaacagcgagctgagtgaccaggccggccggggcaagagcgccagcaccatccagctgaagagccctgaggacagccaggccgctgagatgcccatcggctccatgacagccagcaacaggaagtgcaaggccatcagcctgctggccatcatgatcctggtgggggacagcctgcacaactttgctgatggcctggccatcggggccgccttcagcagcagcagcgagagcggcgtgaccaccaccatcgccatcctgtgccacgagatcccccatgagatgggagactttgctgtgctgctgagcagcggcctgtccatgaagacagccatcctgatgaacttcatcagcagcctgacagccttcatgggcctgtacatcggcctgtctgtgtctgctgacccctgtgtgcaggactggatcttcaccgtgacagctggcatgttcctgtacctgagcctggtggagatgctgcctgagatgacccacgtgcagacccagaggccctggatgatgttcctgctgcagaactttggcctcatcctgggctggctgagcctgctgctgctggccatctatgagcagaacatcaagatctag

SEQ ID NO: 57329 - DNA, 2076 bp, Artificial Sequence
  derived and/or modified sequence
atgtgcttccggaccaagctgagcgtgagctgggtgcccctgttcctgttactgagtagggtcttctctacggaaaccgacaaacccagcgcccaggattccagaagtagaggaagcagcggccaacccgcagaccttttacaagtgctgtctgctggagatcatcctccccataaccatagccggtccctgatcaagacgcttttagaaaaaaccggatgtcccagaagaagaaacggaatgcaaggagactgtaacttgtgcttcgagcccgacgctctgctactcattgccggggggaacttcgaagatcagttgagggaggaggtggtgcagcgtgtctctctgctccttctctattatattatacaccaggaggaaatttgttcttcaaagctgaatatgtctaacaaagagtataagttctacctgcatagtctgcttagtctgcgccaagatgaggatagctcgtttctgtcccagaacgagacggaagacatactcgcattcaccagacagtactttgacacaagccaatctcaatgcatggagaccaagactcttcagaagaaatccggaatcgtaagctctgagggtgccaacgagtctacactgcctcagctcgcggccatgatcattacgctcagcctgcagggcgtttgtctcggtcagggaaacctgccgagccctgattacttcacagaatatattttctcctcgctgaacagaacaaacacactaaggttaagtgagctggaccagctgttgaatacgctgtggacaaggagtacttgtatcaagaatgagaagatccatcaattccagcgtaaacagaataatatcattacacacgatcaggattactctaacttctctagttccatggagaaagaaagcgaggatggaccagtcagttgggatcagacctgcttcagcgcacgccaactggtggagatctttcttcaaaaggggctaagcctgatctctaaggaggactttaaacaaatgtcccccgggatcatccagcaactcctaagttgttcttgccacctccctaaggatcagcaggcaaagttgccacccaccacgctggagaagtacggctattccaccgtggcagtgacgctgctcacactgggctctatgctggggacagccctggtactgtttcatagctgcgaagaaaactacaggctcattcttcagctattcgtcggtctagcggtcggcactctgtcaggcgatgctctcctgcacctgatcccacaggtacttggcctccacaaacaggaggcaccggagtttgggcacttccatgaatcgaagggccatatatggaagctgatgggcttgattggaggtatccacggctttttccttatagagaagtgctttattctcttagtgtctccaaacgacaagcagggactgtctttggtgaacgggcacgtcggacactcacaccacctcgctctgaattccgagttgagtgaccaggccggccgcgggaagtccgctagcaccatccaactgaagtctccagaggatagccaggccgctgagatgccaatcgggtctatgaccgccagcaaccgcaaatgcaaagcgattagtctcctagccatcatgattctggtgggggacagcctgcataactttgccgatggactggcaatcggcgctgcattcagcagttcatctgaaagcggggttacgacaaccatagctatcctctgccacgaaataccacacgaaatgggggactttgcggtactactttcaagcggcctgtctatgaaaactgctatcctgatgaacttcatttcttcactgactgcttttatggggctatatatcgggctgtcggtgagcgccgacccctgcgtccaggactggatctttactgtgacagcaggcatgtttttgtacctgagcttggtcgagatgctgcccgaaatgacccatgtgcaaactcagcgaccatggatgatgtttctcctccagaattttggtctcatacttggatggctgagcttgctccttctagcaatctacgaacaaaatatcaaaatttag

SEQ ID NO: 57330 - DNA, 1836 bp, Artificial Sequence
  derived and/or modified sequence
atgcagggcgactgcaacctgtgcttcgagcccgacgccctgctgctcatagctgggggaaacttcgaggaccagctccgcgaggaggtcgtgcagcgagttagcttgctgctgctgtactatattatccatcaggaagagatttgtagctccaaacttaatatgtccaataaggagtacaagttttacttgcattcactgctctcacttaggcaggacgaagactcgtctttcctgtctcaaaacgaaactgaggacatcctggccttcacgcgccagtatttcgacactagccagagccagtgcatggaaacaaagaccctgcaaaagaaaagtggaattgtaagcagtgaaggagccaacgagagcactctgcctcagctcgccgcaatgataattactctctctctgcaaggagtctgtctcggacaggggaacctgccatcgcctgactactttactgaatacatattttcttcccttaatcgtactaataccttgcgcctgagtgaactggatcagctgcttaacacactttggacacgcagtacctgcattaagaatgagaaaatccatcagtttcaacgaaaacagaacaacattataactcacgaccaggattacagcaatttctccagctccatggaaaaagagagtgaagacggaccagtgtcatgggaccagacgtgcttctccgctaggcagctggtggaaatattcctccagaaaggcctgtctcttatcagcaaggaggactttaaacaaatgtcaccagggatcatccaacagctgttgtcttgctcttgccatctccctaaagaccaacaagctaaattgcccccaactacgctggaaaaatatgggtacagcacggtcgccgtgactcttctcacactgggaagtatgctgggaactgcattggtcctgttccactcttgtgaggaaaactaccgcctgatcctccagttgtttgtcggactggccgtcggcaccctgtctggtgacgccctgctgcacctcatcccacaagtactggggctgcataagcaggaagcccccgaatttggacattttcacgagtcaaaaggccatatctggaaactaatggggctcattgggggcatacacggctttttcctgattgagaagtgttttattctgctggtttcccccaacgacaaacaggggctcagtctagttaacggtcacgtaggccattctcaccacctggccttaaacagtgaactaagtgatcaggcagggagagggaaatccgcaagcacaatccagctgaagagccctgaggactcccaggcagctgagatgccaataggctccatgaccgctagtaaccgaaaatgtaaagcaatctccttactcgcaatcatgatcctagtgggcgactcactgcacaacttcgccgatggacttgccataggcgcagccttcagtagttcctccgagtcgggcgtcaccaccactattgccattctgtgtcatgagattccccacgagatgggcgactttgcagtccttctgtcttcaggcttgagcatgaagacagctatccttatgaatttcatcagctcgctaaccgccttcatgggtctatatatcggcctgagcgtgtccgccgatccgtgcgtccaggactggattttcacagtgaccgccggcatgttcctgtacctctctcttgttgagatgctacctgagatgacccatgtccagactcagcggccctggatgatgttcctgctgcagaacttcggtctgattttgggctggctttccttgctgctactggctatttacgaacagaacattaagatttag

SEQ ID NO: 57331 - DNA, 2076 bp, Artificial Sequence
  derived and/or modified sequence
atgtgcttccgaacaaaactgagtgtgtcttgggtcccactcttcctgctgctatctcgcgttttttctacagaaacagataagccgagcgcccaggacagccgttcccgcggaagtagcgggcagcccgctgaccttctgcaagtgctgagtgcgggagaccacccccctcataatcacagtagaagtcttattaagaccctgctggaaaaaaccggatgcccccgtagaagaaacgggatgcagggcgactgtaacctctgctttgaaccagatgccctgctgcttattgcaggcggtaatttcgaagaccaacttcgggaggaggtggtgcagcgcgtcagccttttgctgctttactacatcatccaccaggaggagatatgctctagtaagttgaatatgtccaacaaggaatacaagttctacctgcactcactgttgtcccttaggcaggatgaggactcgagctttctctcacagaacgaaacagaggacatacttgcctttacccggcagtacttcgatacctcgcaatcgcagtgtatggagactaagaccctgcagaaaaagtcagggatcgttagcagcgagggcgcaaatgagtcaacactgccccagttagccgctatgatcatcactctcagtcttcagggagtttgcttgggacagggaaatcttccatccccagattattttacagaatacattttctcctctctgaataggacaaacaccctgcggttatccgaattggatcagctgcttaataccttgtggaccaggtcgacctgtattaaaaacgaaaagatccatcagtttcagcgaaagcagaataatattatcacccacgaccaagactattcgaacttctcctccagtatggaaaaagagagcgaggatgggccagtctcctgggaccagacctgtttctccgccagacagctggtggaaattttcctgcagaagggtctgtcactgatctccaaagaggacttcaaacagatgtcacccggtataattcagcagctcctgtcttgcagctgtcacctccccaaagaccaacaagctaaactgcccccaacaaccttggagaaatacggctactccacagttgctgttaccttgcttacattggggagtatgttgggcacggccttggtcctgttccacagctgtgaggaaaattaccggcttatactccagctgttcgtggggttagccgtcggtacactctcgggggacgccctgttgcatttaatcccgcaggttctgggattacataagcaagaagccccagagtttggccatttccacgaatctaaagggcacatatggaagctcatgggtctaatcgggggtatccatggctttttcttaatagaaaagtgctttattctgttggtttcccccaacgacaaacagggtctcagtctggtgaacgggcacgtggggcatagtcaccacttagccttgaattcagagctgagtgatcaggcaggtcggggtaagagcgccagcaccattcaactgaaatctcccgaagattctcaagcagctgagatgccaatcgggtcaatgacagccagtaatcgtaaatgcaaagccatttctctcctggccatcatgattctggtaggcgactctctgcacaacttcgcagatggtctggcaattggcgcagcgttctcctcctctagtgaaagtggtgttacaaccactattgccatcctgtgtcacgaaatcccacatgagatgggagactttgccgtcctactttcctcaggactttccatgaaaacagctatcctcatgaactttattagcagccttacggcgttcatgggtctttacataggcctttccgtgagcgctgatccgtgcgtgcaagactggatcttcacagtcacagctggaatgtttctgtacctctccctagttgagatgttgccagagatgactcacgttcaaacacagagaccatggatgatgttccttttacaaaattttggtctcatccttggctggctttcgctgctgctgctcgctatctatgagcagaatataaaaatctag

SEQ ID NO: 57332 - DNA, 1836 bp, Artificial Sequence
  derived and/or modified sequence
atgcaaggggactgtaatctctgttttgagcccgatgcgctgctgctgatcgctggtggcaacttcgaggaccaactccgggaagaagtagttcaacgcgtcagcctgctccttctgtattatattatccaccaggaggaaatctgctcctccaagctgaatatgagtaacaaggagtacaagttttatctgcacagcttactttccttgcggcaggacgaggattcttcattccttagccagaatgagaccgaggacatcctggccttcactcgacagtatttcgatacctctcagagccagtgtatggaaacaaaaacgctccagaagaagtccggaattgtgtccagcgaaggtgcaaatgaaagcaccctgccccagctggcagctatgataatcacacttagtttgcagggcgtatgtctgggccagggtaatctcccctctccggactatttcacggaatacatattctcttcgctcaatcgaacaaacactctgagactgtcagaacttgatcagctgcttaacaccttgtggacccgatccacgtgtatcaagaatgaaaaaattcaccagtttcagagaaagcagaataacatcatcacccacgatcaagactattccaatttttcttcaagcatggagaaagaatctgaagatggccctgtctcatgggatcagacttgtttttccgccaggcaacttgttgaaatcttcttacaaaaaggcttatcgctaatctctaaggaagactttaagcaaatgagccccggtataatacagcagctattgagctgctcgtgccaccttcccaaggaccagcaggctaaacttcctcctaccacgctcgagaagtatggttactcaaccgtagcagtgactctgctcactctgggatccatgctcggtacagcccttgtcctgttccacagttgcgaggaaaattacaggctgattctgcagttgttcgttggtctggccgtgggtacgctgagtggagatgccctactgcatttaatcccacaggtgctcgggctgcacaagcaagaggctcctgaatttggccatttccacgaaagtaagggccacatttggaaattgatggggctgattggtgggatccacggattctttctgatcgaaaagtgcttcattcttcttgtgtccccaaacgataagcaggggctgtcactggttaatggccatgttggccatagccaccacctggcgctgaatagcgagctgagtgaccaagctgggaggggcaagagtgcctcaacaatacagctgaagagtcctgaggacagccaagcggcagagatgcctatcggtagtatgacggcgagcaaccggaagtgtaaagccatttctctcctagccatcatgatactagtgggcgacagcctgcacaatttcgcagacggattagctattggcgctgctttctcttccagtagtgaatctggggtcactaccaccatcgccatcctctgtcacgagattccccatgagatgggggattttgctgtcttgctaagttcaggtctaagtatgaagaccgccattctgatgaacttcatcagctccctcaccgcttttatgggcctgtacataggactctcagtgagcgcggacccctgcgtgcaggactggatcttcacagttaccgcgggtatgttcctctacctgtcactggtagaaatgctccccgaaatgactcatgtgcagacacaacgcccatggatgatgttccttctgcagaattttggcctgatcctggggtggctttctcttctgctgctggccatttacgagcaaaacattaagatatag

SEQ ID NO: 57333 - DNA, 2808 bp, Artificial Sequence
  derived and/or modified sequence
ttgttaccttcagagcagctctctccatagcaactgaaaacttttctgggctgaaataatcctctctagctcccagtgcacagtcaaagaattttaaaaacagggaactttgtaactgtgaaatactctccaggatttaaaaggctgtggagctccagataaagaatcgtttatctttcttctgaagaaattcctttggttacaagtttaccccataaacggcaacacactcacctccatccaagacagactcaaggtggaggaagcgtggaaatgtgcttccggacaaagctctcagtatcctgggtgccattgtttcttctactcagccgtgttttttctactgagacagacaaaccctcagcccaggatagcagaagccgtgggagttcaggccaaccggcagacctgctacaggttctctctgctggtgaccacccaccccacaaccactcaagaagcctcatcaaaacattgttggagaaaactgggtgcccacggaggagaaacggaatgcaaggagattgcaatctgtgctttgaaccagatgcactattactaatagctggaggaaattttgaagatcagcttagagaagaagtggtccagagagtttctcttctccttctctattacattattcatcaggaagagatctgttcttcaaagctcaacatgagtaataaagagtataaattttacctacacagcctactgagcctcaggcaggatgaagattcctctttcctttcacagaatgagacagaagatatcttggctttcaccaggcagtactttgacacttctcaaagccagtgtatggaaaccaaaacgctgcagaaaaaatctggaatagtgagcagtgaaggtgctaatgaaagtacgcttcctcagttggcagccatgatcattactttgtccctccagggtgtttgtctgggacaaggaaacttgccttccccagactactttacagaatatattttcagttccttgaatcgtacgaataccctccgcctatcagaactagaccaactcctcaacactctctggaccagaagtacttgtatcaaaaatgagaaaatccatcaatttcaaaggaaacaaaacaacataataacccatgatcaggactattctaatttctcttcatccatggaaaaagagtctgaggatggtccagtttcctgggatcagacctgcttctctgctaggcagctggtggagatatttctacagaagggcctctcactcatttctaaggaggactttaagcaaatgagtccagggatcatccagcagctcctcagctgctcctgccacttacccaaggaccaacaagcaaagctgccacctaccactctggagaaatacggctacagcacggtggctgtcacccttctcacactgggctccatgctggggacagcgctggtccttttccatagctgtgaggagaactacaggcttatcttacagctgtttgtgggcttggccgtcgggacactgtctggggacgctctgctccaccttatccctcaggttcttggtttacataagcaggaagccccagaatttgggcatttccatgaaagcaaaggtcatatttggaaactgatgggattaattggaggcatccatggatttttcttgatagaaaaatgttttattcttcttgtatcaccaaatgacaagcagggcctgtcattggttaatgggcacgtgggtcattcccaccatcttgcactcaactctgaattaagtgaccaggcaggcagaggcaaatctgcttcaactatccagttgaaaagcccagaagattcacaggcagctgaaatgcctataggcagtatgacagcctccaacagaaaatgtaaagccattagcttgttagcaatcatgattctggttggggacagcctgcataattttgcagatggcctagccataggagcagccttctcatcatcatccgagtcaggagtgaccactacgattgctatcttgtgtcatgaaatcccacatgaaatgggagactttgccgtgctcttaagctctggactttctatgaagactgccatcctgatgaattttataagctccctaactgccttcatgggattatacattggcctttccgtgtcagctgatccatgtgttcaagactggatcttcacagtcactgctgggatgttcttatatttatccttggttgaaatgcttcctgaaatgactcatgttcaaacacaacgaccctggatgatgtttctcctgcaaaactttggattgatcctaggttggctttctctcctgctcttggctatatatgagcaaaatattaaaatataagtgaggatcttcaacatctttcaaaaatgcatttatatagtcttactttgtttctttcattgcactctataatgatttttaaattaagaattttttatcttaggcaaagtgtgtctctttcaattcattaacttattaattttataatgcagttttatttttggaaacatataaatatcagactgtccttaattgaaattttgtctttggtttccaacaccatgatgaagctcttgctttttaaaaagtagttagtaaattctgcatgaattttagtaaactttaaaaaatagattttttccctaagaaagaatgtttgtagaatttaaagtggacagatgcctgttggagtaaaatcaactgcaactttttgatgttaatttttttccctgtgcaattataaactataagcaagttaagtgacaagcaaatgtaataaagactagttttaatatggtg

SEQ ID NO: 57334 - DNA, 2483 bp, Artificial Sequence
  derived and/or modified sequence
aagacagactcaaggtggaggaagcgtggaaatgtgcttccggacaaagctctcagtatcctgggtgccattgtttcttctactcagccgtgttttttctactgagacagacaaaccctcagcccagcccacaaccactcaagaagcctcatcaaaacattgttggagaaaactgggtgcccacggaggagaaacggaatgcaaggagattgcaatctgtgctttgaaccagatgcactattactaatagctggaggaaattttgaagatcagcttagagaagaagtggtccagagagtttctcttctccttctctattacattattcatcaggaagagatctgttcttcaaagctcaacatgagtaataaagagtataaattttacctacacagcctactgagcctcaggcaggatgaagattcctctttcctttcacagaatgagacagaagatatcttggctttcaccaggcagtactttgacacttctcaaagccagtgtatggaaaccaaaacgctgcagaaaaaatctggaatagtgagcagtgaaggtgctaatgaaagtacgcttcctcagttggcagccatgatcattactttgtccctccagggtgtttgtctgggacaaggaaacttgccttccccagactactttacagaatatattttcagttccttgaatcgtacgaataccctccgcctatcagaactagaccaactcctcaacactctctggaccagaagtacttgtatcaaaaatgagaaaatccatcaatttcaaaggaaacaaaacaacataataacccatgatcaggactattctaatttctcttcatccatggaaaaagagtctgaggatggtccagtttcctgggatcagacctgcttctctgctaggcagctggtggagatatttctacagaagggcctctcactcatttctaaggaggactttaagcaaatgagtccagggatcatccagcagctcctcagctgctcctgccacttacccaaggaccaacaagcaaagctgccacctaccactctggagaaatacggctacagcacggtggctgtcacccttctcacactgggctccatgctggggacagcgctggtccttttccatagctgtgaggagaactacaggcttatcttacagctgtttgtgggcttggccgtcgggacactgtctggggacgctctgctccaccttatccctcaggttcttggtttacataagcaggaagccccagaatttgggcatttccatgaaagcaaaggtcatatttggaaactgatgggattaattggaggcatccatggatttttcttgatagaaaaatgttttattcttcttgtatcaccaaatgacaagcagggcctgtcattggttaatgggcacgtgggtcattcccaccatcttgcactcaactctgaattaagtgaccaggcaggcagaggcaaatctgcttcaactatccagttgaaaagcccagaagattcacaggcagctgaaatgcctataggcagtatgacagcctccaacagaaaatgtaaagccattagcttgttagcaatcatgattctggttggggacagcctgcataattttgcagatggcctagccataggagcagccttctcatcatcatccgagtcaggagtgaccactacgattgctatcttgtgtcatgaaatcccacatgaaatgggagactttgccgtgctcttaagctctggactttctatgaagactgccatcctgatgaattttataagctccctaactgccttcatgggattatacattggcctttccgtgtcagctgatccatgtgttcaagactggatcttcacagtcactgctgggatgttcttatatttatccttggttgaaatgcttcctgaaatgactcatgttcaaacacaacgaccctggatgatgtttctcctgcaaaactttggattgatcctaggttggctttctctcctgctcttggctatatatgagcaaaatattaaaatataagtgaggatcttcaacatctttcaaaaatgcatttatatagtcttactttgtttctttcattgcactctataatgatttttaaattaagaattttttatcttaggcaaagtgtgtctctttcaattcattaacttattaattttataatgcagttttatttttggaaacatataaatatcagactgtccttaattgaaattttgtctttggtttccaacaccatgatgaagctcttgctttttaaaaagtagttagtaaattctgcatgaattttagtaaactttaaaaaatagattttttccctaagaaagaatgtttgtagaatttaaagtggacagatgcctgttggagtaaaatcaactgcaactttttgatgttaatttttttccctgtgcaattataaactataagcaagttaagtgacaagcaaatgtaataaagactagttt

SEQ ID NO: 57335 - DNA, 1900 bp, Artificial Sequence
  derived and/or modified sequence
actctccaggatttaaaaggctgtggagctccagataaagaatcgtttatctttcttctgaagtgctttgaaccagatgcactattactaatagctggaggaaattttgaagatcagcttagagaagaagtggtccagagagtttctcttctccttctctattacattattcatcaggaagagatctgttcttcaaagctcaacatgagtaataaagagtataaattttacctacacagcctactgagcctcaggcaggatgaagattcctctttcctttcacagaatgagacagaagatatcttggctttcaccaggcagtactttgacacttctcaaagccagtgtatggaaaccaaaacgctgcagaaaaaatctggaatagtgagcagtgaaggtgctaatgaaagtacgcttcctcagttggcagccatgatcattactttgtccctccagggtgtttgtctgggacaaggaaacttgccttccccagactactttacagaatatattttcagttccttgaatcgtacgaataccctccgcctatcagaactagaccaactcctcaacactctctggaccagaagtacttgtatcaaaaatgagaaaatccatcaatttcaaaggaaacaaaacaacataataacccatgatcaggactattctaatttctcttcatccatggaaaaagagtctgaggatggtccagtttcctgggatcagacctgcttctctgctaggcagctggtggagatatttctacagaagggcctctcactcatttctaaggaggactttaagcaaatgagtccagggatcatccagcagctcctcagctgctcctgccacttacccaaggaccaacaagcaaagctgccacctaccactctggagaaatacggctacagcacggtggctgtcacccttctcacactgggctccatgctggggacagcgctggtccttttccatagctgtgaggagaactacaggcttatcttacagctgtttgtgggcttggccgtcgggacactgtctggggacgctctgctccaccttatccctcaggttcttggtttacataagcaggaagccccagaatttgggcatttccatgaaagcaaaggtcatatttggaaactgatgggattaattggaggcatccatggatttttcttgatagaaaaatgttttattcttcttgtatcaccaaatgacaagcagggcctgtcattggttaatgggcacgtgggtcattcccaccatcttgcactcaactctgaattaagtgaccaggcaggcagaggcaaatctgcttcaactatccagttgaaaagcccagaagattcacaggcagctgaaatgcctataggcagtatgacagcctccaacagaaaatgtaaagccattagcttgttagcaatcatgattctggttggggacagcctgcataattttgcagatggcctagccataggagcagccttctcatcatcatccgagtcaggagtgaccactacgattgctatcttgtgtcatgaaatcccacatgaaatgggagactttgccgtgctcttaagctctggactttctatgaagactgccatcctgatgaattttataagctccctaactgccttcatgggattatacattggcctttccgtgtcagctgatccatgtgttcaagactggatcttcacagtcactgctgggatgttcttatatttatccttggttgaaatgcttcctgaaatgactcatgttcaaacacaacgaccctggatgatgtttctcctgcaaaactttggattgatcctaggttggctttctctcctgctcttggctatatatgagcaaaatattaaaatataagtgaggatcttcaacatctttc

SEQ ID NO: 57336 - protein, 63 aa, Artificial Sequence
  derived and/or modified sequence
MGCGNSTATSAGAGQGPAGAAKDVTEESVTEDDKRRNYGGVYVGLPSEAVNMVSSQTKTVRKN

SEQ ID NO: 57337 - DNA, 1366 bp, Artificial Sequence
  derived and/or modified sequence
gggtgggtccggcgggtccccgggcggggcggggccggggcgaggggtgccgggtggtttccgcccggcagcccgcagcccgctgcgccccgggccgcgtctcccggcggtgggagggggcggcccccactcggttcctggcccctcgcggccccgtcagcctcccgctcggggtgcgccgcccttcgtctgggtctccgcccccaggacccgcggccgagagctccggagcgcggcttccccggccggctgcgcgatgggctgcgggaactccaccgccaccagcgcgggcgcgggccaaggccctgcaggagcagccaaagatgtaacagaagaatccgtaacagaagatgacaagaggagaaactatggaggagtatatgttggcctaccatctgaagctgtcaatatggtgtccagtcaaacaaagacggttcggaaaaattagaagaaaataacatcatgactcaagaatcaagagcttgctcatcagtttggaaggaatttggctccgtgggacgttgtaatgtgcacagacatttccaaggaaattctaaacagtcacccttcccttttgcattcccccaaatcttaagtgtatacataaaaccctgggtacatattgttgtggtaatagaagggaattggttaaacagtacacttgtttatggaactttctgtggccacctacgaaagacaagttaacaaactgtcatggaggctgttgttgcccagccagggccgctgcattttgacaacatttccaccctggccactcagcacatttcatggaggtcatgtcttttcactgatacttttttgatagtttttatataacaaaatccttattctatttataacttaagatgataaggcactataaattaatgacctaaaataatatatttgtctgttatcttttgctatttctacttcactttaatttttagctgtaaaattggtaaatggattcttacaactatctctttccatttcttactatttggttttcaaatttcatttaaatgtcagaatttccttttttaggaacaatgtgtatttcattgcactatttaaaaataaactcaaatttgcatgccatatgcacattttgattacatttttattttctttcgtgaaaggcatgtgcaactacaaatacttcatagctgtttgggttgctcattctacatcacgacaatctcatcatattatttctataacttttcaaggacttgcgatggatggttagtgggatatctggaaattaatttgataatgacttgtgtatctacttagtattgcaatgtaagttactcaattcaccaatgtatttcaacaattaaaacatttttatccctcttca

SEQ ID NO: 57338 - DNA, 192 bp, Artificial Sequence
  derived and/or modified sequence
atgggctgcggcaacagcaccgccaccagcgccggcgccggccagggccccgccggcgccgccaaggacgtgaccgaggagagcgtgaccgaggacgacaagagaagaaactacggcggcgtgtacgtgggcctgcccagcgaggccgtgaacatggtgagcagccagaccaagaccgtgagaaagaactag

SEQ ID NO: 57339 - DNA, 192 bp, Artificial Sequence
  derived and/or modified sequence
atggggtgtggcaacagtactgccacctcagcaggcgccgggcaaggcccagcaggagccgccaaggacgtgacagaggaaagtgtgaccgaagacgacaagaggcggaattacggcggagtctacgtgggtctgcccagcgaagctgtcaatatggtatctagccagaccaagacagtccggaagaattag

SEQ ID NO: 57340 - DNA, 192 bp, Artificial Sequence
  derived and/or modified sequence
atgggctgcggcaacagcacagccaccagcgctggagctggccagggccctgctggggccgccaaggatgtgacagaggagagcgtgacagaagatgacaagagaagaaactacggcggcgtgtatgtgggcctgcccagcgaggccgtgaacatggtgagcagccagaccaagacagtgaggaagaactag

SEQ ID NO: 57341 - DNA, 192 bp, Artificial Sequence
  derived and/or modified sequence
atgggctgcggcaacagcaccgccaccagcgccggcgccggccagggccctgccggcgccgctaaagatgtcaccgaggagagcgtcacagaagacgacaaacggcgaaactacggaggagtatatgttgggctaccctcggaggctgtgaacatggtgagcagccagactaaaaccgtacgaaaaaattag

SEQ ID NO: 57342 - DNA, 192 bp, Artificial Sequence
  derived and/or modified sequence
atggggtgcggcaatagcactgctactagtgccggagccggtcagggtccagccggagccgctaaggatgtaaccgaagagagtgtaactgaagatgacaagcgtcgtaattacgggggagtgtacgtaggactgccctcagaggccgttaatatggtatcgagtcagaccaagaccgttcgaaagaactag

SEQ ID NO: 57343 - protein, 90 aa, Artificial Sequence
  derived and/or modified sequence
MRRLLLVTSLVVVLLWEAGAVPAPKVPIKMQVKHWPSEQDPEKAWGARVVEPPEKDDQLVVLFPVQKPKLLTTEEKPRGTKAWMESRARP

SEQ ID NO: 57344 - protein, 142 aa, Artificial Sequence
  derived and/or modified sequence
MRRLLLVTSLVVVLLWEAGAVPAPKVPIKMQVKHWPSEQDPEKAWGARVVEPPEKDDQLVVLFPVQKPKLLTTEEKPRGTKAWMETEDTLGHVLSPEPDHDSLYHPPPEEDQGEERPRLWVMPNHQVLLGPEEDQDHIYHPQ

SEQ ID NO: 57345 - DNA, 273 bp, Artificial Sequence
  derived and/or modified sequence
atgcgccgcctccttttggtgacatcattagtggttgtgctcttgtgggaggctggagcagtgcctgcaccaaaagtgcccatcaaaatgcaggttaaacattggcccagtgaacaggacccagagaaagcctggggcgctcgggtcgtagagccccccgaaaaggacgatcaattggtcgtcctctttcccgtccagaagcccaaattgctaacgacggaggagaagcctcggggtactaaggcatggatggaatcacgagcaaggccatag

SEQ ID NO: 57346 - DNA, 429 bp, Artificial Sequence
  derived and/or modified sequence
atgaggaggctcctcctagtgacttccttggtggtggtgttgttgtgggaggcaggtgcggtaccagcgcctaaggtgcctataaagatgcaggtaaaacactggccaagtgaacaagacccagaaaaggcctggggcgcccgcgtggtagaaccccccgagaaagatgatcagctggtcgtgctcttcccagttcagaagcccaaactgctaactactgaggagaaaccaagaggaactaaagcttggatggaaactgaggatacgctggggcatgtcttaagcccagagccggaccatgattctctctaccatcccccacccgaggaggaccagggcgaagagcggcccagactttgggtgatgcccaatcatcaggtcctcctgggtccagaggaggaccaggatcatatttatcacccccagtag

SEQ ID NO: 57347 - DNA, 273 bp, Artificial Sequence
  derived and/or modified sequence
atgaggcggctgctgctggtgaccagcctggtggtggtgctgctgtgggaggccggggctgtgcctgcccccaaggtgcccatcaagatgcaggtgaagcactggcccagcgagcaggaccctgagaaggcctggggcgcccgggtggtggagcccccagagaaggatgaccagctggtggtgctcttccctgtgcagaagcccaagctgctgaccacagaggagaagccccggggcaccaaggcctggatggagagccgggcccggccctag

SEQ ID NO: 57348 - DNA, 429 bp, Artificial Sequence
  derived and/or modified sequence
atgaggcggctgctgctggtgaccagcctggtggtggtgctgctgtgggaggccggggctgtgcctgcccccaaggtgcccatcaagatgcaggtgaagcactggcccagcgagcaggaccctgagaaggcctggggcgcccgggtggtggagcccccagagaaggatgaccagctggtggtgctcttccctgtgcagaagcccaagctgctgaccacagaggagaagccccggggcaccaaggcctggatggagacagaggacaccctgggccacgtgctgagccctgagccagaccatgacagcctgtaccaccccccacctgaggaggaccagggcgaggagcggccccggctgtgggtgatgcccaaccaccaggtgctgctgggccctgaggaggaccaggaccacatctaccacccccagtag

SEQ ID NO: 57349 - DNA, 273 bp, Artificial Sequence
  derived and/or modified sequence
atgcggcggctgctgctggtgaccagcctggtggtggtgctgctgtgggaggcgggcgccgtcccagcccctaaggtgcccattaagatgcaggtgaagcactggccttccgaacaggatcccgagaaggcatggggcgctcgcgtcgtcgagccccccgagaaagacgaccagcttgtcgttttgtttcccgttcagaaacctaaactgctcaccacagaggaaaagccccgcgggacaaaagcctggatggagagtcgggctaggccttag

SEQ ID NO: 57350 - DNA, 429 bp, Artificial Sequence
  derived and/or modified sequence
atgcggcggctgctgctggtgaccagcctggtggtggtgctgctgtgggaagccggggcagtgccagctcccaaggtccctattaagatgcaggtgaagcactggccgagtgagcaagatcctgagaaggcttggggcgctcgagtggtggagcccccagagaaagacgaccagctagtcgtgctcttccctgttcagaaaccaaaacttctgacaactgaggagaagccacgcggaactaaggcatggatggagaccgaggacaccctggggcacgtgcttagtcccgaaccggatcacgactccctgtaccacccacctccagaggaggaccaaggcgaagaaaggccacgcttgtgggtcatgccaaaccaccaggtcctgcttggacctgaggaggatcaagatcacatttatcatcctcagtag

SEQ ID NO: 57351 - DNA, 273 bp, Artificial Sequence
  derived and/or modified sequence
atgagacgactgctcttggttacgtccctcgtcgtcgtgctcttgtgggaagcaggagccgtgcccgcaccaaaggttcccatcaaaatgcaggttaagcactggcccagcgaacaggacccagaaaaggcgtggggtgcccgtgtcgtggaaccccctgagaaagacgatcagttagttgtactgtttcccgtccagaagcctaagcttctcaccaccgaggaaaaaccacggggaacaaaagcatggatggaatctagagcgagaccttag

SEQ ID NO: 57352 - DNA, 429 bp, Artificial Sequence
  derived and/or modified sequence
atgcgcaggctgctccttgttaccagtttggtcgtggtgcttctgtgggaagccggagctgtcccagccccaaaagtgcctatcaagatgcaggtgaagcattggcctagtgagcaggatcccgagaaggcgtggggcgcaagggtggtggagcctcccgagaaggatgaccagctggtggtgcttttccctgtccagaagccaaaactcttaaccactgaggaaaaaccccgagggacgaaagcttggatggagaccgaagatacgctgggtcacgtgctctcccccgaaccagaccacgacagcctctaccatccgccacctgaagaagaccagggagaggagcgaccaagactttgggtaatgcctaaccaccaggtcctcctaggacctgaggaagatcaggaccatatctatcatcctcagtag

SEQ ID NO: 57353 - DNA, 351 bp, Artificial Sequence
  derived and/or modified sequence
agctgggccgggtgccagatactgggatcagccactgcagctccctgagcactctctacagagacgcggaccccagacatgaggaggctcctcctggtcaccagcctggtggttgtgctgctgtgggaggcaggtgcagtcccagcacccaaggtccctatcaagatgcaagtcaaacactggccctcagagcaggacccagagaaggcctggggcgcccgtgtggtggagcctccggagaaggacgaccagctggtggtgctgttccctgtccagaagccgaaactcttgaccaccgaggagaagccacgaggcaccaaggcctggatggagtcccgagcccgaccatga

SEQ ID NO: 57354 - DNA, 750 bp, Artificial Sequence
  derived and/or modified sequence
agctgggccgggtgccagatactgggatcagccactgcagctccctgagcactctctacagagacgcggaccccagacatgaggaggctcctcctggtcaccagcctggtggttgtgctgctgtgggaggcaggtgcagtcccagcacccaaggtccctatcaagatgcaagtcaaacactggccctcagagcaggacccagagaaggcctggggcgcccgtgtggtggagcctccggagaaggacgaccagctggtggtgctgttccctgtccagaagccgaaactcttgaccaccgaggagaagccacgaggcaccaaggcctggatggagaccgaggacaccctgggccatgtcctgagtcccgagcccgaccatgacagcctgtaccaccctccgcctgaggaggaccagggcgaggagaggccccggttgtgggtgatgccaaatcaccaggtgctcctgggaccggaggaagaccaagaccacatctaccacccccagtagggctccaggggccatcactgcccccgccctgtcccaaggcccaggctgttgggactgggaccctccctaccctgccccagctagacaaataaaccccagcaggccgggcgcggtggctcacctctgtaatcccagcacttttagaggccgaggcaggcggatcacctgaaatcaggagttccagaccagcctgggcaacatggtgaaaccccgtctctactaaaaatacaaaaattagccggg

SEQ ID NO: 57355 - DNA, 273 bp, Artificial Sequence
  derived and/or modified sequence
atgagaagactgctgctggtgaccagcctggtggtggtgctgctgtgggaggccggcgccgtgcccgcccccaaggtgcccatcaagatgcaggtgaagcactggcccagcgagcaggaccccgagaaggcctggggcgccagagtggtggagccccccgagaaggacgaccagctggtggtgctgttccccgtgcagaagcccaagctgctgaccaccgaggagaagcccagaggcaccaaggcctggatggagagcagagccagaccctag

SEQ ID NO: 57356 - DNA, 429 bp, Artificial Sequence
  derived and/or modified sequence
atgagaagactgctgctggtgaccagcctggtggtggtgctgctgtgggaggccggcgccgtgcccgcccccaaggtgcccatcaagatgcaggtgaagcactggcccagcgagcaggaccccgagaaggcctggggcgccagagtggtggagccccccgagaaggacgaccagctggtggtgctgttccccgtgcagaagcccaagctgctgaccaccgaggagaagcccagaggcaccaaggcctggatggagaccgaggacaccctgggccacgtgctgagccccgagcccgaccacgacagcctgtaccaccccccccccgaggaggaccagggcgaggagagacccagactgtgggtgatgcccaaccaccaggtgctgctgggccccgaggaggaccaggaccacatctaccacccccagtag

SEQ ID NO: 57357 - protein, 424 aa, Artificial Sequence
  derived and/or modified sequence
MRRVLRLLLGCFLTELCARVCRAQERAGHGQLAQLGGVLLLAGGNRSGAASGEASEGAEASDAPPTRAPTPDFCRGYFDVMGQWDPPFNCSSGDFIFCCGTCGFRFCCTFKKRRLNQSTCTNYDTPLWLNTGKPPARKDDPLHDPTKDKTNLIVYIICGVVAVMVLVGIFTKLGLEKAHRPQREHMSRALADVMRPQGHCNTDHMERDLNIVVHVQHYENMDTRTPINNLHATQMNNAVPTSPLLQQMGHPHSYPNLGQISNPYEQQPPGKELNKYASLKAVGSSDGDWAVSTLKSPKADKVNDDFYTKRRHLAELAAKGNLPLHPVRVEDEPRAFSPEHGPAKQNGQKSRTNKMPPHPLAYTSTTNFKGWDPNEQSLRRQAYSNKGKLGTAETGSSDPLGTRPQHYPPPQPYFITNSKTEVTV

SEQ ID NO: 57358 - protein, 465 aa, Artificial Sequence
  derived and/or modified sequence
MCGPRRLAAPGSSLGSFGRASRGGRRGSSGGRAAEPGLGDTMRRVLRLLLGCFLTELCARVCRAQERAGHGQLAQLGGVLLLAGGNRSGAASGEASEGAEASDAPPTRAPTPDFCRGYFDVMGQWDPPFNCSSGDFIFCCGTCGFRFCCTFKKRRLNQSTCTNYDTPLWLNTGKPPARKDDPLHDPTKDKTNLIVYIICGVVAVMVLVGIFTKLGLEKAHRPQREHMSRALADVMRPQGHCNTDHMERDLNIVVHVQHYENMDTRTPINNLHATQMNNAVPTSPLLQQMGHPHSYPNLGQISNPYEQQPPGKELNKYASLKAVGSSDGDWAVSTLKSPKADKVNDDFYTKRRHLAELAAKGNLPLHPVRVEDEPRAFSPEHGPAKQNGQKSRTNKMPPHPLAYTSTTNFKGWDPNEQSLRRQAYSNKGKLGTAETGSSDPLGTRPQHYPPPQPYFITNSKTEVTV

SEQ ID NO: 57359 - DNA, 1275 bp, Artificial Sequence
  derived and/or modified sequence
atgcggcgagtgctgaggctcctactcgggtgctttctgacagaactttgcgctcgggtctgcagagcacaggaaagggccggccacggtcaattagcgcagctgggtggggtgttattgttagcaggagggaatcggtcaggagcagccagcggtgaggcatcagagggagccgaggcgagtgatgcccctcccactcgggcccccacacccgatttctgtcgcggctatttcgacgtaatgggacagtgggaccctcctttcaactgcagcagcggagacttcatcttctgctgcgggacctgcggattcaggttttgttgtaccttcaaaaagaggaggctcaaccaaagtacatgcaccaactatgatactccgttgtggctcaatacaggaaaaccaccggcacgtaaggatgaccctctgcacgatcctaccaaggacaagaccaacctcatcgtttatatcatctgcggcgtggtcgccgtgatggtgttagtgggtattttcacaaaactgggactggagaaggcccaccggccccagagagagcatatgagtagggccctcgcggacgtgatgagaccccagggtcactgtaacacagatcatatggaaagagacttgaatatagtcgtgcatgttcaacattatgaaaacatggacacaaggacaccgatcaacaacctccatgccacgcagatgaataacgcagtacctacaagcccccttttacagcagatggggcacccccattcttatcccaacctgggacaaatcagtaatccatatgagcagcagccacctggcaaggaattaaacaagtatgcgtcgctgaaggctgtgggcagctctgatggcgactgggctgtgtctaccctgaagagtccgaaggccgacaaagtgaacgacgacttttatactaagcggcggcacctggccgaattggctgcaaagggtaatcttcccctccatcccgtgcgtgtagaagatgagccccgggctttctctcctgagcacgggcccgccaagcagaatggccagaagtccagaactaacaaaatgccccctcatccactggcatatacctcaactacgaacttcaagggctgggatccaaatgagcagtcgctgcggaggcaggcttactccaataaaggcaaattgggaacagctgaaaccggttcttctgacccgctggggacccgcccccagcactatcctccccctcagccctatttcattacaaattccaagaccgaggtgactgtctag

SEQ ID NO: 57360 - DNA, 1398 bp, Artificial Sequence
  derived and/or modified sequence
atgtgcggccctcggcgtttggccgcgcccggaagtagtctgggctcgtttgggcgagccagtagggggggccgccgcggctcctccgggggccgggcagcagagcccggcctaggtgatacaatgcgtcgagtgctccggctgctattggggtgtttcctgactgaactgtgtgcccgagtttgtcgggcacaggaacgcgccgggcatggacaattggcccaactggggggcgtactgttgctggcaggcggaaatcggagcggcgctgcatccggggaagccagtgaaggcgcagaggcctccgatgcgcctccaaccagggctcctacacccgatttttgtcgggggtatttcgatgtgatggggcaatgggaccctccatttaactgcagcagtggagattttattttttgttgcggcacctgtggtttcagattttgttgtacatttaaaaagcgacggcttaaccagagcacttgcacaaactatgacacgcctctctggctgaatacaggcaagccgcctgcaagaaaagatgaccccctgcatgacccaactaaagacaagactaacctgatagtctacattatctgcggagttgtggccgttatggttctcgtggggatctttactaaacttgggctggagaaagcacataggccccagcgggagcacatgtcacgcgccttagccgatgtcatgcgccctcagggccattgtaatactgatcacatggaacgagatttgaacatcgtcgtccatgtccaacattacgagaacatggacaccaggactcctatcaataacctgcacgccactcagatgaacaatgccgtgccgaccagcccccttttgcaacagatgggacatccacactcctatccaaatctgggtcagattagcaatccctacgaacagcagccacctggaaaggagctcaataagtatgcttcactcaaagccgtgggctctagcgatggggactgggcagtctcgaccttgaaaagtccaaaagccgacaaggtgaacgacgatttctacacaaagagaaggcacttagctgaactggcagctaaaggcaacctccctctacatcctgtaagggtggaagacgagcctagggcattttcccctgaacacggacctgcaaaacaaaacggtcagaaaagccgcaccaataaaatgcctccccatccattggcttacaccagcacaaccaactttaaaggatgggatcccaatgagcaaagtctgcgtagacaagcctactccaacaagggcaagttagggacagccgaaacgggctccagtgacccactcggcacgcgaccacagcactaccccccaccccagccctatttcatcacgaattccaaaactgaagttaccgtttag

SEQ ID NO: 57361 - DNA, 1275 bp, Artificial Sequence
  derived and/or modified sequence
atgagaagagtgctgcggctgctgctgggctgcttcctgacagagctgtgtgcccgggtgtgccgggcccaggagagagctggccacggccagctggcccagctgggcggcgtgctgctgctggccggcggcaacagaagtggagctgccagcggggaggccagcgagggcgctgaggccagtgatgccccacccacccgggcccccaccccagacttctgccggggctactttgatgtgatgggccagtgggacccccccttcaactgcagcagcggggacttcatcttctgctgcggcacctgtggcttccgcttctgctgcaccttcaagaagaggcggctgaaccagagcacctgcaccaactatgacacccccctgtggctgaacacaggcaagcccccagccaggaaggatgaccccctgcatgaccccaccaaggacaagaccaacctgattgtgtacatcatctgtggggtggtggccgtgatggtgctggtgggcatcttcaccaagctgggcctggagaaggcccaccggccccagcgggagcacatgagccgggccctggctgatgtgatgaggccccagggccactgcaacacagaccacatggagcgggacctgaacatcgtggtgcacgtgcagcactatgagaacatggacaccaggacccccatcaacaacctgcacgccacccagatgaacaatgctgtgcccaccagccccctgctgcagcagatgggccacccccacagctaccccaacctgggccagatcagcaacccctatgagcagcagcccccaggcaaggagctgaacaagtatgccagcctgaaggctgtgggcagcagtgatggagactgggccgtgtccaccctgaagagccccaaggctgacaaggtgaatgatgacttctacaccaagaggaggcacctggccgagctggccgccaagggcaacctgcccctgcaccctgtgcgggtggaggatgagccccgggccttcagccctgagcacggccctgccaagcagaatggccagaagagcaggaccaacaagatgccaccccaccccctggcctacaccagcaccaccaacttcaagggctgggaccccaatgagcagagcctgcggcggcaggcctacagcaacaagggcaagctgggcacagctgagaccggcagcagtgaccccctgggcacccggccccagcactaccccccaccccagccctacttcatcaccaacagcaagacagaggtgacagtgtag

SEQ ID NO: 57362 - DNA, 1398 bp, Artificial Sequence
  derived and/or modified sequence
atgtgtggcccccggcggctggccgcccctggcagcagcctgggcagctttggccgggccagcagaggaggaagaagaggcagcagcggcggccgggctgctgagcccggcctgggggacaccatgagaagagtgctgcggctgctgctgggctgcttcctgacagagctgtgtgcccgggtgtgccgggcccaggagcgggccggccacggccagctggcccagctgggcggcgtgctgctgctggccggcggcaacagaagtggggccgccagcggggaggccagcgagggcgctgaggccagtgatgccccacccacccgggcccccaccccagacttctgccggggctactttgatgtgatgggccagtgggacccccccttcaactgcagcagcggggacttcatcttctgctgcggcacctgtggcttccgcttctgctgcaccttcaagaagaggcggctgaaccagagcacctgcaccaactatgacacccccctgtggctgaacacaggcaagcccccagccaggaaggatgaccccctgcatgaccccaccaaggacaagaccaacctgattgtgtacatcatctgtggggtggtggccgtgatggtgctggtgggcatcttcaccaagctgggcctggagaaggcccaccggccccagcgggagcacatgagccgggccctggctgatgtgatgaggccccagggccactgcaacacagaccacatggagcgggacctgaacatcgtggtgcacgtgcagcactatgagaacatggacaccaggacccccatcaacaacctgcacgccacccagatgaacaatgctgtgcccaccagccccctgctgcagcagatgggccacccccacagctaccccaacctgggccagatcagcaacccctatgagcagcagcccccaggcaaggagctgaacaagtatgccagcctgaaggctgtgggcagcagtgatggagactgggccgtgtccaccctgaagagccccaaggctgacaaggtgaatgatgacttctacaccaagagaagacacctggccgagctggccgccaagggcaacctgcccctgcaccctgtgcgggtggaggatgagccccgggccttcagccctgagcacggccctgccaagcagaatggccagaagagcaggaccaacaagatgccaccccaccccctggcctacaccagcaccaccaacttcaagggctgggaccccaatgagcagagcctgcggcggcaggcctacagcaacaagggcaagctgggcacagctgagaccggcagcagtgaccccctgggcacccggccccagcactaccccccaccccagccctacttcatcaccaacagcaagacagaggtgacagtgtag

SEQ ID NO: 57363 - DNA, 1275 bp, Artificial Sequence
  derived and/or modified sequence
atgcggcgggtgctgcggctgctgctgggctgcttcctgaccgagctgtgcgctcgggtttgcagagcacaagaacgggcaggccacgggcagttggcccagctggggggagtcctcctcctggccgggggtaatcgctccggggccgccagtggggaagctagcgaaggtgccgaggcttctgatgcaccgccaacgcgagcacctaccccagacttttgtcgcggttacttcgacgtaatgggacagtgggatcccccctttaactgttcatcgggggacttcattttctgctgcggtacctgcgggtttagattctgctgcacttttaaaaagcgccggctgaatcaaagcacatgcacaaactacgacaccccactgtggctgaatacaggaaaacctccagcccggaaggacgatcccctgcacgatcccacgaaggataagaccaatctcattgtctatatcatctgcggagttgtggcggtcatggtcctggtggggatcttcaccaagttgggactggagaaggcacaccggccccaaagagaacatatgtctagagctctggcagacgtgatgcgcccgcagggacactgtaataccgatcacatggaaagggacctgaacatcgtggtgcacgtccagcactacgaaaacatggatacgcgcacaccgatcaacaaccttcacgccacacagatgaacaatgccgtccctacttccccccttctgcagcagatgggccacccacactcctatcccaacctgggccagataagtaatccctatgaacagcagccaccggggaaggagcttaataaatatgcatcactgaaagctgtggggtcaagcgacggagattgggcagtgtcaactctgaagagcccgaaagctgacaaggtcaacgacgacttctacaccaaacgcagacatctcgccgaacttgccgctaaggggaacctcccccttcaccctgtgagagttgaagacgaacctcgagccttctctccagagcatggtccagctaagcagaatgggcaaaaatcccggaccaataagatgcccccccatcccctggcttacacgtctaccacgaacttcaaagggtgggacccaaatgagcagagtttgaggcgtcaggcttactcaaacaaaggaaagttgggcacggccgagaccggctcgtcggatcctctgggcacgagacctcagcattaccctcctcctcaaccctactttatcactaacagtaagaccgaagtaacagtatag

SEQ ID NO: 57364 - DNA, 1398 bp, Artificial Sequence
  derived and/or modified sequence
atgtgcggcccccggcggctggccgcccccggcagcagcctgggcagctttggccgggcgagcaggggcggaaggcgcggctcgagcggaggccgcgccgccgaaccaggattaggtgatacgatgagacgagtgcttagacttctgctgggttgctttctgacggagctgtgtgcacgggtgtgtagagcacaggaacgggcaggtcacgggcagctcgcgcagcttggtggtgtcttgctgctggcgggagggaaccgcagcggggcggccagcggcgaggcaagtgagggcgcagaggccagtgacgcccccccaacgcgcgctcctacacctgacttttgcagaggttattttgacgtcatgggacaatgggatcccccatttaactgtagttctggagattttatattctgctgtggtacctgtggattccgcttctgctgtactttcaaaaagcggcgcctgaatcagtctacatgtactaactacgacacacccctgtggctgaacactggtaagcccccagcccgtaaggatgacccgcttcatgatccaaccaaggacaaaaccaacctgattgtttatattatttgtggagttgtagccgttatggtgctcgtcggaatctttactaagctggggcttgagaaagcgcaccgcccccaacgcgagcacatgagcagggcgctcgcagacgtgatgaggccccaaggacattgcaacaccgatcatatggagcgcgacctgaatatagtggtccatgtgcagcactatgagaacatggacaccagaacaccaattaacaacctccatgccacgcaaatgaataatgcagtgccaacctccccacttctccagcaaatggggcacccacacagctaccccaacctcggccagatcagcaatccatatgagcagcaaccaccaggaaaagaactcaacaagtacgcctctctcaaagctgttggctcctccgacggagattgggcagtttccaccctgaaaagcccaaaggccgataaggtcaatgacgatttctacactaagcgccggcaccttgccgaactcgcggctaagggcaacctcccactgcatcctgtcagagtagaggacgaaccgcgagctttctccccagagcacggcccagccaagcagaacgggcagaagtctcgcaccaacaaaatgcctccccacccactcgcttacaccagtaccaccaattttaagggatgggatcccaacgagcaaagtttgagacgacaggcatacagtaataaaggaaagcttgggacagcggaaaccggttcttctgaccctctggggaccaggccccagcactaccctcctccacagccgtacttcattaccaattcaaagactgaggttactgtctag

SEQ ID NO: 57365 - DNA, 1275 bp, Artificial Sequence
  derived and/or modified sequence
atgcggagggtgctgagactcctgctcggctgctttctgaccgaactctgcgccagggtatgcagagcccaagaacgagccggacacgggcagctcgctcaactgggaggcgtactcctgctagcgggtggaaatcgctcaggcgctgcctcgggagaggcaagcgaaggggctgaagcttcggatgctcccccaacacgggcacccaccccagatttctgtagaggctactttgacgttatgggccagtgggaccccccattcaattgtagtagtggggatttcatcttttgttgcggcacatgtgggtttcggttttgctgtacatttaagaaaagacggttgaaccaatccacatgtaccaattacgacacgcccctctggctgaatacagggaagcctcccgcaagaaaggatgatcctcttcacgaccctaccaaagataaaactaatttgattgtttacattatctgcggagtggtggccgtcatggtcctcgtagggatctttaccaaattggggctagaaaaagcgcatcggcctcaacgagagcatatgtcacgcgctctggccgacgtcatgcgccctcagggtcattgcaataccgaccacatggagcgggatctcaacatcgtggtacacgtgcaacactacgagaacatggacactagaacacccattaacaatttacatgctacccaaatgaataacgccgtgcctacgagccccctcctccagcagatgggacatccccatagctatccaaacctggggcagatctccaatccgtatgagcagcagcctcccggaaaggaactcaacaagtacgctagcctcaaagctgtggggtcttctgatggagattgggctgtgtcaaccttgaagtcccctaaagctgacaaagtgaatgatgacttttatacgaaacggcgacacttggctgagcttgcagcgaagggaaatctgcccctgcatcctgtgcgggttgaagatgaaccacgggcattctcacccgagcatggcccagctaaacaaaacggacagaaatccaggaccaataagatgcccccacatccactggcttacacctcgactactaacttcaaaggctgggatcccaacgaacagtcactgagaaggcaggcctacagcaacaaagggaaactcggaaccgctgagacagggagtagcgatcccctggggactaggccacagcactaccccccaccacagccgtactttattacaaatagtaaaactgaagtcaccgtatag

SEQ ID NO: 57366 - DNA, 1398 bp, Artificial Sequence
  derived and/or modified sequence
atgtgcggaccacgtagacttgccgcaccgggatcctcacttgggtccttcggcagggccagcagagggggacgaagagggtcctccggaggacgcgcagcagagcccggacttggcgacacgatgcgcagagtcctcagactcctgctgggatgttttctaacagagttgtgtgcacgcgtttgtagggcccaggagagggccggacatggccagctggcacaactgggtggggtgttgctgctagcgggtggtaacagaagcggagccgcaagtggggaagcatcggagggagcagaggcatccgatgccccacccactagggctcccacacccgatttttgtcgcggatactttgacgtcatgggccagtgggatcccccatttaattgttcctctggagactttattttttgttgtggcacgtgcgggtttagattctgctgtacttttaaaaagcggagactaaatcagagcacatgtactaactatgatactccactttggttaaatacaggcaagccaccagcgaggaaggatgaccctctgcacgaccctactaaagataagacaaacctgatcgtctacatcatttgcggcgtggtcgctgttatggtgctggtgggcatctttactaagctgggccttgagaaagcccacaggccccagagagaacacatgagtcgagccttggctgacgtgatgaggccacagggacattgcaacacagatcatatggagcgggacctcaatatagtcgtccacgtgcagcactacgagaatatggacaccaggacacctataaataatctgcacgctacgcagatgaataacgccgttcctacctctccattgctacaacagatgggtcacccacactcatatcctaatctgggccagattagcaacccgtacgagcagcagcctccaggcaaagagctcaacaaatacgcttccctgaaggcggtcggcagcagtgacggagattgggcagtgagcacccttaagagtccgaaagcagataaggtgaacgacgacttctacacgaaaaggcgtcacttagcggagctggccgcaaagggtaaccttccacttcaccctgtgagagtggaagacgagcctcgcgctttttctcctgaacacggccctgctaagcagaatgggcagaagtcgaggaccaacaaaatgcctcctcatcccctggcctatacttccaccactaacttcaaggggtgggacccaaacgaacagtccttaagaagacaggcttattctaacaaggggaagttgggtacagctgaaacaggcagtagcgatccactcgggaccaggccccagcactatccacccccacagccgtactttatcaccaactcgaagacagaagtcacagtgtag

SEQ ID NO: 57367 - DNA, 2042 bp, Artificial Sequence
  derived and/or modified sequence
attccacaagtgtcgcttcgctctcttcagcgcacttggcgagctggtgaggtgagagggatactgcgagagggctaggggcggccagtccggggctgccggccaaggctaggcgctgccagcccgattctcctctgctctccacccccgcctcacccagtggccggccggacctgcaccccgcgcttgaccccgctcatcctccccccgcccggccgggcgcgctcctccccggccggcccctcggcgcgcggcgcgctggaggcgaacgcgggctgaggcgaacgcgggctgagccgagcgcagtggccgccgaccaccgagcgccccgcgccgctccctgcatgtgcggcccgcggcggctcgcagctcccggcagcagcctcggcagcttcggccgcgcctcgagaggcggccgcagaggctccagcggcggccgagcggccgagcccgggctgggagacaccatgcgccgcgtccttcggctgctcctcggttgcttcctcaccgagctgtgcgcccgcgtgtgccgggcgcaggagcgagcgggacacgggcagctggcgcaactgggcggcgtgttgctgctggcggggggcaaccgctccggggccgcctccggagaggccagcgagggcgctgaggcatcggacgcgcccccgacccgggcgcccacgccggacttctgccggggctacttcgatgtcatgggccagtgggacccgccgttcaactgcagctcgggcgacttcatcttctgctgcgggacttgtggcttccggttctgctgcacgtttaagaagcggcgactgaaccaaagcacctgcaccaactacgacacgccgctctggctcaacaccggcaagccccccgcccgcaaggacgaccccttgcacgaccccaccaaggacaagaccaacctgatcgtctacatcatctgcggggtggtggccgtcatggtgctcgtgggcatcttcaccaagctggggctggagaaagcgcaccggccccaaagggagcacatgtccagggcccttgcggatgtcatgagaccacagggccactgcaacactgatcacatggagagagacctaaacatcgttgtccacgtccagcattatgagaacatggacacgagaacccccataaataatcttcatgccacccagatgaacaacgcagtgcccacctctcctctgctccagcagatgggccatccacattcgtacccgaacctgggccagatctccaacccctatgaacagcagccaccaggaaaagagctcaacaagtacgcctccttaaaggcagtcggaagttctgatggtgactgggcagtatcgacacttaagtcaccaaaagctgacaaggtcaatgacgacttctacaccaagcgacggcacctggctgagctggctgccaaggggaacttacctctgcaccccgtaagagtggaggacgagccccgggccttcagccctgagcacggtcctgccaagcagaatggacagaagtcccgcaccaacaagatgcccccacatcccctggcctacacctctaccaccaactttaagggctgggaccccaacgagcagtccctccggcggcaggcttacagcaacaagggcaagcttggcacggccgagacaggctccagcgaccccttgggaactcgcccccagcactacccacccccacagccatacttcatcaccaacagcaaaacagaagtgactgtctgagctttcaccacagggagcaccctggagaccacactcaactgagagaggcaaaaaacaaccccgcccacaccctccccatcctcccctaatacatgcgtccacacactcactctcaacaagaaccaactctaaacctactggggacacagagtcgcgcttttcctaggtcatgcctgtaacgtgtcggcgggcagctgagaaagaccgaagcgtggacattcagcaatacagcaaaggggaaaatgaggcacactctttccacttcaggcccaagatggccaactcacatgcccaaaccgt

SEQ ID NO: 57368 - DNA, 6726 bp, Artificial Sequence
  derived and/or modified sequence
ctcttcagcgcacttggcgagctggtgaggtgagagggatactgcgagagggctaggggcggccagtccggggctgccggccaaggctaggcgctgccagcccgattctcctctgctctccacccccgcctcacccagtggccggccggacctgcaccccgcgcttgaccccgctcatcctccccccgcccggccgggcgcgctcctccccggccggcccctcggcgcgcggcgcgctggaggcgaacgcgggctgaggcgaacgcgggctgagccgagcgcagtggccgccgaccaccgagcgccccgcgccgctccctgcatgtgcggcccgcggcggctcgcagctcccggcagcagcctcggcagcttcggccgcgcctcgagaggcggccgcagaggctccagcggcggccgagcggccgagcccgggctgggagacaccatgcgccgcgtccttcggctgctcctcggttgcttcctcaccgagctgtgcgcccgcgtgtgccgggcgcaggagcgagcgggacacgggcagctggcgcaactgggcggcgtgttgctgctggcggggggcaaccgctccggggccgcctccggagaggccagcgagggcgctgaggcatcggacgcgcccccgacccgggcgcccacgccggacttctgccggggctacttcgatgtcatgggccagtgggacccgccgttcaactgcagctcgggcgacttcatcttctgctgcgggacttgtggcttccggttctgctgcacgtttaagaagcggcgactgaaccaaagcacctgcaccaactacgacacgccgctctggctcaacaccggcaagccccccgcccgcaaggacgaccccttgcacgaccccaccaaggacaagaccaacctgatcgtctacatcatctgcggggtggtggccgtcatggtgctcgtgggcatcttcaccaagctggggctggagaaagcgcaccggccccaaagggagcacatgtccagggcccttgcggatgtcatgagaccacagggccactgcaacactgatcacatggagagagacctaaacatcgttgtccacgtccagcattatgagaacatggacacgagaacccccataaataatcttcatgccacccagatgaacaacgcagtgcccacctctcctctgctccagcagatgggccatccacattcgtacccgaacctgggccagatctccaacccctatgaacagcagccaccaggaaaagagctcaacaagtacgcctccttaaaggcagtcggaagttctgatggtgactgggcagtatcgacacttaagtcaccaaaagctgacaaggtcaatgacgacttctacaccaagcgacggcacctggctgagctggctgccaaggggaacttacctctgcaccccgtaagagtggaggacgagccccgggccttcagccctgagcacggtcctgccaagcagaatggacagaagtcccgcaccaacaagatgcccccacatcccctggcctacacctctaccaccaactttaagggctgggaccccaacgagcagtccctccggcggcaggcttacagcaacaagggcaagcttggcacggccgagacaggctccagcgaccccttgggaactcgcccccagcactacccacccccacagccatacttcatcaccaacagcaaaacagaagtgactgtctgagctttcaccacagggagcaccctggagaccacactcaactgagagaggcaaaaaacaaccccgcccacaccctccccatcctcccctaatacatgcgtccacacactcactctcaacaagaaccaactctaaacctactggggacacagagtcgcgcttttcctaggtcatgcctgtaacgtgtcggcgggcagctgagaaagaccgaagcgtggacattcagcaatacagcaaaggggaaaatgaggcacactctttccacttcaggcccaagatggccaactcacatgcccaaaccgtggggctgagttttcttttcctcctaacttgaaactgaaatccatggtgacaaaatataaaagtagcacaatttagagaaattgtccatttgagcacatacactacttgccacgtgctgtctgtttctaggttcgaaagccagggtggaaatgggggtagagaatgagggaggacacaagagaagagtgtattctggaagaggagttgttctgggaggaatttgcccacattagaagcatttttctaattccaagaagtggtgacgtggacgtaaaattttgacgagcatgaaacagtaactggaccccaaccattctatttatagtacttttcatatcatccatgttgaaagcaaaaaacaacacaccctcaaactcacagaaagtaaatagaccctgaacccaccgacaatgatgggaaggaaaaaacaaaaaacaaaaaacattttagagaactcccataaggaccatgaccgtggaaatgggagggatgggcttttacggagagggtccggagagtatcaaataactttttaaaaagaggattaaaatgtaagcccactacaaaacagataaaaacggcaaattaggtgttttttttttttcaaaaatcttgaagacttgttgacattaacaacaacaaatccacagttggaaaagtccacaggagatcagatgaggatccagaagcctctgatttctgggttttgcctccaagacctgaaacagccacagaaacaagtcctctataaactgtatgtccctgacatccctttcccttcagcgcgttgccgccgccgctgccaaacttcaactgctttggactgaaaatgtcataagcgtgggtggtgccttcaatgtgttactgttgtttaatgacagtcttgtttcccaagtgcaacctgtgttcttttagccttccttcctcttctttttctgcagtagtagaagatgtttccatccttcctttgtaggtgagcccaccccataacaccctctgaggggctgctacaatgtcaggggtacccaagaacgaagacctccctactctctacactatcaaaattagtccttccattttctagccctctcaaacctgtcagatgtttcttggtcccgtaattcccatggtccctccaaattacctccccacatacttcatgtgttcatctcccatccagaatgtcctgaggttgtttttctggttggttctcataatccatagtccttggggtcccagcaaagtcagttttcctacaagttgtgtttgttttgtggaagcccaaagaagtggattgagagagaagagatttttatctaaggtggaaggtttttcaactagcccctaaaggtctttggtagttaattaacattcaacagacccacagcaactctggtgtcagaagctataaatggtctggccaaacaagactcagagtattttctgaaatcctgagctgcaaggttctgcctcacctgtctctccactctgacatcacgaaatcagcaaaaccagatatttattctcctcactcccagcagatacgaggacaccaacaatgcagttgatccctctgggcctgagtctcccatctgaaacatggggaattggggtaggtcaagctttttgaaactgcaaaacctctacctgtttttaaaaatgagatcttttgaccaggcacagtggctcacacctaaaatcccagcactttgggaggctgaagcaggtggatcatctgaggtcaggagtttgagatcagcctggtcaacatggtgaaaccccgtctctactaaaaatacaaacattagctgggcatggtggtgggtgcctgtaatcccaactactcgagaggctgaggcaggagaatcgcttaaacttgggaggttgcagtgagctgagaccacaccactgccctctagcctgggtgacggagtgagactatctcaaaaaaaaaaaaaaaaagaaaaaaaaagagatctttcaaagaacgcataataggagatctccatgtataaaaaggtaccatgctgtacaaagctggggtcagagatttagtgcccaccttctcagcctccttgggaagaccccagagcttcccagagtcaagtaaataccactgggcatggtcagagtttccttgacgttaatgagctatgtacctgcaacacactttggcatctctgtatatcaccttcacaatatttgtatctaaattgattcattttaatgcattttgtttttaaaatgaaaacttcctgtcttcatcacaaatttaaaaaaaatcatcagttgccataaatagaaagcaaacataaaaataagtacaaaggaaacaagcagcgatgattaaattccagctggagtctgttgtctgtgagtctgaactaaagcctggggttctttctttctctctccatctctctgtttctgtttctctctctctcttaaaatgatatcatcaggtattaaataattgttaaaaataccagcacccaatgaagactttctctttgtactaataagatggaccaaaaagtaaatgaaaggggaatcatttcctatgcaagtcagtgttgaacaatgctgtagctatgtactgcctatgatcattgtgcatacactaggggtgcatagcccacacttcagaaaaccctgggttgacttatctgtgaggctctttccagctcaaagtttccataattcttatctcccttttacctcgtggttgctctttgcccccagtccacttcgtcccacccttatctcaactctgattaagagtctttcttggcctctaaatctgtagtattgtattccttctgcatgctccttctcctctgaataaacttcatcaattgaactgggctccttggggtctgcagttgtaattttggcagcaaaggtgcagactggtcattaagatgtagccacaatgatggcccaagaaggacacgtactttccaagtagtcctgtctaggatggaaagctcaggaagtgcttcatagtttattatcttccagttggttttgggagatgaactgaagagggaagtttggatagggaaggtctttttattcttttttttttaatgtatccatggagtatttattattattattattattattattattattattatactttaagttttagggtacatgtgcacaatgtgcaggttagttacatatgtatacacgtgtcatgctggtgtgctgcacccattaactcgtcatttagcattagctatatctcctaatgctatccctcccccctccccccaccccacaacagtccccagagtgtgatgttccccttcttgtgtccatgtgttctcattgttcaattcccatctatgagtgagaacatgcagtgtttggtttttttgtccttgcgatagtttactgagaatgatgatttccaatttcatccatgtccctacaaaggacatgaactcatcattttttatggctgcatagtattccatggtgtatatgtgccacattttcttaatccagtctatccttgttggacttttgggttggttccaagtctttgctattgtgaatagtgccgcaataaacatacgtgtgcatgtgtctttatagcagcatgatttatagtcctttgggtatatacccagtaatgggatggctgggtcaaatggtatttctagttctagatccctgaggaatcgccacactgacttccacaatggttgaactagtttacagtcccaccagcagtgtaaaagtgttcctatttctccacatcctctccagcacctgttgtttcctgactttttaatgattgccattctaactggcgtgagatggtatctcattgtggttttgatttgcatttctctgatggccagtgatgatgagcattttttcatgtgtcttttgactgcataaatgtcttttgagaagtgtctgttcatatccttcgcccactttttgatggggttgtttgtttttttcttgtaaatttgtttgagttcattgtagattctggatattagccctttgtcagatgagtaggttgcgaaaattttctcccattttgtaggttgcctgttcactctgatggtagtttcttttgctgtgcagaagctctttagtttaattagatcccatttgtcaattttggcttcctcttgggagggtagacagacctcacaatatggaaagacgggacaacctatggaactatctgtgacttccatgtaccaagacaaggacgctatagctagggtagtgagacctagaagagagaaaccagaacaaagcagacaggctgtcctcttcctaattccatgccctgacatcagcccctattttttgcctttagctgtcccccagtttccaacccaatgggaccagagtctgacttccctttgccctttcacagtgtctcagcctccatctgccttgggctccgcctggcctccccatctaactcttcccagttttttgtgtaaatggagcatattttatgtgcgaatattttagtaaccgtatgttctgcaagtaaacctgtgttaatacttgtcaacaactgcagagtttatgatacgaataattcttcctacaatgaagaaaaaaacacatttgtttgttttctaagaatgtttatttgtaaacatatgtattcactatattaatatgaatttcttacctggcaataaaactgattatatgtg

SEQ ID NO: 57369 - DNA, 1275 bp, Artificial Sequence
  derived and/or modified sequence
atgagaagagtgctgagactgctgctgggctgcttcctgaccgagctgtgcgccagagtgtgcagagcccaggagagagccggccacggccagctggcccagctgggcggcgtgctgctgctggccggcggcaacagaagcggcgccgccagcggcgaggccagcgagggcgccgaggccagcgacgccccccccaccagagcccccacccccgacttctgcagaggctacttcgacgtgatgggccagtgggacccccccttcaactgcagcagcggcgacttcatcttctgctgcggcacctgcggcttcagattctgctgcaccttcaagaagagaagactgaaccagagcacctgcaccaactacgacacccccctgtggctgaacaccggcaagccccccgccagaaaggacgaccccctgcacgaccccaccaaggacaagaccaacctgatcgtgtacatcatctgcggcgtggtggccgtgatggtgctggtgggcatcttcaccaagctgggcctggagaaggcccacagaccccagagagagcacatgagcagagccctggccgacgtgatgagaccccagggccactgcaacaccgaccacatggagagagacctgaacatcgtggtgcacgtgcagcactacgagaacatggacaccagaacccccatcaacaacctgcacgccacccagatgaacaacgccgtgcccaccagccccctgctgcagcagatgggccacccccacagctaccccaacctgggccagatcagcaacccctacgagcagcagccccccggcaaggagctgaacaagtacgccagcctgaaggccgtgggcagcagcgacggcgactgggccgtgagcaccctgaagagccccaaggccgacaaggtgaacgacgacttctacaccaagagaagacacctggccgagctggccgccaagggcaacctgcccctgcaccccgtgagagtggaggacgagcccagagccttcagccccgagcacggccccgccaagcagaacggccagaagagcagaaccaacaagatgcccccccaccccctggcctacaccagcaccaccaacttcaagggctgggaccccaacgagcagagcctgagaagacaggcctacagcaacaagggcaagctgggcaccgccgagaccggcagcagcgaccccctgggcaccagaccccagcactacccccccccccagccctacttcatcaccaacagcaagaccgaggtgaccgtgtag

SEQ ID NO: 57370 - DNA, 1398 bp, Artificial Sequence
  derived and/or modified sequence
atgtgcggccccagaagactggccgcccccggcagcagcctgggcagcttcggcagagccagcagaggcggcagaagaggcagcagcggcggcagagccgccgagcccggcctgggcgacaccatgagaagagtgctgagactgctgctgggctgcttcctgaccgagctgtgcgccagagtgtgcagagcccaggagagagccggccacggccagctggcccagctgggcggcgtgctgctgctggccggcggcaacagaagcggcgccgccagcggcgaggccagcgagggcgccgaggccagcgacgccccccccaccagagcccccacccccgacttctgcagaggctacttcgacgtgatgggccagtgggacccccccttcaactgcagcagcggcgacttcatcttctgctgcggcacctgcggcttcagattctgctgcaccttcaagaagagaagactgaaccagagcacctgcaccaactacgacacccccctgtggctgaacaccggcaagccccccgccagaaaggacgaccccctgcacgaccccaccaaggacaagaccaacctgatcgtgtacatcatctgcggcgtggtggccgtgatggtgctggtgggcatcttcaccaagctgggcctggagaaggcccacagaccccagagagagcacatgagcagagccctggccgacgtgatgagaccccagggccactgcaacaccgaccacatggagagagacctgaacatcgtggtgcacgtgcagcactacgagaacatggacaccagaacccccatcaacaacctgcacgccacccagatgaacaacgccgtgcccaccagccccctgctgcagcagatgggccacccccacagctaccccaacctgggccagatcagcaacccctacgagcagcagccccccggcaaggagctgaacaagtacgccagcctgaaggccgtgggcagcagcgacggcgactgggccgtgagcaccctgaagagccccaaggccgacaaggtgaacgacgacttctacaccaagagaagacacctggccgagctggccgccaagggcaacctgcccctgcaccccgtgagagtggaggacgagcccagagccttcagccccgagcacggccccgccaagcagaacggccagaagagcagaaccaacaagatgcccccccaccccctggcctacaccagcaccaccaacttcaagggctgggaccccaacgagcagagcctgagaagacaggcctacagcaacaagggcaagctgggcaccgccgagaccggcagcagcgaccccctgggcaccagaccccagcactacccccccccccagccctacttcatcaccaacagcaagaccgaggtgaccgtgtag

SEQ ID NO: 57371 - protein, 221 aa, Artificial Sequence
  derived and/or modified sequence
MRRVLRLLLGCFLTELCARVCRAQERAGHGQLAQLGGVLLLAGGNRSGAASGEASEGAEASDAPPTRAPTPDFCRGYFDVMGQWDPPFNCSSGDFIFCCGTCGFRFCCTFKKRRLNQSTCTNYDTPLWLNTGKPPARKDDPLHDPTKDKTNLIVYIICGVVAVMVLVGIFTKLGLEKAHRPQREHMSRLYDNLLFMEAQISFQEDEPAPGEWSVGLQTWTV

SEQ ID NO: 57372 - DNA, 666 bp, Artificial Sequence
  derived and/or modified sequence
atgcgccgggttttgagacttttgttgggttgcttcctcaccgagctgtgcgctcgagtgtgccgcgctcaggagcgcgcgggccatggacaattggctcagctaggaggagtgctgctcttggccggaggtaatcggagcggagcggcgtctggcgaggcttctgagggggctgaggcttcagatgcaccccccactcgtgcccccacacctgatttttgtcgcggttacttcgacgttatgggccaatgggacccaccattcaactgttcttcaggcgatttcattttctgttgcgggacctgtggatttcgcttctgctgcacgttcaaaaaaaggcggcttaatcaatcaacatgtaccaactatgacactccgctatggctaaacacgggtaagccacctgcgcggaaagacgatccacttcatgatcccactaaagataaaaccaacctgatcgtgtacatcatttgcggcgtggttgccgtgatggtacttgtgggtattttcaccaaactcggacttgaaaaggctcatcgccctcagcgggagcatatgtcaaggctctacgacaacttattgtttatggaagctcaaatttcttttcaggaggacgaacctgcccccggcgagtggtcagtgggcttgcagacatggacggtgtag

SEQ ID NO: 57373 - DNA, 789 bp, Artificial Sequence
  derived and/or modified sequence
atgtgcggccctcgccggctcgctgctccaggaagtagcctcggttcattcggacgggcatcccgaggtggacggaggggaagcagcggcggcagggcggccgagcctggcctgggagacactatgcgccgggttcttcggctgctactgggatgctttctcactgagctctgtgctcgtgtgtgtagggcccaggagagggccggccatggacagctggctcaactcgggggtgtcctgctgcttgcgggtggcaacagatctggcgccgcgtctggcgaagcctctgagggcgctgaggcgtcagatgctcctccaacaagagctccaacccccgatttctgtcgtggatatttcgatgtcatggggcagtgggacccccctttcaactgtagcagcggggacttcatcttctgttgtggcacctgcggcttccgtttctgctgtacctttaaaaagcgccgtctgaaccagtctacatgcactaactatgacacccctctttggctgaataccggaaaacccccggcccgcaaggatgaccctttgcatgatcccactaaggacaagacaaatctgatcgtgtatatcatctgtggagtggtggctgtcatggtcctggtggggatcttcacgaagctggggcttgagaaagcgcaccgcccccaacgcgaacacatgtcaagactctacgacaaccttctttttatggaagcccagattagtttccaagaagacgagccagcccctggcgaatggagcgtgggtttgcagacctggacagtgtag

SEQ ID NO: 57374 - DNA, 666 bp, Artificial Sequence
  derived and/or modified sequence
atgagaagagtgctgcggctgctgctgggctgcttcctgacagagctgtgtgcccgggtgtgccgggcccaggagagagctggccacggccagctggcccagctgggcggcgtgctgctgctggccggcggcaacagaagtggagctgccagcggggaggccagcgagggcgctgaggccagtgatgccccacccacccgggcccccaccccagacttctgccggggctactttgatgtgatgggccagtgggacccccccttcaactgcagcagcggggacttcatcttctgctgcggcacctgtggcttccgcttctgctgcaccttcaagaagaggcggctgaaccagagcacctgcaccaactatgacacccccctgtggctgaacacaggcaagcccccagccaggaaggatgaccccctgcatgaccccaccaaggacaagaccaacctgattgtgtacatcatctgtggggtggtggccgtgatggtgctggtgggcatcttcaccaagctgggcctggagaaggcccaccggccccagcgggagcacatgagccggctgtatgacaacctgctcttcatggaggcccagatctccttccaggaggatgagcccgcccctggagagtggagcgtgggcctgcagacctggacagtgtag

SEQ ID NO: 57375 - DNA, 789 bp, Artificial Sequence
  derived and/or modified sequence
atgtgtggcccccggcggctggccgcccctggcagcagcctgggcagctttggccgggccagcagaggaggaagaagaggcagcagcggcggccgggctgctgagcccggcctgggggacaccatgagaagagtgctgcggctgctgctgggctgcttcctgacagagctgtgtgcccgggtgtgccgggcccaggagcgggccggccacggccagctggcccagctgggcggcgtgctgctgctggccggcggcaacagaagtggggccgccagcggggaggccagcgagggcgctgaggccagtgatgccccacccacccgggcccccaccccagacttctgccggggctactttgatgtgatgggccagtgggacccccccttcaactgcagcagcggggacttcatcttctgctgcggcacctgtggcttccgcttctgctgcaccttcaagaagaggcggctgaaccagagcacctgcaccaactatgacacccccctgtggctgaacacaggcaagcccccagccaggaaggatgaccccctgcatgaccccaccaaggacaagaccaacctgattgtgtacatcatctgtggggtggtggccgtgatggtgctggtgggcatcttcaccaagctgggcctggagaaggcccaccggccccagcgggagcacatgagccggctgtatgacaacctgctcttcatggaggcccagatctccttccaggaggatgagcccgcccctggagagtggagcgtgggcctgcagacctggacagtgtag

SEQ ID NO: 57376 - DNA, 666 bp, Artificial Sequence
  derived and/or modified sequence
atgcggcgggtgctgcggctgctgctgggctgcttcctgaccgagttgtgcgccagggtgtgccgcgctcaggagagggccggtcacgggcagctcgctcagctcgggggtgtactgttgctggcaggaggtaataggtccggcgccgcatctggcgaggcctcggagggtgctgaagcgtccgacgctccgccgacccgggcccctactccggacttctgccgtggatactttgatgttatgggacagtgggacccaccttttaattgctccagcggagattttatcttttgttgtggaacctgcgggtttcgcttctgctgtacatttaaaaagcgtagattaaatcagtcaacgtgcactaactatgacactcccctgtggctcaatacaggcaagccaccggcacgcaaggacgaccctctgcatgatcctactaaggataagactaacctaattgtgtatatcatttgcggagttgttgcagttatggtactggtgggaatctttacaaagctggggttggagaaggctcatcgcccacagcgagagcatatgtccagactctacgataatctactctttatggaagcccagatttccttccaggaggacgagcctgctcctggcgaatggagtgtggggcttcagacctggacagtatag

SEQ ID NO: 57377 - DNA, 789 bp, Artificial Sequence
  derived and/or modified sequence
atgtgcggcccccggcggctggccgcccccggcagcagcctgggctccttcggaagggctagccggggaggccgaaggggctcttcaggcggtcgggcagcagagcccgggctgggagataccatgaggcgagtgttaagactgctgctggggtgctttctgacagaactctgcgcccgcgtgtgcagagcccaggagcgtgctggtcatggccaattagctcagcttgggggagtgctgctgcttgctggtggtaatcgctcaggagctgccagcggtgaggcctctgagggcgccgaagcctctgacgccccacctacaagagccccaacccctgacttctgccgaggctatttcgacgtgatgggccagtgggacccaccctttaactgttcgagcggagatttcatattctgttgcggtacctgcggattcaggttctgctgcaccttcaaaaagcgacgtcttaaccagtcgacttgcacgaattatgatacacctttgtggctcaatacgggcaaaccgcccgcaaggaaggacgaccccctccatgaccccacaaaagacaaaaccaatctcatcgtgtatatcatttgtggggtggttgcagtgatggtcctcgtcggtatctttacgaagctgggcctggaaaaagcccacaggcctcagagggaacatatgtcaaggctgtacgataatctgttatttatggaggcccagatttctttccaggaggacgaaccggcacccggtgaatggtccgttggtctccagacatggaccgtgtag

SEQ ID NO: 57378 - DNA, 666 bp, Artificial Sequence
  derived and/or modified sequence
atgaggcgcgtgcttcggctgttgctggggtgcttcctgactgagctgtgtgcaagggtttgccgagctcaggaaagagctggacatgggcagcttgcccagcttggtggcgtactcctgttggccggaggcaacagaagcggggctgcatcgggagaagcgagtgaaggcgcagaggcctccgatgcaccccctaccagggcacctaccccggatttttgccgcggatattttgacgttatgggccaatgggaccccccattcaactgttcatctggagacttcatcttctgttgcggtacctgcggatttcgattctgttgcactttcaagaaaagacggctaaatcagtcaacatgcactaactatgacacgccattgtggctgaatacggggaaaccaccagcacggaaagatgaccctctccacgaccctactaaggacaagacaaatttgatcgtgtatattatttgcggagttgtcgccgtcatggtgttggtgggaatctttacgaagttgggcctggagaaagcccatagaccccaaagagagcatatgagtcgactgtatgataacctattatttatggaggcccagatctccttccaggaggatgagccggctccgggagagtggtccgtcggattgcaaacttggaccgtatag

SEQ ID NO: 57379 - DNA, 789 bp, Artificial Sequence
  derived and/or modified sequence
atgtgcggacccaggaggcttgctgctccgggatcaagtctcgggtcattcggtagggcctcccggggaggacggcgaggctcaagcgggggaagagccgcagaacctgggctgggcgacacaatgcgcagggttttacgtctccttttaggctgctttctgactgaattatgcgccagagtgtgccgggctcaagagagggccggacatggccaactcgctcagctgggaggcgtcctgctgctcgccggaggaaatagatctggcgcagccagcggcgaagcaagcgagggcgctgaggcctcagatgcgcctccaaccagggctcccacccccgatttctgccgtggctattttgacgttatgggacagtgggatcctccttttaattgctcttctggggattttatcttttgctgtggtacatgcggatttcggttctgctgtacgttcaagaagcgcagactgaatcagtctacctgtacgaattatgacacacccctctggctgaatacaggcaaacccccagcacggaaagacgaccctctgcacgatccgacgaaagataaaacaaatttaattgtttatataatttgtggcgttgttgctgtcatggtgttggtgggtatcttcaccaaactagggctggagaaggcccataggccccaaagggagcacatgtcgcgcctctacgataatttactgtttatggaggcacagatctcttttcaagaggatgagccggcaccaggggagtggagcgtaggccttcaaacatggacggtgtag

SEQ ID NO: 57380 - DNA, 4043 bp, Artificial Sequence
  derived and/or modified sequence
gtggccggccggacctgcaccccgcgcttgaccccgctcatcctccccccgcccggccgggcgcgctcctccccggccggcccctcggcgcgcggcgcgctggaggcgaacgcgggctgaggcgaacgcgggctgagccgagcgcagtggccgccgaccaccgagcgccccgcgccgctccctgcatgtgcggcccgcggcggctcgcagctcccggcagcagcctcggcagcttcggccgcgcctcgagaggcggccgcagaggctccagcggcggccgagcggccgagcccgggctgggagacaccatgcgccgcgtccttcggctgctcctcggttgcttcctcaccgagctgtgcgcccgcgtgtgccgggcgcaggagcgagcgggacacgggcagctggcgcaactgggcggcgtgttgctgctggcggggggcaaccgctccggggccgcctccggagaggccagcgagggcgctgaggcatcggacgcgcccccgacccgggcgcccacgccggacttctgccggggctacttcgatgtcatgggccagtgggacccgccgttcaactgcagctcgggcgacttcatcttctgctgcgggacttgtggcttccggttctgctgcacgtttaagaagcggcgactgaaccaaagcacctgcaccaactacgacacgccgctctggctcaacaccggcaagccccccgcccgcaaggacgaccccttgcacgaccccaccaaggacaagaccaacctgatcgtctacatcatctgcggggtggtggccgtcatggtgctcgtgggcatcttcaccaagctggggctggagaaagcgcaccggccccaaagggagcacatgtccaggctctatgacaatctgctgtttatggaggcacagatttctttccaagaggacgaacctgcccctggagagtggagtgtcggacttcaaacctggacagtctgagtgcacggatccttggccgctaggctgcactgcgtttgagtgcaaacctgcaggaattccagacttctcagatcacagagaagtacgcgatgccctgcaaacaacagctcatgcatcggggccagttcaagaagctaccgtaagatgaagtctaggaatgctttctatatcggccccggcaggcccagacgtcttggtggaggcgttggtgagaaatgaccttggggacagaagcacatatgtgaagctctctacacttgaagccagtagggaacacatgtcattattttgtccaccttcaaacagaattggaaatccaagtggcaaatggcagataagggtcctgtgtgtttttaaaacatgcttcagaagaactggcaccccttggaaagaaatagcaacaaataatgataaatgcacctcctcctcttgccttttgccttccagtttctctcctgcctctcatctttctatgcatttgtggttatcctaaggctttgaccagcttcccaggctggagaagtccatgtgtgcatgcatctactgttggccacagaaaagtcttaatttatttttctttgcagggtatgttgacttctctttgggcactgagtccttgcattttaaaaatcaacttcattgaagtataatttacacaataaaatgcacacattgtaagtgtgtagtttgatgagcttggacaaatgtctatacctgtgtaatcattactctagaaagctcactcatgcccattgcccttgcatttttgaaaaataattgatgcttcttgtgcaagaagaagtgctcaggaactctattcaagtgtttaaaagtcaacacatagattggacattgggatacctggaggctttgaagcaagataccgggactctgagttctgtttggaaatattggtgtcatatatttgtcattgtaattggaaagaaaagagatgcaccattttcttcttgttctttggataagctaagctcattcccatcttggagctgttgcactggcccttgtgtggctggtccctcctcatcaccagggtcccagctccaatgtcatcttctctgagaagccgtccctgaccaggcttagttgcttcccaccccagcctgacacactccagcccatcacccagtcagtgttatttgcttcatttttacattatggtctaaaattaacttgctagtttactggtttactagtttattatctgtctccttccattatccctctccttccctccttcccttccccttccttccttccttccttccttccttcgagacacagtcgtactctgtcaccccggctggagtgcagtggtgtgatcttgcctcactacaacccctgcctcctgggttttagcgattcttctgcctcagcctcccgagtagctgggactacaggcacccaccatgatgccaggctaatttttgtatttttattggagacagggtttcaccatgttggccaggctggtctcgaactcttgacctcaagtgatccacctgtctcggcctcccaaagtgctgggattacaggcatgagccactgcacctggcccttttattattcatagtaagacacacagggaccacaattgtctcttctactcagtagttggattctgagtgcctagttcagtatttggcaagtaagagttctgcatttgatatcctggtttacctggcacaacaaagtatctccaaattcattcattcattctttcattcattcgataggtatttactgaacatctaacttatgcccaacactgtgctgagagatatgagataaccatgaatagtacaaaagcaatccctgcccttgaagagcaaacagccaaatatcaggagacaggtaacacacaaggaaatgtacaagaaagttgagccagcacttttataagtactggttctagtactagctttcataagaaagtactggttctagtactagctttcagtactctcttgtgaaattttcaatattcagtcatttcaacctcaaaaatggcaacataattatgtttcaacataattgttgttttaaacaaacaattttgtttcaacataattctcctgaactgggtggaaggctatcaagaaaaagcttagcttcttcttcaggtaactgcaagagacagggttctctagagaaacagaacaaatatacaaagagattcattataaggaattggaagtccaaaatctccagagcctctgtacttgtacaagtctgaaggccgacaggcaggagaattctctctttttggggcaaaggtcagtgttttgttctatccaggctttcagatgattggttgaggctcactcacattagaagggcaatctgtcttactgccattagaatgcaacctgttttacttagcttactgatttcaatgttaatctatttcaagagcaccctcacagaaacacccagaataatgtttgatgaaatatctgggcaccctgtgacccagtcaagttgacacatgacactaaccatcacagtacgcttagggtcttgtcactcggagtgtggcctgtgaaccagcagcatttttatcttctgggagcttgggcacgatctcaggccccacctcctgcttattgattcagaatctgcattttaacaagatccccaggtgatctggatgcaccgtaacatctgagaagcactcaaactatgtgccgcaaacaaacgccaaattcttaggcatttgtgtggcttggagcacatagttggttctttctactgtctaattcattacattttttcagcacattcctgtctataaaatgtttttttgtatgcaccccaatatatgcacatttataagcatatgcatgaacccacgaacaatgattaggtacattatgaagcatacgtaaggacagaaatttcaaaccaagcttgagggtgaaataaatattatttgaaaacctgttgctaattgtgatgacttcatactatcattagttactatctcaatgcataatgtacagtgacgggtgaagtttatcattaataaaaaaaatctggattttaaccatt

SEQ ID NO: 57381 - DNA, 4180 bp, Artificial Sequence
  derived and/or modified sequence
ctcttcagcgcacttggcgagctggtgaggtgagagggatactgcgagagggctaggggcggccagtccggggctgccggccaaggctaggcgctgccagcccgattctcctctgctctccacccccgcctcacccagtggccggccggacctgcaccccgcgcttgaccccgctcatcctccccccgcccggccgggcgcgctcctccccggccggcccctcggcgcgcggcgcgctggaggcgaacgcgggctgaggcgaacgcgggctgagccgagcgcagtggccgccgaccaccgagcgccccgcgccgctccctgcatgtgcggcccgcggcggctcgcagctcccggcagcagcctcggcagcttcggccgcgcctcgagaggcggccgcagaggctccagcggcggccgagcggccgagcccgggctgggagacaccatgcgccgcgtccttcggctgctcctcggttgcttcctcaccgagctgtgcgcccgcgtgtgccgggcgcaggagcgagcgggacacgggcagctggcgcaactgggcggcgtgttgctgctggcggggggcaaccgctccggggccgcctccggagaggccagcgagggcgctgaggcatcggacgcgcccccgacccgggcgcccacgccggacttctgccggggctacttcgatgtcatgggccagtgggacccgccgttcaactgcagctcgggcgacttcatcttctgctgcgggacttgtggcttccggttctgctgcacgtttaagaagcggcgactgaaccaaagcacctgcaccaactacgacacgccgctctggctcaacaccggcaagccccccgcccgcaaggacgaccccttgcacgaccccaccaaggacaagaccaacctgatcgtctacatcatctgcggggtggtggccgtcatggtgctcgtgggcatcttcaccaagctggggctggagaaagcgcaccggccccaaagggagcacatgtccaggctctatgacaatctgctgtttatggaggcacagatttctttccaagaggacgaacctgcccctggagagtggagtgtcggacttcaaacctggacagtctgagtgcacggatccttggccgctaggctgcactgcgtttgagtgcaaacctgcaggaattccagacttctcagatcacagagaagtacgcgatgccctgcaaacaacagctcatgcatcggggccagttcaagaagctaccgtaagatgaagtctaggaatgctttctatatcggccccggcaggcccagacgtcttggtggaggcgttggtgagaaatgaccttggggacagaagcacatatgtgaagctctctacacttgaagccagtagggaacacatgtcattattttgtccaccttcaaacagaattggaaatccaagtggcaaatggcagataagggtcctgtgtgtttttaaaacatgcttcagaagaactggcaccccttggaaagaaatagcaacaaataatgataaatgcacctcctcctcttgccttttgccttccagtttctctcctgcctctcatctttctatgcatttgtggttatcctaaggctttgaccagcttcccaggctggagaagtccatgtgtgcatgcatctactgttggccacagaaaagtcttaatttatttttctttgcagggtatgttgacttctctttgggcactgagtccttgcattttaaaaatcaacttcattgaagtataatttacacaataaaatgcacacattgtaagtgtgtagtttgatgagcttggacaaatgtctatacctgtgtaatcattactctagaaagctcactcatgcccattgcccttgcatttttgaaaaataattgatgcttcttgtgcaagaagaagtgctcaggaactctattcaagtgtttaaaagtcaacacatagattggacattgggatacctggaggctttgaagcaagataccgggactctgagttctgtttggaaatattggtgtcatatatttgtcattgtaattggaaagaaaagagatgcaccattttcttcttgttctttggataagctaagctcattcccatcttggagctgttgcactggcccttgtgtggctggtccctcctcatcaccagggtcccagctccaatgtcatcttctctgagaagccgtccctgaccaggcttagttgcttcccaccccagcctgacacactccagcccatcacccagtcagtgttatttgcttcatttttacattatggtctaaaattaacttgctagtttactggtttactagtttattatctgtctccttccattatccctctccttccctccttcccttccccttccttccttccttccttccttccttcgagacacagtcgtactctgtcaccccggctggagtgcagtggtgtgatcttgcctcactacaacccctgcctcctgggttttagcgattcttctgcctcagcctcccgagtagctgggactacaggcacccaccatgatgccaggctaatttttgtatttttattggagacagggtttcaccatgttggccaggctggtctcgaactcttgacctcaagtgatccacctgtctcggcctcccaaagtgctgggattacaggcatgagccactgcacctggcccttttattattcatagtaagacacacagggaccacaattgtctcttctactcagtagttggattctgagtgcctagttcagtatttggcaagtaagagttctgcatttgatatcctggtttacctggcacaacaaagtatctccaaattcattcattcattctttcattcattcgataggtatttactgaacatctaacttatgcccaacactgtgctgagagatatgagataaccatgaatagtacaaaagcaatccctgcccttgaagagcaaacagccaaatatcaggagacaggtaacacacaaggaaatgtacaagaaagttgagccagcacttttataagtactggttctagtactagctttcataagaaagtactggttctagtactagctttcagtactctcttgtgaaattttcaatattcagtcatttcaacctcaaaaatggcaacataattatgtttcaacataattgttgttttaaacaaacaattttgtttcaacataattctcctgaactgggtggaaggctatcaagaaaaagcttagcttcttcttcaggtaactgcaagagacagggttctctagagaaacagaacaaatatacaaagagattcattataaggaattggaagtccaaaatctccagagcctctgtacttgtacaagtctgaaggccgacaggcaggagaattctctctttttggggcaaaggtcagtgttttgttctatccaggctttcagatgattggttgaggctcactcacattagaagggcaatctgtcttactgccattagaatgcaacctgttttacttagcttactgatttcaatgttaatctatttcaagagcaccctcacagaaacacccagaataatgtttgatgaaatatctgggcaccctgtgacccagtcaagttgacacatgacactaaccatcacagtacgcttagggtcttgtcactcggagtgtggcctgtgaaccagcagcatttttatcttctgggagcttgggcacgatctcaggccccacctcctgcttattgattcagaatctgcattttaacaagatccccaggtgatctggatgcaccgtaacatctgagaagcactcaaactatgtgccgcaaacaaacgccaaattcttaggcatttgtgtggcttggagcacatagttggttctttctactgtctaattcattacattttttcagcacattcctgtctataaaatgtttttttgtatgcaccccaatatatgcacatttataagcatatgcatgaacccacgaacaatgattaggtacattatgaagcatacgtaaggacagaaatttcaaaccaagcttgagggtgaaataaatattatttgaaaacctgttgctaattgtgatgacttcatactatcattagttactatctcaatgcataatgtacagtgacgggtgaagtttatcattaataaaaaaaatctggattttaaccatt

SEQ ID NO: 57382 - DNA, 666 bp, Artificial Sequence
  derived and/or modified sequence
atgagaagagtgctgagactgctgctgggctgcttcctgaccgagctgtgcgccagagtgtgcagagcccaggagagagccggccacggccagctggcccagctgggcggcgtgctgctgctggccggcggcaacagaagcggcgccgccagcggcgaggccagcgagggcgccgaggccagcgacgccccccccaccagagcccccacccccgacttctgcagaggctacttcgacgtgatgggccagtgggacccccccttcaactgcagcagcggcgacttcatcttctgctgcggcacctgcggcttcagattctgctgcaccttcaagaagagaagactgaaccagagcacctgcaccaactacgacacccccctgtggctgaacaccggcaagccccccgccagaaaggacgaccccctgcacgaccccaccaaggacaagaccaacctgatcgtgtacatcatctgcggcgtggtggccgtgatggtgctggtgggcatcttcaccaagctgggcctggagaaggcccacagaccccagagagagcacatgagcagactgtacgacaacctgctgttcatggaggcccagatcagcttccaggaggacgagcccgcccccggcgagtggagcgtgggcctgcagacctggaccgtgtag

SEQ ID NO: 57383 - DNA, 789 bp, Artificial Sequence
  derived and/or modified sequence
atgtgcggccccagaagactggccgcccccggcagcagcctgggcagcttcggcagagccagcagaggcggcagaagaggcagcagcggcggcagagccgccgagcccggcctgggcgacaccatgagaagagtgctgagactgctgctgggctgcttcctgaccgagctgtgcgccagagtgtgcagagcccaggagagagccggccacggccagctggcccagctgggcggcgtgctgctgctggccggcggcaacagaagcggcgccgccagcggcgaggccagcgagggcgccgaggccagcgacgccccccccaccagagcccccacccccgacttctgcagaggctacttcgacgtgatgggccagtgggacccccccttcaactgcagcagcggcgacttcatcttctgctgcggcacctgcggcttcagattctgctgcaccttcaagaagagaagactgaaccagagcacctgcaccaactacgacacccccctgtggctgaacaccggcaagccccccgccagaaaggacgaccccctgcacgaccccaccaaggacaagaccaacctgatcgtgtacatcatctgcggcgtggtggccgtgatggtgctggtgggcatcttcaccaagctgggcctggagaaggcccacagaccccagagagagcacatgagcagactgtacgacaacctgctgttcatggaggcccagatcagcttccaggaggacgagcccgcccccggcgagtggagcgtgggcctgcagacctggaccgtgtag

SEQ ID NO: 57384 - protein, 632 aa, Artificial Sequence
  derived and/or modified sequence
MARHRNVRGYNYDEDFEDDDLYGQSVEDDYCISPSTAAQFIYSRRDKPSVEPVEEYDYEDLKESSNSVSNHQLSGFDQARLYSCLDHMREVLGDAVPDEILIEAVLKNKFDVQKALSGVLEQDRVQSLKDKNEATVSTGKIAKGVLFSSSEVSADNVQSSYPQSANHLDYSSKPFDFASSVGKYGLSHNSSVPTHCLLHRKKKLDTRKSEKKLESCKLTKELSLANLIHDMSRDSCESQPSVRLSSTDSLESLLSKNLDADLLRPHASECISKDDSAFKEIPDLKTIIIKGTTPNNSLYIQNNSLSDFQNIPVQDSLGSSNNPLYLTSSLENMTVDNLNASKETEVGNVSLVEQSAKNHTFKNDNLQFSQCESPSLTELFQEHKENNISQCFTLSDLCNQSSASFTDLSLGSFPLSQLANRCQSSPGISELTGSLSSLAFHKASPTRDLENLSLSELIAETIDVDNSQIKKESFEVSLSEVRSPGIDSNIDLSVLIKNPDFVPKPVVDPSIAPSSRTKVLSSKLGKNSNFAKDNKKNNKGSLTRKPPFSLSWTKALAARPSAFASTLCLRYPLKSCKRRTLDLYKTFLYSRQVQDVKDKEISPLVAITPFDFKSASPDDIVKANQKKAFTRE

SEQ ID NO: 57385 - DNA, 1899 bp, Artificial Sequence
  derived and/or modified sequence
atggcccggcaccgcaacgtgaggggctacaattatgatgaagactttgaggacgacgacctctatggacagagcgtcgaggatgattattgtatttccccgtccaccgccgcccaattcatctacagccggagagataaaccctctgtcgagccagttgaagaatatgactacgaggacctgaaggaatcgagtaattcagtctccaaccaccagctgtccggctttgatcaggcacgcctttactcttgtctggaccatatgagggaggtgctgggtgacgcagtccctgatgaaatccttatcgaagccgtgctaaagaataaattcgacgtccagaaggcactttccggcgtgctcgagcaggaccgagtgcaatccttgaaggataagaacgaggcgaccgtcagtaccggtaagattgctaagggggtcctgttcagcagctcagaggttagtgcggataatgtccagtcctcatatccccagtcagcgaaccatttggattactcaagtaaaccgttcgacttcgcgtctagcgtgggaaagtacgggctgtcgcataattcaagcgtaccgacacactgtctgctgcaccgcaagaagaaactcgatacccgaaagtctgaaaagaaacttgagagctgcaagctcacaaaggagttatctcttgccaatctaatccatgacatgagtcgcgactcctgcgaaagccagccctcagttcggctcagtagtaccgattccctggagagtctgttgagtaagaatctggatgctgatctgttgcgcccgcatgcctccgaatgcatttcaaaagacgacagtgccttcaaggagattcccgatctgaaaaccattataattaaagggaccacccccaataacagtctctatattcagaataactcattgagcgacttccagaatatcccggtacaggactctttggggagctccaataaccccttatacctgaccagctcactggaaaacatgaccgtcgacaatcttaatgccagcaaggagacagaggtgggcaatgtgtctctggtcgaacagagtgcaaagaatcacaccttcaaaaacgataatctgcagttcagtcagtgtgaaagccccagcctgacagaactgttccaagaacataaagagaacaatattagccagtgttttaccctgtctgatctgtgcaatcaaagcagcgcctctttcactgacttgtctttgggctcttttccgctgtcacagttggccaaccgttgtcagagttctcctgggattagtgagctgaccgggtcactgagcagcctggccttccataaggctagtccgacaagggacctggagaatctgtccttgagtgagcttatcgccgagaccatcgacgtcgacaacagccaaataaagaaagaatcttttgaagtgagtctctcagaagtacgatccccagggatcgacagtaacatcgacctgagcgtactaatcaagaatcccgattttgtacccaaaccagtcgtggatcctagcatcgcgccttctagtcggacaaaggtgctcagctccaagctcggaaaaaattctaactttgcgaaagataacaagaagaacaacaagggctccctcacaagaaaacctccctttagtctgtcatggacaaaggccctggccgcgagaccctcagccttcgcttctaccctctgcctaagatatcccctgaagtcatgcaaaaggagaacactggatctctacaagacctttctttatagcaggcaggttcaggacgttaaagacaaggagatctcccccctcgtggccatcaccccctttgattttaagtcagcctcacccgacgacattgtgaaggcaaaccagaaaaaagctttcacccgcgaatag

SEQ ID NO: 57386 - DNA, 2793 bp, Artificial Sequence
  derived and/or modified sequence
tgaccctgaggcattgccgtcgcgcggtgcacagctaagacgtcgcgcttgcgcaggcgctcggcgcagaggcctgcgggaagccaagatggcgcataggggttctccaggctgcagttggcgccttatcagtatctaagcggagtgttttggaaggagttaaggggctgtggcaaacgccctctccgccgtcatggcccggcatcggaatgttcgaggctataactacgatgaagattttgaagatgatgatctctacggccagtctgtagaggatgattattgtatttcgccgtcaacagctgctcagtttatttattcacggcgtgacaaaccttccgttgagcctgtggaagaatatgattatgaagatctgaaagaatcttccaattctgtttcaaaccatcagctcagtggatttgatcaagctcgtctttattcatgccttgatcacatgagagaggtacttggagatgctgtgccagatgaaatattaattgaagcagttctgaagaacaagtttgatgtgcagaaggctttgtcaggggttctggaacaagatagagtgcagagtttgaaggacaagaatgaggcaacagtatctacaggaaagatagcaaaaggagtcttattttcttcttctgaagtttcagctgataatgttcaaagttcttatcctcagtcagcaaatcatttggattatagtagcaaaccctttgattttgctagctcagtaggaaaatacggattatctcataattcttcagttccaactcactgtttactccatagaaaaaagaaacttgacacacgtaaaagtgaaaagaaactagaatcatgtaagttaacaaaagaactttcactagctaacctaattcatgatatgtcaagagattcctgtgaaagtcagccatcagtcagattatcatctacagacagtctggaaagtctgctttcaaagaacctagatgccgatttgttgagacctcatgcatctgaatgcatttccaaagatgattctgcattcaaagaaataccagatttaaagaccataatcataaagggcacaacaccgaataattctttatatattcaaaataattcactgtctgattttcaaaacattccagtacaggacagtttaggaagttcaaataatcctttgtacttaactagctcgttggaaaatatgactgttgataatttaaatgctagtaaagaaactgaagttggaaatgtttctttagttgaacaaagtgccaagaatcacacttttaaaaatgataatttgcagttttctcagtgtgaaagtccatccctaactgaactgtttcaggaacacaaagaaaacaatataagccagtgctttactttatctgacctttgtaaccagtcatctgccagtttcacagatctaagtttgggatcctttcccctgtcacaattagcaaatcgctgtcagtcttcacccggaatatcagaattaacaggatctctgtcgtcattggcatttcataaagcttctcccacaagagaccttgagaatttgtcactttctgaattgattgcagaaacaattgatgtagacaactctcagattaagaaagagtcctttgaggtcagtttatctgaagtgaggtctcctggaatagattcaaatattgatcttagtgtccttataaaaaacccagattttgttccaaagcctgtagtagacccatccattgctccatcatcacgaactaaagttctaagttcaaagctagggaagaattccaattttgctaaggataataagaaaaacaacaaaggctctctgactaggaaaccacctttttctctctcttggaccaaggcccttgctgctagaccttcagcttttgcctcaacactgtgtcttcgttacccactgaaaagctgcaagcgacgcacccttgacctctataagacttttctttatagtagacaagttcaagatgtaaaggacaaagaaataagtccacttgtagcaataacaccatttgacttcaaatcagcatcacctgatgacattgtaaaagctaatcaaaaaaaagcatttactagagaatagtaacaaaaggaaaacttgattgctgttgtagagctttttatttttaattaaagtcttcagaggatcactttatattatgggattcaaattctgatttttatgaaaattgtcgtaggtcagttgattagttgatacgtatttttgcactgattttttttttaactatgtcttctttcagtgataactggctttatttaagttggtaacctatactgagtatatgtttacaaagtggatatggaaacttgatgttgtgaaatcagacctcatatatttttgtttgaagcattcaactttctatgttttttataatgaaatatttttttctatgaaatatttttgtgctttgttcttaaacgaaaatgccagcacttgggattattatagtttagtgtgaagattattcttatgtggcacagcataactgagatgttatattttaaaatatgatataattcctagtttcattatttttctgtaaatactaaaatttttctattagaaaatcttaaaattcctgacttttgagagtactgtggagattgttgaaatacatttttgataataataaaatgaaaatcttttaagggaccatgtaaatatagaagttggattaatatgtgaattatttttatacatttttaaaaaccatttgtcctaagtatacactttaaaataaatatataaaaagtgttttcaag

SEQ ID NO: 57387 - DNA, 1899 bp, Artificial Sequence
  derived and/or modified sequence
atggcccggcacagaaatgtgcggggctacaactatgatgaggactttgaagatgatgacctgtatggccagagcgtggaggatgactactgcatcagccccagcacagctgcccagttcatctacagccggcgggacaagcccagcgtggagcctgtggaggagtatgactatgaggacctgaaggagagcagcaacagcgtgagcaaccaccagctgagcggctttgaccaggcccggctgtacagctgcctggaccacatgagggaggtgctgggagatgctgtgcctgatgagatcctgattgaggccgtgctgaagaacaagtttgatgtgcagaaggccctgtctggagtgctggagcaggacagagtgcagagcctgaaggacaagaatgaggccaccgtgtccacaggcaagatcgccaagggcgtgctcttcagcagcagcgaggtgtctgctgacaacgtgcagagcagctacccccagagcgccaaccacctggactacagcagcaagccctttgattttgccagctctgtgggcaagtatggcctgagccacaacagctctgtgcccacccactgcctgctgcacaggaagaagaagctggacaccaggaagtctgagaagaagctggagagctgcaagctgaccaaggagctgagcctggccaacctgattcatgacatgagccgggacagctgtgagagccagcccagcgtgcggctgagcagcacagacagcctggagagcctgctgagcaagaacctggatgctgacctgctgcggccccacgccagcgagtgcatcagcaaggatgacagcgccttcaaggagatcccagacctgaagaccatcatcatcaagggcaccacccccaacaacagcctgtacatccagaacaacagcctgagtgacttccagaacatccctgtgcaggacagcctgggcagcagcaacaaccccctgtacctgaccagcagcctggagaacatgacagtggacaacctgaatgccagcaaggagacagaggtgggcaatgtgtccctggtggagcagagcgccaagaaccacaccttcaagaatgacaacctgcagttcagccagtgtgagagccccagcctgacagagctgttccaggagcacaaggagaacaacatcagccagtgcttcaccctgagtgacctgtgcaaccagagcagcgccagcttcacagacctgagcctgggcagcttccccctgagccagctggccaaccgctgccagagcagccctggcatcagcgagctgaccggcagcctgagcagcctggccttccacaaggccagccccacccgggacctggagaacctgagcctgtctgagctgattgctgagaccattgatgtggacaacagccagatcaagaaggagagctttgaggtgtccctgtctgaggtgcgcagccctggcatcgacagcaacatcgacctgtctgtgctgatcaagaacccagactttgtgcccaagcctgtggtggaccccagcatcgcccccagcagcaggaccaaggtgctgagcagcaagctgggcaagaacagcaactttgccaaggacaacaagaagaacaacaagggcagcctgaccaggaagccacccttcagcctgtcctggaccaaggccctggccgcccggcccagcgcctttgccagcaccctgtgcctgcgctaccccctgaagagctgcaagaggaggaccctggacctgtacaagaccttcctgtacagccggcaggtgcaggatgtgaaggacaaggagatcagccccctggtggccatcaccccatttgacttcaagagcgccagcccagatgacatcgtgaaggccaaccagaagaaggccttcacccgggagtag

SEQ ID NO: 57388 - DNA, 1899 bp, Artificial Sequence
  derived and/or modified sequence
atggcccggcaccggaacgtgcggggctacaactacgacgaggacttcgaggacgacgacctatacggccagtctgtagaggacgattactgtataagcccgagtactgcggctcagttcatttactctaggcgagacaagcctagcgtggaacctgtggaggagtacgactacgaagatctgaaggagtcatccaattctgtgtccaaccaccaactttctggcttcgatcaagctagactctacagttgtctcgaccatatgcgggaggtactcggcgacgccgtacccgacgaaattctgattgaagctgttttgaagaacaagttcgacgtgcagaaagccctgtcaggagtgctggagcaggatagggtccagtctctgaaagataaaaacgaggctacggtttccactgggaagatcgcaaagggggtgctgttcagttcttctgaagtgagcgctgataatgtacagtcatcatatccccagtccgccaaccacctggactacagcagcaagccttttgacttcgcatcctctgtgggaaagtatggcctcagccacaatagctcagttcccacccactgtctgctgcatcgcaaaaagaagctggatactagaaagagcgaaaaaaaactcgagtcttgcaagctgacgaaggaacttagcctggctaatctcatccacgatatgagcagagattcatgcgaatcacagccctccgtgagactgagcagtactgacagcctagaatcactcctgtctaaaaatttagatgccgatttgcttagaccacacgcgagcgagtgtataagtaaagatgatagtgcctttaaagagattccagacctcaagacaattatcattaagggcacaacacctaacaacagcctttacatacaaaacaattcactctccgactttcagaatattcctgtccaagacagtctggggtcaagcaataacccactctacctcaccagctcattagaaaacatgacagtagataatctcaacgcctcaaaggaaactgaagtcggtaacgtctctctcgtcgagcagtccgccaaaaaccatacctttaagaacgataacctacagttctctcagtgcgaaagtccttcccttacagaactgtttcaagaacacaaggagaacaacatctcacagtgcttcacactgagtgacctgtgtaaccagtcttctgctagctttacggatctgtccctcggtagcttccctttaagccaattggcaaataggtgtcaatcctctcccggcatctccgaattgactggatcgctgtcttcactagcctttcataaagcatcccctacgagggacttggaaaacttgagcctgtcggagctgatagcagagacgatcgacgtggacaatagccagatcaagaaggagtctttcgaagtcagtttgtctgaggtcagatccccaggaattgatagtaatatcgacttatcagtactaatcaaaaatccagactttgtgcctaaaccagtcgtggatcctagcatagccccaagcagccggacgaaggtgctgtcgtcgaagttagggaaaaactcaaacttcgccaaggacaataagaagaacaataagggttcactgacgagaaaacctccattttccctatcatggactaaagcacttgccgcacgcccgagtgccttcgcctccacactgtgtctgcgttatccgctcaagtcctgtaagcggagaacccttgacctgtacaagacattcttgtactcccggcaggttcaggatgtcaaggataaggagataagcccacttgttgcaatcacacccttcgatttcaaatctgcatcacccgacgacatcgtcaaggccaaccaaaaaaaagccttcactagagagtag

SEQ ID NO: 57389 - DNA, 1899 bp, Artificial Sequence
  derived and/or modified sequence
atggccagacataggaatgtgcggggatacaactacgacgaggactttgaggacgatgacttgtacggacaaagtgtcgaagacgactattgcatctcccctagtacagccgcacagttcatttacagcagacgagacaaaccgtctgtggagccagtggaggagtatgattacgaagatctgaaggagtcctcaaactctgtcagtaatcaccagctgtccggctttgaccaagccaggctgtatagctgtctggaccacatgcgcgaagttctaggcgacgccgtacccgatgaaatcctgatagaagcggtgctcaagaataaattcgatgtccagaaggctctgagcggggtgttggagcaggacagggtgcagagtctgaaggataaaaacgaagccaccgtgagcaccgggaagattgccaaaggggttctgttttccagctccgaagtgtcagctgacaacgtccagtcatcgtatccacaatcagccaaccacttggattattcaagcaagccctttgattttgcctcctccgtgggcaagtacggtctgagccacaattccagtgtgccaacccactgtctgctgcacagaaagaagaaactggatacgcgcaagtcagagaagaaactagagtcttgcaagctgactaaagaactgtctcttgctaacttgattcatgacatgtctagggatagctgtgaaagtcaaccctccgtgcgactgtcttccaccgattctctggagagcttgctctcaaaaaatctggacgctgatctactccggccacacgcctccgaatgtatttctaaggacgactcagcattcaaggaaattcccgatctgaagactattatcatcaagggcacaaccccaaataactccttgtacatccagaacaactctctctcagattttcagaatattcctgtccaagatagtctcggttctagcaataaccccctgtatttaactagtagcctggaaaacatgaccgtggacaatctgaatgccagtaaggagaccgaggttggcaacgtttcactggttgaacagtccgccaaaaatcataccttcaagaatgacaatctccagtttagccagtgcgaaagtccaagcctcacggaactgtttcaagagcataaagagaacaatatatcccagtgctttacactgtcagacctgtgcaaccaatctagcgcttcttttactgatctgtctctagggtccttccctctcagccagctcgccaatcgttgccaatcctctcccggaataagcgaactaactggatcgttgagtagcttggcctttcacaaagcaagccccacacgcgacctcgagaatctgtcgctcagcgagctgatcgccgaaactatcgatgtggacaattctcagattaagaaggagtcattcgaagtttccttaagcgaggtacggtcccctggtatcgattctaacatagacctatccgtcctgatcaagaaccctgactttgttcctaaacctgttgtggacccatcgattgccccttcctctagaacaaaagtactgtcgtcaaaactgggcaaaaacagcaattttgctaaagataataagaaaaacaacaaagggtctctcacgagaaagcctccattttccctgtcctggacaaaagctctcgcagccagaccgagcgcctttgccagcacactgtgtcttcgctacccactaaaaagttgtaagcgtcggacactggacttgtacaaaacatttctctacagccgccaggtgcaagatgtgaaagacaaggagatatctcctctcgtagccataacgccgttcgatttcaagtcagcatctccagacgatatcgtgaaagctaatcaaaagaaggcctttacgcgggagtag

SEQ ID NO: 57390 - DNA, 1899 bp, Artificial Sequence
  derived and/or modified sequence
atggccagacacagaaacgtgagaggctacaactacgacgaggacttcgaggacgacgacctgtacggccagagcgtggaggacgactactgcatcagccccagcaccgccgcccagttcatctacagcagaagagacaagcccagcgtggagcccgtggaggagtacgactacgaggacctgaaggagagcagcaacagcgtgagcaaccaccagctgagcggcttcgaccaggccagactgtacagctgcctggaccacatgagagaggtgctgggcgacgccgtgcccgacgagatcctgatcgaggccgtgctgaagaacaagttcgacgtgcagaaggccctgagcggcgtgctggagcaggacagagtgcagagcctgaaggacaagaacgaggccaccgtgagcaccggcaagatcgccaagggcgtgctgttcagcagcagcgaggtgagcgccgacaacgtgcagagcagctacccccagagcgccaaccacctggactacagcagcaagcccttcgacttcgccagcagcgtgggcaagtacggcctgagccacaacagcagcgtgcccacccactgcctgctgcacagaaagaagaagctggacaccagaaagagcgagaagaagctggagagctgcaagctgaccaaggagctgagcctggccaacctgatccacgacatgagcagagacagctgcgagagccagcccagcgtgagactgagcagcaccgacagcctggagagcctgctgagcaagaacctggacgccgacctgctgagaccccacgccagcgagtgcatcagcaaggacgacagcgccttcaaggagatccccgacctgaagaccatcatcatcaagggcaccacccccaacaacagcctgtacatccagaacaacagcctgagcgacttccagaacatccccgtgcaggacagcctgggcagcagcaacaaccccctgtacctgaccagcagcctggagaacatgaccgtggacaacctgaacgccagcaaggagaccgaggtgggcaacgtgagcctggtggagcagagcgccaagaaccacaccttcaagaacgacaacctgcagttcagccagtgcgagagccccagcctgaccgagctgttccaggagcacaaggagaacaacatcagccagtgcttcaccctgagcgacctgtgcaaccagagcagcgccagcttcaccgacctgagcctgggcagcttccccctgagccagctggccaacagatgccagagcagccccggcatcagcgagctgaccggcagcctgagcagcctggccttccacaaggccagccccaccagagacctggagaacctgagcctgagcgagctgatcgccgagaccatcgacgtggacaacagccagatcaagaaggagagcttcgaggtgagcctgagcgaggtgagaagccccggcatcgacagcaacatcgacctgagcgtgctgatcaagaaccccgacttcgtgcccaagcccgtggtggaccccagcatcgcccccagcagcagaaccaaggtgctgagcagcaagctgggcaagaacagcaacttcgccaaggacaacaagaagaacaacaagggcagcctgaccagaaagccccccttcagcctgagctggaccaaggccctggccgccagacccagcgccttcgccagcaccctgtgcctgagataccccctgaagagctgcaagagaagaaccctggacctgtacaagaccttcctgtacagcagacaggtgcaggacgtgaaggacaaggagatcagccccctggtggccatcacccccttcgacttcaagagcgccagccccgacgacatcgtgaaggccaaccagaagaaggccttcaccagagagtag

SEQ ID NO: 57391 - protein, 467 aa, Artificial Sequence
  derived and/or modified sequence
MEHRIVGPGPYRATRLWNETVELFRAKMPLRKHRCRFKSYEHCFTAAEAVDWLHELLRCSQNFGPEVTRKQTVQLLKKFLKNHVIEDIKGKWGEEDFEDNRHLYRFPPSSPLKPYPKKPPNQKDVIKFPEWNDLPPGTSQENIPVRPVVMNSEMWYKRHSIAIGEVPACRLVHRRQLTEANVEEIWKSMTLSYLQKILGLDSLEEVLDVKLVNSKFIIHNVYSVSKQGVVILDDKSKELPHWVLSAMKCLANWPNCSDLKQPMYLGFEKDVFKTIADYYGHLKEPLLTFHLFDAFVSVLGLLQKEKVAVEAFQICCLLLPPENRRKLQLLMRMMARICLNKEMPPLCDGFGTRTLMVQTFSRCILCSKDEVDLDELLAARLVTFLMDNYQEILKVPLALQTSIEERVAHLRRVQFQKSYPEVYQERFPTPESAALLFPEKPKPKPQLLMWALKKPFQPFQRTRSFRM

SEQ ID NO: 57392 - protein, 440 aa, Artificial Sequence
  derived and/or modified sequence
MPLRKHRCRFKSYEHCFTAAEAVDWLHELLRCSQNFGPEVTRKQTVQLLKKFLKNHVIEDIKGKWGEEDFEDNRHLYRFPPSSPLKPYPKKPPNQKDVIKFPEWNDLPPGTSQENIPVRPVVMNSEMWYKRHSIAIGEVPACRLVHRRQLTEANVEEIWKSMTLSYLQKILGLDSLEEVLDVKLVNSKFIIHNVYSVSKQGVVILDDKSKELPHWVLSAMKCLANWPNCSDLKQPMYLGFEKDVFKTIADYYGHLKEPLLTFHLFDAFVSVLGLLQKEKVAVEAFQICCLLLPPENRRKLQLLMRMMARICLNKEMPPLCDGFGTRTLMVQTFSRCILCSKDEVDLDELLAARLVTFLMDNYQEILKVPLALQTSIEERVAHLRRVQFQKSYPEVYQERFPTPESAALLFPEKPKPKPQLLMWALKKPFQPFQRTRSFRM

SEQ ID NO: 57393 - DNA, 1404 bp, Artificial Sequence
  derived and/or modified sequence
atggaacaccgaattgttgggccagggccctaccgggcaactcgcctgtggaatgaaactgtggagctgttccgtgcgaagatgccattgcgtaaacaccgttgcaggttcaagtcctacgagcactgttttactgcagcagaagcagtggactggctacatgagctgctgcgctgctcacagaacttcggacccgaggtcacccggaagcagactgtacaactgctgaaaaagttccttaaaaatcatgttatcgaagacattaaggggaaatggggggaagaggattttgaggacaacaggcacctgtacagattccccccttcaagccctcttaagccctatcccaaaaagccccccaatcagaaggacgtcattaaatttcctgagtggaatgatcttccccctggcactagccaggaaaatatcccagtgcggcccgttgtgatgaacagcgaaatgtggtataaaaggcactcaatagcaataggcgaggtgcccgcctgcaggctcgtacaccgcagacaacttacagaggccaacgtggaagaaatatggaaaagcatgacgctgtcatatcttcaaaaaatcctcggtcttgactctctggaagaggtcctggacgtaaaactggtgaatagtaagtttatcattcacaacgtgtactccgtctctaagcagggcgtggtcattctcgacgacaagagcaaggagttgccacactgggtgctgtccgccatgaagtgcttagccaattggcccaactgcagtgacctgaagcagccaatgtacctcggcttcgaaaaggatgtattcaaaacaattgctgactactatggccatctcaaggagcccttattaactttccatctgtttgatgcgttcgtatccgtgctcggcctgctgcagaaggaaaaggtggcggtggaggcgttccagatctgttgcttacttctgccacctgagaaccgcagaaagttacaattactaatgagaatgatggcgcgaatttgcctgaacaaagaaatgcctcccctatgcgatggctttggtacaagaacattaatggtgcagacgttcagcagatgcatattgtgtagcaaggacgaagtcgacctcgacgagctgctggctgccaggctcgtcactttcctcatggacaactaccaggaaatcctcaaagtgcccttagcactgcagacatccatcgaggagcgcgtggcgcacctccgccgcgtgcaattccaaaagtcttacccggaagtctatcaggagagattccccacacctgagtcggccgcactgttgtttcctgaaaagcctaaaccaaaaccacagctcttaatgtgggccctcaaaaaacctttccaacccttccagcgaacgcggtctttcaggatgtag

SEQ ID NO: 57394 - DNA, 1323 bp, Artificial Sequence
  derived and/or modified sequence
atgcctttgagaaagcatagatgccgcttcaagagctatgaacactgcttcaccgccgcagaggcggtcgactggctccacgagctgttgcgctgctctcaaaattttggccctgaggtaacacgaaagcagaccgtgcagctgctgaaaaaattcctgaagaaccacgttattgaggatatcaaggggaagtggggcgaagaggatttcgaggataacagacacctttatcgctttccaccgtccagcccgctgaaaccatatcccaaaaaaccgccgaaccagaaagacgtcattaagtttccagaatggaacgatctgcccccaggaactagtcaagagaatattccagtccgacctgtagtgatgaacagtgagatgtggtataaaagacactctatagcaatcggggaggtgccggcctgtagactcgttcataggaggcagctcaccgaagccaacgtggaagaaatctggaaatccatgacgctgtcatacctgcagaaaatcttgggactggatagtctggaagaggttctggacgtcaagcttgttaactccaaatttatcatccataacgtgtactccgtcagcaaacagggtgtagttattctggacgacaaaagcaaggaactccctcactgggtcctctccgctatgaagtgccttgcaaattggccgaactgttcagacttgaaacagccaatgtatctcggctttgagaaagatgtcttcaagacaattgccgattactacggacatctgaaggaacccctgctgaccttccaccttttcgacgctttcgtgagcgtgctgggtctcctgcagaaagaaaaagtggcagtggaggccttccagatatgttgcctgctcctcccgccagagaatcgtagaaaactacagctgctgatgagaatgatggctcggatctgtctgaataaggaaatgcctcccctctgcgacgggtttggaaccaggacactgatggtccagacgttcagccgctgcatcctttgcagcaaagacgaagtcgatctcgacgaattgttggccgctcgccttgtgacattccttatggataactaccaagagatacttaaagtgcccctagccctccagacatctatcgaagaaagggtagcccaccttagaagagtccagttccagaagtcctatccagaagtgtaccaggaacgctttccaacccccgagagtgccgccctcctatttccagagaaacctaaacccaaacctcaactgctgatgtgggcattgaaaaaacccttccagccattccagcggaccagatctttccggatgtag

SEQ ID NO: 57395 - DNA, 1404 bp, Artificial Sequence
  derived and/or modified sequence
atggagcacagaattgtgggccctggcccctaccgggccacccggctgtggaatgagaccgtggagctgttccgggccaagatgcccctgaggaagcaccgctgccgcttcaagagctatgagcactgcttcaccgctgctgaggccgtggactggctgcacgagctgctgcgctgcagccagaactttggacctgaggtgaccaggaagcagacagtgcagctgctgaagaagttcctgaagaaccacgtgattgaggacatcaagggcaagtggggcgaggaggactttgaggacaacagacacctgtaccgcttcccccccagcagccccctgaagccctaccccaagaagccacccaaccagaaggatgtgatcaagtttcctgagtggaatgacctgcccccaggcaccagccaggagaacatccctgtgcggcctgtggtgatgaacagcgagatgtggtacaagaggcacagcatcgccatcggggaggtgcctgcctgccgcctggtgcaccggcggcagctgacagaggccaacgtggaggagatctggaagtccatgaccctgagctacctgcagaagatcctgggcctggacagcctggaggaggtgctggatgtgaagctggtgaacagcaagttcatcatccacaacgtgtacagcgtgtccaagcagggcgtggtgatcctggatgacaagagcaaggagctgccccactgggtgctgagcgccatgaagtgcctggccaactggcccaactgcagcgacctgaagcagcccatgtacctgggctttgagaaggatgtgttcaagaccatcgctgactactacggccacctgaaggagcccctgctgaccttccacctgtttgatgcctttgtgtctgtgctgggcctgctgcagaaggagaaggtggccgtggaggccttccagatctgctgcctgctgctgcccccagagaacagaaggaagctgcagctgctgatgaggatgatggcccgcatctgcctgaacaaggagatgccacccctgtgtgatggcttcggcaccaggaccctgatggtgcagaccttcagccgctgcatcctgtgcagcaaggatgaggtggacctggatgagctgctggccgcccggctggtgaccttcctgatggacaactaccaggagatcctgaaggtgcccctggccctgcagaccagcattgaggagcgggtggcccacctgcggcgggtgcagttccagaagagctacccagaggtgtaccaggagcgcttccccaccccagagagcgctgccctgctcttccctgagaagcccaagcccaagccccagctgctgatgtgggccctgaagaagcccttccagcccttccagaggaccaggagcttcaggatgtag

SEQ ID NO: 57396 - DNA, 1323 bp, Artificial Sequence
  derived and/or modified sequence
atgcccctgaggaagcaccgctgccgcttcaagagctatgagcactgcttcaccgctgctgaggccgtggactggctgcacgagctgctgcgctgcagccagaactttggacctgaggtgaccaggaagcagacagtgcagctgctgaagaagttcctgaagaaccacgtgattgaggacatcaagggcaagtggggcgaggaggactttgaggacaacagacacctgtaccgcttcccccccagcagccccctgaagccctaccccaagaagccacccaaccagaaggatgtgatcaagtttcctgagtggaatgacctgcccccaggcaccagccaggagaacatccctgtgcggcctgtggtgatgaacagcgagatgtggtacaagaggcacagcatcgccatcggggaggtgcctgcctgccgcctggtgcaccggcggcagctgacagaggccaacgtggaggagatctggaagtccatgaccctgagctacctgcagaagatcctgggcctggacagcctggaggaggtgctggatgtgaagctggtgaacagcaagttcatcatccacaacgtgtacagcgtgtccaagcagggcgtggtgatcctggatgacaagagcaaggagctgccccactgggtgctgagcgccatgaagtgcctggccaactggcccaactgcagcgacctgaagcagcccatgtacctgggctttgagaaggatgtgttcaagaccatcgctgactactacggccacctgaaggagcccctgctgaccttccacctgtttgatgcctttgtgtctgtgctgggcctgctgcagaaggagaaggtggccgtggaggccttccagatctgctgcctgctgctgcccccagaaaatagaaggaagctgcagctgctgatgaggatgatggcccgcatctgcctgaacaaggagatgccacccctgtgtgatggcttcggcaccaggaccctgatggtgcagaccttcagccgctgcatcctgtgcagcaaggatgaggtggacctggatgagctgctggccgcccggctggtgaccttcctgatggacaactaccaggagatcctgaaggtgcccctggccctgcagaccagcattgaggagcgggtggcccacctgcggcgggtgcagttccagaagagctacccagaggtgtaccaggagcgcttccccaccccagagagcgctgccctgctcttccctgagaagcccaagcccaagccccagctgctgatgtgggccctgaagaagcccttccagcccttccagaggaccaggagcttcaggatgtag

SEQ ID NO: 57397 - DNA, 1404 bp, Artificial Sequence
  derived and/or modified sequence
atggagcaccggatcgtgggccccggcccctaccgggccacccggctgtggaacgagacagtggagcttttcagggcaaaaatgcctctcagaaagcaccggtgcagatttaaaagctacgagcactgtttcactgcagcggaagcggtagattggctccatgagttgcttcgatgtagccagaatttcgggcctgaagtgaccagaaagcagaccgtgcagctgctaaaaaaatttttgaaaaatcatgtgatcgaggacatcaaaggcaagtggggcgaggaggattttgaagacaatcggcatctataccgtttccctccatcaagccctttgaagccatacccaaagaaaccaccaaaccagaaagacgtcattaaattccccgagtggaatgacttgccacctggcacatcccaggagaacatccccgtccgcccggtagtgatgaactctgaaatgtggtataaaaggcattcgattgcaatcggggaagtacccgcctgtcggcttgtccacaggaggcagttgactgaggcaaacgtggaagaaatttggaagagtatgactctgagctacctgcagaaaattctgggcctggattcccttgaagaagtcctggatgtgaagctcgtcaacagtaagtttataattcacaacgtgtactcggtctcgaagcaaggcgtggtgatcctcgacgataagagcaaggagctcccccactgggtgttaagcgcaatgaagtgtctagccaactggccgaattgcagtgacctgaaacagcctatgtatctgggcttcgaaaaggatgtgttcaagactatagccgattactacggacatctcaaggaacctctgctgactttccatctgttcgatgcctttgtttccgttctgggtctactccagaaggagaaagttgctgtggaggcgtttcagatctgctgtcttctgttgccccccgagaaccgtagaaaactgcagttgctgatgcgcatgatggcacgcatttgcctgaataaggagatgccacctctatgtgatggtttcggcacaaggacactgatggtgcagactttttcccgctgtatcctgtgctctaaagatgaagtggaccttgatgagttactggcagccaggctggtgacatttctcatggataactaccaagaaatccttaaggtgccactggctcttcaaacttccatagaagagcgggttgcacacctccggcgcgtccagttccagaagtcatatccagaagtctaccaggagcgcttcccaaccccagagtccgcagccctgctcttcccagaaaaaccaaaaccaaagcctcagttgctgatgtgggccctgaaaaagcctttccagccgttccagagaaccaggagcttccgcatgtag

SEQ ID NO: 57398 - DNA, 1323 bp, Artificial Sequence
  derived and/or modified sequence
atgcccctgcggaagcaccggtgccggttcaagagctacgagcactgcttcaccgccgcggaagctgtggattggctccatgagctgctccgctgttctcagaactttggacctgaggtaactagaaagcagactgtgcagttgctgaaaaagtttcttaagaatcatgttatcgaggacatcaaaggcaagtggggggaggaagactttgaggacaatcgccacctgtaccggttcccacccagcagcccactgaagccttatccaaagaaacctccaaaccaaaaggatgtaattaagtttccagaatggaatgatctgccaccgggtactagtcaggaaaacattcctgtgcggccggtggtgatgaactcagagatgtggtataagagacactcaatcgccatcggagaggtgccagcctgtaggctcgtccacagacgccagttgacagaggctaatgtggaagaaatatggaaatcaatgaccctgtcttacctccaaaaaattctcggcctggactcgttggaggaggtccttgacgttaagctggtcaactctaagtttattatacacaatgtttactccgtcagcaaacagggcgttgtcattctggatgacaaatccaaggaactgccacattgggtgctaagcgccatgaagtgcctggcaaattggcctaactgctccgacctgaagcagccaatgtatttagggtttgagaaggacgtctttaagactattgcagactattatggacatcttaaggagcccctgctgacgttccatctctttgacgctttcgtaagtgttctgggccttttgcagaaggagaaggtcgctgtggaagcttttcagatctgttgcctgttactgcctccggagaataggagaaagttgcagctgcttatgaggatgatggcccggatctgcctgaacaaagaaatgcccccgctgtgcgacggattcggcactcgcaccctcatggttcagacgttctcgagatgtatcctgtgctcaaaggatgaggtggacctcgatgagctccttgctgctcgtctggtgactttcttgatggacaactatcaggagatactcaaagtgcctctcgccctccaaacctcaatagaagaacgagtcgcgcacttgcgcagagtccagtttcagaagtcgtacccggaagtgtatcaagagagattccccaccccagagagtgccgctctcctgttcccagagaaaccaaaaccaaagccccagctgctgatgtgggcactcaaaaagccctttcaaccctttcagcgtacccgttcatttaggatgtag

SEQ ID NO: 57399 - DNA, 1404 bp, Artificial Sequence
  derived and/or modified sequence
atggaacaccgcattgtagggcctgggccataccgcgctacccggttgtggaatgagacagtggagctgtttagggccaagatgccacttcgcaagcatcgatgtcgctttaaatcttacgagcattgttttactgcagctgaagcagtcgactggcttcatgaactcttaaggtgcagccagaatttcggccctgaggtgacccggaagcagaccgtccagctcttgaagaaatttttaaagaatcacgtcattgaagacattaaggggaagtggggagaggaagactttgaagacaatcggcacctgtaccggttccctccctcctcaccgcttaaaccgtatcctaagaaacccccaaaccaaaaagatgttattaagtttcccgagtggaacgacctgccccctggtacaagtcaggagaatatccccgtgaggcctgtcgtgatgaactcggagatgtggtacaagcgtcactccattgctatcggggaggtgccggcttgccgcttggtccatcgcaggcagcttaccgaagccaatgtcgaagagatatggaagtcaatgactctctcgtacctccagaaaattcttgggctggatagcttagaagaggtgctcgatgtcaagcttgttaacagcaagtttatcattcacaatgtatattcagtcagtaagcagggtgtggtgatcctggatgataagtccaaggaactgccacattgggttttgtcagcgatgaagtgtctggccaattggcccaactgctcggacctgaagcagccaatgtacctggggtttgagaaagacgtattcaagactatcgcagattactatggtcacctgaaggagcccctgctgaccttccacctatttgacgcatttgtgtccgtactgggcttgctgcagaaagaaaaagtggccgttgaagcttttcagatctgttgtttgctcctccctccagagaaccgaagaaaactgcaactgctgatgcgcatgatggctaggatatgtctgaataaagaaatgccgccattatgcgacggctttggcacacggactcttatggtgcagacttttagtaggtgtatcctgtgttccaaggacgaggtggacctggacgagttgttggctgcccgtctggtcacctttcttatggacaattaccaggagatcctgaaggtgcccctcgctttacagacaagcattgaagaacgcgtcgctcaccttaggcgcgtgcagttccagaagtcctatccagaggtgtaccaggagaggttccccacacccgagtcagccgcactcctttttcccgaaaagcccaagcctaaacctcagctgctaatgtgggcactcaagaagccattccagccattccagagaacccgctcgtttcgcatgtag

SEQ ID NO: 57400 - DNA, 1323 bp, Artificial Sequence
  derived and/or modified sequence
atgcctctgcgaaaacaccggtgccggttcaagtcctatgagcattgtttcacggctgcagaagcagttgactggctccatgaattgctgcgctgctcacaaaacttcggccctgaagttactaggaaacaaaccgtccagctgctgaaaaagtttctcaaaaaccacgtgattgaggatatcaaaggcaagtggggggaggaagacttcgaagataaccgacacctgtacagatttcctccctccagcccattgaaaccttatccgaagaaaccccctaaccagaaggacgtcataaaattcccagagtggaacgacctaccgcctgggacgagccaggaaaacattccggtccgtccagtggtgatgaatagcgagatgtggtacaagcgccattcgattgccattggagaagtacccgcatgccgattggtgcacaggagacagctgactgaggctaatgtggaggagatatggaagagcatgaccctcagttatctgcaaaaaatcctcggtttagattcacttgaggaagtgttggacgttaagttagtgaacagtaagttcattatccacaacgtttacagcgtgtccaaacagggggttgtgatactagatgacaaatctaaggagttaccccactgggttttgtcagccatgaaatgccttgccaactggccgaactgtagcgacctcaagcagcctatgtatctgggctttgagaaagacgttttcaagacaatagccgactactacggccacctgaaagagcccctgctgactttccatttgttcgatgcttttgtgtctgtgcttggacttctgcagaaggaaaaagtggcagtagaggcctttcaaatttgctgcttgttgcttccgccagaaaatcgacggaaattacagctccttatgaggatgatggccaggatttgcctaaataaggagatgccccctctgtgtgacggattcgggactcggactctgatggtccagacgttctcccgctgtatcttatgttcaaaggacgaagtcgatctggacgagttattggcagcgagactggtcacgttcctgatggataattaccaagagattctcaaagtcccgctcgctctgcagacatccatcgaggagcgcgtggcgcatttacggagggtgcagttccaaaagtcctatcccgaggtgtaccaggaacgctttccaacaccagagtcggcagcgctccttttcccagaaaagccaaaaccaaaaccgcagcttctgatgtgggccctgaaaaagccctttcagccattccagcgcacccggtctttcagaatgtag

SEQ ID NO: 57401 - DNA, 1404 bp, Artificial Sequence
  derived and/or modified sequence
atggagcacagaatcgtgggccccggcccctacagagccaccagactgtggaacgagaccgtggagctgttcagagccaagatgcccctgagaaagcacagatgcagattcaagagctacgagcactgcttcaccgccgccgaggccgtggactggctgcacgagctgctgagatgcagccagaacttcggccccgaggtgaccagaaagcagaccgtgcagctgctgaagaagttcctgaagaaccacgtgatcgaggacatcaagggcaagtggggcgaggaggacttcgaggacaacagacacctgtacagattcccccccagcagccccctgaagccctaccccaagaagccccccaaccagaaggacgtgatcaagttccccgagtggaacgacctgccccccggcaccagccaggagaacatccccgtgagacccgtggtgatgaacagcgagatgtggtacaagagacacagcatcgccatcggcgaggtgcccgcctgcagactggtgcacagaagacagctgaccgaggccaacgtggaggagatctggaagagcatgaccctgagctacctgcagaagatcctgggcctggacagcctggaggaggtgctggacgtgaagctggtgaacagcaagttcatcatccacaacgtgtacagcgtgagcaagcagggcgtggtgatcctggacgacaagagcaaggagctgccccactgggtgctgagcgccatgaagtgcctggccaactggcccaactgcagcgacctgaagcagcccatgtacctgggcttcgagaaggacgtgttcaagaccatcgccgactactacggccacctgaaggagcccctgctgaccttccacctgttcgacgccttcgtgagcgtgctgggcctgctgcagaaggagaaggtggccgtggaggccttccagatctgctgcctgctgctgccccccgagaacagaagaaagctgcagctgctgatgagaatgatggccagaatctgcctgaacaaggagatgccccccctgtgcgacggcttcggcaccagaaccctgatggtgcagaccttcagcagatgcatcctgtgcagcaaggacgaggtggacctggacgagctgctggccgccagactggtgaccttcctgatggacaactaccaggagatcctgaaggtgcccctggccctgcagaccagcatcgaggagagagtggcccacctgagaagagtgcagttccagaagagctaccccgaggtgtaccaggagagattccccacccccgagagcgccgccctgctgttccccgagaagcccaagcccaagccccagctgctgatgtgggccctgaagaagcccttccagcccttccagagaaccagaagcttcagaatgtag

SEQ ID NO: 57402 - DNA, 1323 bp, Artificial Sequence
  derived and/or modified sequence
atgcccctgagaaagcacagatgcagattcaagagctacgagcactgcttcaccgccgccgaggccgtggactggctgcacgagctgctgagatgcagccagaacttcggccccgaggtgaccagaaagcagaccgtgcagctgctgaagaagttcctgaagaaccacgtgatcgaggacatcaagggcaagtggggcgaggaggacttcgaggacaacagacacctgtacagattcccccccagcagccccctgaagccctaccccaagaagccccccaaccagaaggacgtgatcaagttccccgagtggaacgacctgccccccggcaccagccaggagaacatccccgtgagacccgtggtgatgaacagcgagatgtggtacaagagacacagcatcgccatcggcgaggtgcccgcctgcagactggtgcacagaagacagctgaccgaggccaacgtggaggagatctggaagagcatgaccctgagctacctgcagaagatcctgggcctggacagcctggaggaggtgctggacgtgaagctggtgaacagcaagttcatcatccacaacgtgtacagcgtgagcaagcagggcgtggtgatcctggacgacaagagcaaggagctgccccactgggtgctgagcgccatgaagtgcctggccaactggcccaactgcagcgacctgaagcagcccatgtacctgggcttcgagaaggacgtgttcaagaccatcgccgactactacggccacctgaaggagcccctgctgaccttccacctgttcgacgccttcgtgagcgtgctgggcctgctgcagaaggagaaggtggccgtggaggccttccagatctgctgcctgctgctgccccccgagaacagaagaaagctgcagctgctgatgagaatgatggccagaatctgcctgaacaaggagatgccccccctgtgcgacggcttcggcaccagaaccctgatggtgcagaccttcagcagatgcatcctgtgcagcaaggacgaggtggacctggacgagctgctggccgccagactggtgaccttcctgatggacaactaccaggagatcctgaaggtgcccctggccctgcagaccagcatcgaggagagagtggcccacctgagaagagtgcagttccagaagagctaccccgaggtgtaccaggagagattccccacccccgagagcgccgccctgctgttccccgagaagcccaagcccaagccccagctgctgatgtgggccctgaagaagcccttccagcccttccagagaaccagaagcttcagaatgtag

SEQ ID NO: 57403 - DNA, 1569 bp, Artificial Sequence
  derived and/or modified sequence
atcagcgctggcgcggctgcggccgctgctgcctacgcgccatggagcatcgcatcgtggggcccgggccgtaccgagctaccaggctgtggaatgagaccgtggagctttttcgtgctaagatgccgttacggaaacatcgctgtcgtttcaagagctatgagcattgtttcacagcggccgaagctgtggattggctgcatgagctgctgaggtgcagtcaaaacttcggccctgaagtgacccgcaaacaaacggtccagctgctaaaaaaattcctgaagaatcacgttattgaagacatcaagggaaaatggggtgaggaagattttgaagacaatcgtcacttatacagatttcctccttcttcacccctgaaaccatatccaaagaagcccccaaaccaaaaggatgttattaaatttccagaatggaatgatctcccaccaggcacttcacaagagaacatcccagtgaggccagttgtgatgaattctgagatgtggtacaagcgtcacagtattgcaattggagaggtgccagcttgccgtcttgtccaccgcagacagctgacagaggccaatgtagaagagatatggaagtctatgacattatcatacttacagaaaattcttggcctggattccttagaagaagttttagacgtcaaacttgtcaattcgaagttcatcatccataatgtatatagtgttagcaagcagggagttgttattcttgatgacaagtcaaaagaacttcctcattgggtgctgtcagctatgaagtgtttggcaaattggcccaactgttctgatttgaagcagcctatgtacttgggatttgaaaaagatgtctttaaaaccatagctgattactatggtcacttgaaagagcctctacttacatttcatctttttgatgcttttgtcagtgtactgggtttgttacagaaggagaaagtggcagttgaagcatttcagatttgctgccttctcctacctcctgaaaataggagaaagttacagctattgatgaggatgatggcaaggatttgcttaaacaaagagatgccacccctgtgtgatggctttggtacccgaacactgatggttcagacattttcccgttgcatcttgtgttccaaggatgaagtggacttggatgagttattagctgctagattggtaacgtttctgatggacaattaccaggaaattctgaaagtccctttggccttgcagacctctatagaggagcgtgtggctcatctacgaagagtccagtttcagaaatcctatcctgaagtctatcaagaacgatttcctacaccagaaagtgcagcacttctgtttcctgaaaaacccaaaccgaaaccacagctgctaatgtgggcactaaagaagcctttccaaccatttcaaagaactagaagttttcgaatgtaataatacttccacagcaacaggtgctagagaccactgttgttgttttgagtgaatggtggttaggagaaagactttggtggtggaagaaagaaaagcataaaacaaagactactgaaatatagat

SEQ ID NO: 57404 - DNA, 1596 bp, Artificial Sequence
  derived and/or modified sequence
atcagcgctggcgcggctgcggccgctgctgcctacgcgccatggagcatcgcatcgtggggcccgggccgtaccgagctaccaggctgggattgattctgttatcctgaagtggtccagtgtttcttatacttgaagattaggatcattgtgtgtggaatgagaccgtggagctttttcgtgctaagatgccgttacggaaacatcgctgtcgtttcaagagctatgagcattgtttcacagcggccgaagctgtggattggctgcatgagctgctgaggtgcagtcaaaacttcggccctgaagtgacccgcaaacaaacggtccagctgctaaaaaaattcctgaagaatcacgttattgaagacatcaagggaaaatggggtgaggaagattttgaagacaatcgtcacttatacagatttcctccttcttcacccctgaaaccatatccaaagaagcccccaaaccaaaaggatgttattaaatttccagaatggaatgatctcccaccaggcacttcacaagagaacatcccagtgaggccagttgtgatgaattctgagatgtggtacaagcgtcacagtattgcaattggagaggtgccagcttgccgtcttgtccaccgcagacagctgacagaggccaatgtagaagagatatggaagtctatgacattatcatacttacagaaaattcttggcctggattccttagaagaagttttagacgtcaaacttgtcaattcgaagttcatcatccataatgtatatagtgttagcaagcagggagttgttattcttgatgacaagtcaaaagaacttcctcattgggtgctgtcagctatgaagtgtttggcaaattggcccaactgttctgatttgaagcagcctatgtacttgggatttgaaaaagatgtctttaaaaccatagctgattactatggtcacttgaaagagcctctacttacatttcatctttttgatgcttttgtcagtgtactgggtttgttacagaaggagaaagtggcagttgaagcatttcagatttgctgccttctcctacctcctgaaaataggagaaagttacagctattgatgaggatgatggcaaggatttgcttaaacaaagagatgccacccctgtgtgatggctttggtacccgaacactgatggttcagacattttcccgttgcatcttgtgttccaaggatgaagtggacttggatgagttattagctgctagattggtaacgtttctgatggacaattaccaggaaattctgaaagtccctttggccttgcagacctctatagaggagcgtgtggctcatctacgaagagtccagtttcagaaatcctatcctgaagtctatcaagaacgatttcctacaccagaaagtgcagcacttctgtttcctgaaaaacccaaaccgaaaccacagctgctaatgtgggcactaaagaagcctttccaaccatttcaaagaactagaagttttcgaatgtaataatacttccacagcaacaggtgctagagaccactgttgttgttttgagtgaatggtggttaggagaaagactttggtggtggaa

SEQ ID NO: 57405 - protein, 687 aa, Artificial Sequence
  derived and/or modified sequence
MGTENTPGGKASPDPQDVRPSVFHNIKLFVLCHSLLQLAQLMISGYLKSSISTVEKRFGLSSQTSGLLASFNEVGNTALIVFVSYFGSRVHRPRMIGYGAILVALAGLLMTLPHFISEPYRYDNTSPEDMPQDFKASLCLPTTSAPASAPSNGNCSSYTETQHLSVVGIMFVAQTLLGVGGVPIQPFGISYIDDFAHNSNSPLYLGILFAVTMMGPGLAFGLGSLMLRLYVDINQMPEGGISLTIKDPRWVGAWWLGFLIAAGAVALAAIPYFFFPKEMPKEKRELQFRRKVLAVTDSPARKGKDSPSKQSPGESTKKQDGLVQIAPNLTVIQFIKVFPRVLLQTLRHPIFLLVVLSQVCLSSMAAGMAIFLPKFLERQFSITASYANLLIGCLSFPSVIVGIVVGGVLVKRLHLGPVGCGALCLLGMLLCLFFSLPLFFIGCSSHQIAGITHQTSAHPGLELSPSCMEACSCPLDGFNPVCDPSTRVEYITPCHAGCSSWVVQDALDNSQVFYTNCSCVVEGNPVLAGSCDSTCSHLVVPFLLLVSLGSALACLTHTPSFMLILRGVKKEDKTLAVGIQFMFLRILAWMPSPVIHGSAIDTTCVHWALSCGRRAVCRYYNNDLLRNRFIGLQFFFKTGSVICFALVLAVLRQQDKEARTKESRSSPAVEQQLLVSGPGKKPEDSRV

SEQ ID NO: 57406 - protein, 44 aa, Artificial Sequence
  derived and/or modified sequence
MGTENTPGGKASPDPQDVRPSVFHNIKLFVLCHSLLQLAQLMIS

SEQ ID NO: 57407 - protein, 150 aa, Artificial Sequence
  derived and/or modified sequence
MGTENTPGGKASPDPQDVRPSVFHNIKLFVLCHSLLQLAQLMISGYLKSSISTVEKRFGLSSQTSGLLASFNEVGNTALIVFVSYFGSRVHRPRMIGYGAILVALAGLLMTLPHFISEPYRYDNTSPEDMPQDFKASLCLPTTSAPASAP

SEQ ID NO: 57408 - protein, 87 aa, Artificial Sequence
  derived and/or modified sequence
MGTENTPGGKASPDPQDVRPSVFHNIKLFVLCHSLLQLAQLMISGYLKSSISTVEKRFGLSSQTSGLLASFNEVGNTALIVFVSYFG

SEQ ID NO: 57409 - protein, 593 aa, Artificial Sequence
  derived and/or modified sequence
MIGYGAILVALAGLLMTLPHFISEPYRYDNTSPEDMPQDFKASLCLPTTSAPASAPSNGNCSSYTETQHLSVVGIMFVAQTLLGVGGVPIQPFGISYIDDFAHNSNSPLYLGILFAVTMMGPGLAFGLGSLMLRLYVDINQMPEGGISLTIKDPRWVGAWWLGFLIAAGAVALAAIPYFFFPKEMPKEKRELQFRRKVLAVTDSPARKGKDSPSKQSPGESTKKQDGLVQIAPNLTVIQFIKVFPRVLLQTLRHPIFLLVVLSQVCLSSMAAGMAIFLPKFLERQFSITASYANLLIGCLSFPSVIVGIVVGGVLVKRLHLGPVGCGALCLLGMLLCLFFSLPLFFIGCSSHQIAGITHQTSAHPGLELSPSCMEACSCPLDGFNPVCDPSTRVEYITPCHAGCSSWVVQDALDNSQVFYTNCSCVVEGNPVLAGSCDSTCSHLVVPFLLLVSLGSALACLTHTPSFMLILRGVKKEDKTLAVGIQFMFLRILAWMPSPVIHGSAIDTTCVHWALSCGRRAVCRYYNNDLLRNRFIGLQFFFKTGSVICFALVLAVLRQQDKEARTKESRSSPAVEQQLLVSGPGKKPEDSRV

SEQ ID NO: 57410 - protein, 127 aa, Artificial Sequence
  derived and/or modified sequence
MGTENTPGGKASPDPQDVRPSVFHNIKLFVLCHSLLQLAQLMISGYLKSSISTVEKRFGLSSQTSGLLASFNEVGNTALIVFVSYFGSRVHRPRMIGYGAILVALAGLLMTLPHFISEPYRYDNTSP

SEQ ID NO: 57411 - DNA, 135 bp, Artificial Sequence
  derived and/or modified sequence
atgggcaccgagaacacccccggcggcaaggccagccccgacccccaggacgtgagacccagcgtgttccacaacatcaagctgttcgtgctgtgccacagcctgctgcagctggcccagctgatgatcagctag

SEQ ID NO: 57412 - DNA, 453 bp, Artificial Sequence
  derived and/or modified sequence
atgggcaccgagaacacccccggcggcaaggccagccccgacccccaggacgtgagacccagcgtgttccacaacatcaagctgttcgtgctgtgccacagcctgctgcagctggcccagctgatgatcagcggctacctgaagagcagcatcagcaccgtggagaagagattcggcctgagcagccagaccagcggcctgctggccagcttcaacgaggtgggcaacaccgccctgatcgtgttcgtgagctacttcggcagcagagtgcacagacccagaatgatcggctacggcgccatcctggtggccctggccggcctgctgatgaccctgccccacttcatcagcgagccctacagatacgacaacaccagccccgaggacatgccccaggacttcaaggccagcctgtgcctgcccaccaccagcgcccccgccagcgccccctag

SEQ ID NO: 57413 - DNA, 264 bp, Artificial Sequence
  derived and/or modified sequence
atgggcaccgagaacacccccggcggcaaggccagccccgacccccaggacgtgagacccagcgtgttccacaacatcaagctgttcgtgctgtgccacagcctgctgcagctggcccagctgatgatcagcggctacctgaagagcagcatcagcaccgtggagaagagattcggcctgagcagccagaccagcggcctgctggccagcttcaacgaggtgggcaacaccgccctgatcgtgttcgtgagctacttcggctag

SEQ ID NO: 57414 - DNA, 384 bp, Artificial Sequence
  derived and/or modified sequence
atgggcaccgagaacacccccggcggcaaggccagccccgacccccaggacgtgagacccagcgtgttccacaacatcaagctgttcgtgctgtgccacagcctgctgcagctggcccagctgatgatcagcggctacctgaagagcagcatcagcaccgtggagaagagattcggcctgagcagccagaccagcggcctgctggccagcttcaacgaggtgggcaacaccgccctgatcgtgttcgtgagctacttcggcagcagagtgcacagacccagaatgatcggctacggcgccatcctggtggccctggccggcctgctgatgaccctgccccacttcatcagcgagccctacagatacgacaacaccagcccctag

SEQ ID NO: 57415 - DNA, 135 bp, Artificial Sequence
  derived and/or modified sequence
atgggtaccgaaaacacccccggaggcaaggcttctcctgatcctcaggatgtaagaccctccgtgttccacaacatcaaactgttcgtgctgtgccattctctcttgcagctggcacagctgatgatcagttag

SEQ ID NO: 57416 - DNA, 453 bp, Artificial Sequence
  derived and/or modified sequence
atgggtaccgagaacacaccagggggcaaagcttctcctgaccctcaagacgtgagacccagtgtgttccataacattaaactgtttgtcctctgtcacagtttgctgcagttggctcagctgatgatctccggatacttgaagagtagcatctcgacggtggagaaacgatttgggctgtcctctcagacatccggtttgctcgcgagcttcaatgaagtgggaaacactgctctcatcgtttttgtgtcctacttcggatctagggtgcatcggcctcgcatgatagggtacggcgcaattttggttgcactggccggactcctgatgacgttgccccacttcatctctgagccgtaccgctatgataacacgtcaccagaggacatgccacaggactttaaggctagtctgtgtctgcctaccacttctgctcccgcgtccgccccgtag

SEQ ID NO: 57417 - DNA, 135 bp, Artificial Sequence
  derived and/or modified sequence
atgggaacagaaaatacgccggggggcaaagcttccccggaccctcaggatgtcaggccatccgtgtttcataacataaaactgtttgtgctgtgtcacagtctgctacaactcgctcagctgatgatctcatag

SEQ ID NO: 57418 - DNA, 264 bp, Artificial Sequence
  derived and/or modified sequence
atgggtactgagaatacccccgggggtaaagcttcaccagacccccaagatgtgaggcccagcgtattccacaacatcaaattgtttgtactgtgccatagcttactgcagttggcacagctgatgatttcgggctatctaaagtctagcatcagcacggtggaaaagagatttggtctgtcaagtcagacgtcagggctgcttgcttctttcaacgaggtcggcaatacagcccttattgtgttcgtttcatatttcggatag

SEQ ID NO: 57419 - DNA, 135 bp, Artificial Sequence
  derived and/or modified sequence
atgggaactgagaacaccccaggaggcaaagccagtccggacccgcaggatgttcgtccatcagtctttcataacataaagctgttcgtcttatgtcattccctcctgcagcttgctcagctgatgatctcttag

SEQ ID NO: 57420 - DNA, 384 bp, Artificial Sequence
  derived and/or modified sequence
atgggcactgagaacacccctggcggtaaggcatcccctgatccacaagacgtgaggccatctgtcttccacaatataaaattgttcgtcctgtgtcattccctacttcaactcgctcaattgatgattagtgggtatctgaagtcaagtatttccacagtagaaaagagattcggtctttcctcccagacatcgggcctgttggcctcattcaatgaggttggaaatacggccctcattgtttttgtgtcttatttcgggagccgcgttcacagaccacggatgattggctacggcgctatcctggtggctctcgctggactgctgatgacacttccccattttataagcgaaccataccgatatgacaacacaagcccatag

SEQ ID NO: 57421 - DNA, 135 bp, Artificial Sequence
  derived and/or modified sequence
atgggcacagagaacaccccaggcggcaaggccagcccagacccccaggatgtgcggcccagcgtcttccacaacatcaagctgtttgtgctgtgccacagcctgctgcagctggcccagctgatgatctcctag

SEQ ID NO: 57422 - DNA, 453 bp, Artificial Sequence
  derived and/or modified sequence
atgggcacagagaacaccccaggcggcaaggccagcccagacccccaggatgtgcggcccagcgtcttccacaacatcaagctgtttgtgctgtgccacagcctgctgcagctggcccagctgatgatcagcggctacctgaagagcagcatcagcacagtggagaagcgcttcggcctgagcagccagaccagcggcctgctggccagcttcaatgaggtgggcaacacagccctgattgtgtttgtgtcctacttcggcagccgggtgcaccggcccaggatgattggctacggggccatcctggtggccctggccggcctgctgatgaccctgccccacttcatcagcgagccctaccgctatgacaacaccagccctgaggacatgccccaggacttcaaggccagcctgtgcctgcccaccaccagcgccccagccagcgccccctag

SEQ ID NO: 57423 - DNA, 264 bp, Artificial Sequence
  derived and/or modified sequence
atgggcacagagaacaccccaggcggcaaggccagcccagacccccaggatgtgcggcccagcgtcttccacaacatcaagctgtttgtgctgtgccacagcctgctgcagctggcccagctgatgatcagcggctacctgaagagcagcatcagcacagtggagaagcgcttcggcctgagcagccagaccagcggcctgctggccagcttcaatgaggtgggcaacacagccctgattgtgtttgtgtcctacttcggctag

SEQ ID NO: 57424 - DNA, 384 bp, Artificial Sequence
  derived and/or modified sequence
atgggcacagagaacaccccaggcggcaaggccagcccagacccccaggatgtgcggcccagcgtcttccacaacatcaagctgtttgtgctgtgccacagcctgctgcagctggcccagctgatgatcagcggctacctgaagagcagcatcagcacagtggagaagcgcttcggcctgagcagccagaccagcggcctgctggccagcttcaatgaggtgggcaacacagccctgattgtgtttgtgtcctacttcggcagccgggtgcaccggcccaggatgattggctacggggccatcctggtggccctggccggcctgctgatgaccctgccccacttcatcagcgagccctaccgctatgacaacaccagcccctag

SEQ ID NO: 57425 - DNA, 135 bp, Artificial Sequence
  derived and/or modified sequence
atgggcaccgagaacacccccggcggcaaggccagccccgacccccaggatgtgaggccaagcgtcttccacaacattaaactttttgtactatgtcatagtctgctccagctggcccaactgatgatttcctag

SEQ ID NO: 57426 - DNA, 453 bp, Artificial Sequence
  derived and/or modified sequence
atgggcaccgagaacacccccggcggcaaggccagccccgacccccaagacgtgcgaccgtcagtgttccataacatcaaattgttcgtcttgtgtcacagccttctgcagctcgcacagcttatgatttccggttatctaaagagtagcatctccaccgtcgaaaagcgattcggactgtcctcccaaaccagtggattgctcgctagcttcaatgaggtgggaaatactgcccttatagtgtttgtctcttatttcggatcaagggttcatagacctcgtatgattgggtatggggccatcctggtcgcccttgctgggttgctgatgacacttcctcacttcattagcgagccctacagatacgacaacacatctccggaggacatgcctcaggactttaaagcctcattgtgtctaccgactacctctgcccccgctagcgcaccctag

SEQ ID NO: 57427 - DNA, 135 bp, Artificial Sequence
  derived and/or modified sequence
atgggcaccgagaacacccccggcggcaaggccagccccgacccccaggatgttagaccatcagtttttcacaacattaagttgtttgttctttgtcacagcttactgcaactggctcaactcatgatttcttag

SEQ ID NO: 57428 - DNA, 264 bp, Artificial Sequence
  derived and/or modified sequence
atgggcaccgagaacacccccggcggcaaggccagccccgacccccaagacgttcgcccttcggtttttcacaatatcaagctgtttgtgctatgtcattcccttctccagctagcgcagttgatgataagcggctatcttaagagtagcatcagcactgtggagaagagattcggcctgtcctcccagacttccggcctgttggcctctttcaacgaggttggtaacactgcacttatcgtgttcgtcagttactttggttag

SEQ ID NO: 57429 - DNA, 135 bp, Artificial Sequence
  derived and/or modified sequence
atgggcaccgagaacacccccggcggcaaggccagccccgacccccaggacgtgcggccctctgtcttccacaatattaaactgtttgtgctctgccactccctgctccagcttgcccagctgatgatatcgtag

SEQ ID NO: 57430 - DNA, 384 bp, Artificial Sequence
  derived and/or modified sequence
atgggcaccgagaacacccccggcggcaaggccagccccgacccccaggatgtgaggccttcagtgtttcacaatataaagctcttcgtgttgtgtcattccctgctgcaactggctcagctcatgattagcggttatctgaaatccagtatcagcactgttgaaaaaagatttggcctgagttctcagacctctggcttactggcttcgttcaatgaggttggaaatacagcgctgatagtcttcgtgagctatttcggttccagggtccatagaccacgtatgataggctatggtgccattctagtggctctggccgggcttcttatgacgcttccccactttatctctgagccctatcgctacgacaacactagcccctag

SEQ ID NO: 57431 - DNA, 135 bp, Artificial Sequence
  derived and/or modified sequence
atgggcacagagaatacccctgggggaaaggcctcaccagacccacaggacgtccgtcctagtgtctttcacaatatcaaactttttgtactctgccacagcctcctacagcttgctcagctgatgattagctag

SEQ ID NO: 57432 - DNA, 453 bp, Artificial Sequence
  derived and/or modified sequence
atgggcactgagaatacgcccggaggcaaagccagccccgaccctcaggatgtaagaccttccgtttttcacaacatcaaactatttgtcctgtgtcacagcttacttcagttggcgcagctcatgatctccggttatttgaaatctagtatctccactgtcgagaagcgtttcggcctcagtagccaaacatctggattgctcgcctcctttaatgaggtggggaataccgcgctaattgtctttgtgtcatattttggatccagggttcacaggcctagaatgatcggctatggggctattttggttgccctcgctggcttactgatgacgctcccccacttcatcagtgagccatatagatacgataacacaagtcccgaggacatgccccaggacttcaaagcctccctctgcctgcccacgacgagcgccccagcgagcgctccctag

SEQ ID NO: 57433 - DNA, 135 bp, Artificial Sequence
  derived and/or modified sequence
atgggtaccgagaacacgccagggggtaaagcttcgccagatccgcaggatgtcaggcctagcgtgtttcataatattaaactctttgtcctgtgccatagcctcctgcagctggcccagttgatgatctcctag

SEQ ID NO: 57434 - DNA, 264 bp, Artificial Sequence
  derived and/or modified sequence
atgggaacagagaacacccctggagggaaagcgagtcccgacccgcaggatgtgcggccatccgtatttcataatatcaagctgtttgtcttatgccatagcttgctgcagttggcccagctcatgattagcggctacttgaaatcgtctatcagcacggttgagaagcgtttcggcctctccagccagactagcgggctgctggcgtcctttaacgaggttgggaacacagctctcatcgtattcgttagctacttcggttag

SEQ ID NO: 57435 - DNA, 135 bp, Artificial Sequence
  derived and/or modified sequence
atgggaacagagaacaccccaggcggtaaagccagccctgatccacaggatgtacggcctagtgtgtttcacaatattaaacttttcgtgctgtgccattcactgctccagctggcccagctcatgatatcctag

SEQ ID NO: 57436 - DNA, 384 bp, Artificial Sequence
  derived and/or modified sequence
atgggcacagagaacactccaggcggtaaagcctctccagacccacaagacgtgaggccctccgtgtttcacaatatcaagctcttcgtgctgtgccactcgttgttacagctggcccagctgatgatttccggttacttgaagtcctctatttccacagtcgaaaagcggtttggactatccagtcagacaagcggactattggccagcttcaatgaggttggcaacacagccctcatcgtgttcgtctcctattttggctccagagtgcatagaccaagaatgattggatatggggctatcctggtggccctggcaggattacttatgactttgccccacttcatctcagagccgtacaggtatgacaatacgagcccttag

SEQ ID NO: 57437 - protein, 565 aa, Artificial Sequence
  derived and/or modified sequence
MGPRIEDMPQDFKASLCLPTTSAPASAPSNGNCSSYTETQHLSVVGIMFVAQTLLGVGGVPIQPFGISYIDDFAHNSNSPLYLGILFAVTMMGPGLAFGLGSLMLRLYVDINQMPEGGISLTIKDPRWVGAWWLGFLIAAGAVALAAIPYFFFPKEMPKEKRELQFRRKVLAVTDSPARKGKDSPSKQSPGESTKKQDGLVQIAPNLTVIQFIKVFPRVLLQTLRHPIFLLVVLSQVCLSSMAAGMAIFLPKFLERQFSITASYANLLIGCLSFPSVIVGIVVGGVLVKRLHLGPVGCGALCLLGMLLCLFFSLPLFFIGCSSHQIAGITHQTSAHPGLELSPSCMEACSCPLDGFNPVCDPSTRVEYITPCHAGCSSWVVQDALDNSQVFYTNCSCVVEGNPVLAGSCDSTCSHLVVPFLLLVSLGSALACLTHTPSFMLILRGVKKEDKTLAVGIQFMFLRILAWMPSPVIHGSAIDTTCVHWALSCGRRAVCRYYNNDLLRNRFIGLQFFFKTGSVICFALVLAVLRQQDKEARTKESRSSPAVEQQLLVSGPGKKPEDSRV

SEQ ID NO: 57438 - DNA, 1449 bp, Artificial Sequence
  derived and/or modified sequence
atgatcggctacggcgccatcctggtggccctggccggcctgctgatgaccctgccccacttcatcagcgagccctacagatacgacaacaccagccccggcggcatcagcctgaccatcaaggaccccagatgggtgggcgcctggtggctgggcttcctgatcgccgccggcgccgtggccctggccgccatcccctacttcttcttccccaaggagatgcccaaggagaagagagagctgcagttcagaagaaaggtgctggccgtgaccgacagccccgccagaaagggcaaggacagccccagcaagcagagccccggcgagagcaccaagaagcaggacggcctggtgcagatcgcccccaacctgaccgtgatccagttcatcaaggtgttccccagagtgctgctgcagaccctgagacaccccatcttcctgctggtggtgctgagccaggtgtgcctgagcagcatggccgccggcatggccatcttcctgcccaagttcctggagagacagttcagcatcaccgccagctacgccaacctgctgatcggctgcctgagcttccccagcgtgatcgtgggcatcgtggtgggcggcgtgctggtgaagagactgcacctgggccccgtgggctgcggcgccctgtgcctgctgggcatgctgctgtgcctgttcttcagcctgcccctgttcttcatcggctgcagcagccaccagatcgccggcatcacccaccagaccagcgcccaccccggcctggagctgagccccagctgcatggaggcctgcagctgccccctggacggcttcaaccccgtgtgcgaccccagcaccagagtggagtacatcaccccctgccacgccggctgcagcagctgggtggtgcaggacgccctggacaacagccaggtgttctacaccaactgcagctgcgtggtggagggcaaccccgtgctggccggcagctgcgacagcacctgcagccacctggtggtgcccttcctgctgctggtgagcctgggcagcgccctggcctgcctgacccacacccccagcttcatgctgatcctgagaggcgtgaagaaggaggacaagaccctggccgtgggcatccagttcatgttcctgagaatcctggcctggatgcccagccccgtgatccacggcagcgccatcgacaccacctgcgtgcactgggccctgagctgcggcagaagagccgtgtgcagatactacaacaacgacctgctgagaaacagattcatcggcctgcagttcttcttcaagaccggcagcgtgatctgcttcgccctggtgctggccgtgctgagacagcaggacaaggaggccagaaccaaggagagcagaagcagccccgccgtggagcagcagctgctggtgagcggccccggcaagaagcccgaggacagcagagtgtag

SEQ ID NO: 57439 - DNA, 1698 bp, Artificial Sequence
  derived and/or modified sequence
atgggccccagaatcgaggacatgccccaggacttcaaggccagcctgtgcctgcccaccaccagcgcccccgccagcgcccccagcaacggcaactgcagcagctacaccgagacccagcacctgagcgtggtgggcatcatgttcgtggcccagaccctgctgggcgtgggcggcgtgcccatccagcccttcggcatcagctacatcgacgacttcgcccacaacagcaacagccccctgtacctgggcatcctgttcgccgtgaccatgatgggccccggcctggccttcggcctgggcagcctgatgctgagactgtacgtggacatcaaccagatgcccgagggcggcatcagcctgaccatcaaggaccccagatgggtgggcgcctggtggctgggcttcctgatcgccgccggcgccgtggccctggccgccatcccctacttcttcttccccaaggagatgcccaaggagaagagagagctgcagttcagaagaaaggtgctggccgtgaccgacagccccgccagaaagggcaaggacagccccagcaagcagagccccggcgagagcaccaagaagcaggacggcctggtgcagatcgcccccaacctgaccgtgatccagttcatcaaggtgttccccagagtgctgctgcagaccctgagacaccccatcttcctgctggtggtgctgagccaggtgtgcctgagcagcatggccgccggcatggccatcttcctgcccaagttcctggagagacagttcagcatcaccgccagctacgccaacctgctgatcggctgcctgagcttccccagcgtgatcgtgggcatcgtggtgggcggcgtgctggtgaagagactgcacctgggccccgtgggctgcggcgccctgtgcctgctgggcatgctgctgtgcctgttcttcagcctgcccctgttcttcatcggctgcagcagccaccagatcgccggcatcacccaccagaccagcgcccaccccggcctggagctgagccccagctgcatggaggcctgcagctgccccctggacggcttcaaccccgtgtgcgaccccagcaccagagtggagtacatcaccccctgccacgccggctgcagcagctgggtggtgcaggacgccctggacaacagccaggtgttctacaccaactgcagctgcgtggtggagggcaaccccgtgctggccggcagctgcgacagcacctgcagccacctggtggtgcccttcctgctgctggtgagcctgggcagcgccctggcctgcctgacccacacccccagcttcatgctgatcctgagaggcgtgaagaaggaggacaagaccctggccgtgggcatccagttcatgttcctgagaatcctggcctggatgcccagccccgtgatccacggcagcgccatcgacaccacctgcgtgcactgggccctgagctgcggcagaagagccgtgtgcagatactacaacaacgacctgctgagaaacagattcatcggcctgcagttcttcttcaagaccggcagcgtgatctgcttcgccctggtgctggccgtgctgagacagcaggacaaggaggccagaaccaaggagagcagaagcagccccgccgtggagcagcagctgctggtgagcggccccggcaagaagcccgaggacagcagagtgtag

SEQ ID NO: 57440 - DNA, 1449 bp, Artificial Sequence
  derived and/or modified sequence
atgatcggctatggcgccatcctggttgccctcgctgggctgttgatgacattgcctcatttcatcagcgagccgtataggtatgacaacacttcccccggggggattagccttactatcaaggaccctagatgggtgggcgcatggtggctcggttttctgatcgcggccggcgctgtagccttagcagccattccatacttctttttccctaaagagatgcctaaagagaagcgcgaattgcagttcaggcgcaaagtcttggcagtgaccgattccccggctcggaagggaaaggatagtccttcaaaacaatctcctggcgaatcgaccaagaaacaggacggtttagttcagatcgcgcctaacctcacggtaatccagtttattaaagtttttcctagggtcttgcttcagacattgcgtcatcctatattcttactcgtggtgttatcacaggtttgcctgtcgtcaatggcagccgggatggccatctttctgccaaagttcttggagcggcagttttctattacggccagttatgcaaatctgctgatcgggtgcttgtcgtttccttcagttattgtgggcattgtcgttggaggggtgctcgttaaaagactgcatttgggacctgtgggatgcggagcgctctgcctgctgggcatgcttctgtgcctatttttctccctgccacttttcttcattggctgctcatcacatcagatagcaggcatcactcatcagaccagtgcgcacccgggcttagaattgtcgccctcctgcatggaggcatgcagttgcccacttgacgggttcaatccagtttgcgatcccagtacgagggtggagtacattaccccttgtcacgctggctgcagtagttgggtggtgcaggatgcgcttgataactcccaggtgttctataccaattgttcatgtgtcgtcgaaggcaacccagtgttggcaggttcctgcgactcaacctgttcacacctggtggtgccatttcttctattagttagtttagggagtgccctggcctgcctcacccacacaccgtcatttatgcttatactccgcggcgtgaaaaaagaggacaagaccctggcagtgggcattcagtttatgtttctcagaattctggcgtggatgccctctcccgtgattcatggcagcgccattgacactacctgcgttcattgggccctgtcttgcgggaggcgcgccgtatgtaggtactacaataatgacctcctcagaaatcgcttcattgggctgcagttcttttttaagaccgggtcagtcatatgctttgccctcgttctagctgtattacgccagcaggataaagaggcccgcaccaaagagagtagaagctcgccagccgtggaacaacagctcctcgttagcggacctgggaagaaaccggaggatagcagggtgtag

SEQ ID NO: 57441 - DNA, 1449 bp, Artificial Sequence
  derived and/or modified sequence
atgatcggatacggtgcaatcctcgtggccctcgccgggcttcttatgactctccctcacttcatctccgagccttaccgctatgataatactagtcccgggggcatttcactgactatcaaagaccccaggtgggttggtgcctggtggctgggatttctgatcgcagctggggcagtcgctctagccgccatcccatattttttcttccccaaagaaatgccaaaggaaaaacgtgaactgcaatttaggaggaaagtcctggctgtgactgatagcccagctcggaaaggcaaggactccccaagcaagcaaagcccaggcgagtcaacgaaaaaacaagatgggctcgtccagatcgctcctaacctcacggtgatccaatttatcaaagttttcccaagggtgctgctgcaaactctgaggcaccccatttttttactcgtggtcctctcacaagtttgcttgtcctcaatggctgccgggatggcaatctttcttccaaaattcctggagcgtcagttttcaataactgccagctatgcgaatctgctaatcgggtgcctaagttttccgtccgtgatagttggcatcgttgtcgggggggtgctcgtcaagagactccacctgggacctgtgggttgtggcgccttatgcctcctgggaatgttgctttgcttattcttcagcctgcctctcttcttcattggttgctccagccaccagatagctggcattacgcaccagacctcggcccaccctgggctggaactctctccctcctgtatggaagcatgtagttgtccgttggacggcttcaatccggtgtgcgatcctagcacccgcgtcgaatacatcaccccctgccacgcaggctgcagttcctgggtggtccaggatgccctcgacaactcccaagttttttatacaaactgtagctgtgtggttgagggcaacccggtgcttgccgggagttgtgactcaacatgctcccacctcgtcgtccccttcttattgctggtatccctgggttctgcgctggcatgcttaacgcacactcccagctttatgctcatcctgagaggtgtgaagaaggaagacaaaacgctggcggtgggcatccaatttatgtttctgcgcatcttggcctggatgccatcccccgtaatccacggtagtgctatcgatacaacttgtgtgcactgggccctgagctgtggtcggagagctgtgtgcagatactataacaacgacctcctccgcaataggttcataggactgcaatttttctttaagaccggctccgtgatttgcttcgctctggtgctagctgtgttgcgccaacaggacaaggaggcacgcactaaggaatccagatcaagccccgccgtggagcagcagctcctcgtgtcaggccctggcaaaaaacctgaagacagtcgggtgtag

SEQ ID NO: 57442 - DNA, 1698 bp, Artificial Sequence
  derived and/or modified sequence
atgggacctagaattgaggatatgccgcaagactttaaagcgtcactgtgcctgcctacaacatccgctcccgcttccgcacccagcaacgggaactgtagtagttataccgaaacacagcatctgagcgttgtcggcataatgttcgtggcccagacgcttctgggggtaggcggcgtgcctatacagccttttggcatctcttacattgatgattttgcccataacagtaattcccctctttacctgggaattctgttcgcggtcactatgatggggccaggcctagcatttggtctcgggtctctgatgttaaggctttatgttgatattaatcagatgcccgaagggggaatcagcctgactattaaggacccgcggtgggtgggggcctggtggctgggttttcttatagctgcaggtgccgtggccttggctgcaataccctatttcttctttccaaaagagatgcctaaggaaaagcgcgagcttcagttcagaaggaaggtcctggccgtcactgattccccggctagaaagggcaaggattctcctagcaaacagagccccggcgagtccaccaagaagcaggacggtcttgtgcagattgctcctaatctcaccgtaattcagttcatcaaggtgttcccacgcgtactgctgcagacattacgacaccccatattcttgctggtcgtgctgtcacaggtgtgtctgtcctccatggccgccggaatggcaatattcctgcccaaattcctggaacgacagttctcaataacagcctcatacgccaaccttctcatcggatgtctgagttttccttctgtcatcgtcgggatcgttgtggggggcgtactggtgaagaggttgcatctcggaccggtgggatgcggagctctttgtctcctggggatgttgctctgcctttttttctctttgcccctgttcttcattggctgttcatcccaccagatcgccggaatcacccaccagactagcgcacaccccggcctggagctctcgccctcctgcatggaggcgtgttcctgccccttagacggattcaacccggtctgcgacccatccactagggtggagtacatcacaccatgtcacgcaggatgcagctcctgggtcgtccaggatgccctcgacaattcccaggtgttttatacaaactgttcttgcgtggtggaaggcaatccagtgcttgccggaagttgtgatagcacgtgctcccacctggtagttccctttctcctattagtgagcttgggctctgctcttgcttgtctgacccatacgccaagctttatgctcatccttagaggcgtgaaaaaagaagacaagacattagcggttgggatccagttcatgtttttgcgcattttggcctggatgcctagccccgttatacacggttccgcaatcgatacaacctgcgtccactgggctttaagctgcggcaggcgcgctgtctgtagatactataacaatgatctactccgaaatcggttcatcggcctgcagtttttttttaaaaccggcagcgtgatttgttttgcgttggtgctggccgtattacgacagcaggataaggaagcgcgcacaaaggaaagtagatcaagccccgctgtggagcagcagctgcttgtatctggccctggtaagaaacctgaggactcccgggtgtag

SEQ ID NO: 57443 - DNA, 1449 bp, Artificial Sequence
  derived and/or modified sequence
atgattggctacggggccatcctggtggccctggccggcctgctgatgaccctgccccacttcatcagcgagccctaccgctatgacaacaccagccctgggggcatcagcctgaccatcaaggacccccgctgggtgggcgcctggtggctgggcttcctgattgctgctggagctgtggccctggccgccatcccctacttcttcttccccaaggagatgcccaaggagaagcgggagctgcagttccggaggaaggtgctggccgtgacagacagccctgccaggaagggcaaggacagccccagcaagcagagccctggagagagcaccaagaagcaggacggcctggtgcagatcgcccccaacctgaccgtcatccagttcatcaaggtgttcccccgggtgctgctgcagaccctgcggcaccccatcttcctgctggtggtgctgagccaggtgtgcctgagctccatggctgctggcatggccatcttcctgcccaagttcctggagcggcagttcagcatcacagccagctatgccaacctgctgattggctgcctgtccttccccagcgtgattgtgggcatcgtggtgggcggcgtgctggtgaagaggctgcacctgggccctgtgggctgtggggccctgtgcctgctgggcatgctgctgtgcctcttcttcagcctgcccctcttcttcatcggctgcagcagccaccagattgctggcatcacccaccagaccagcgcccaccctggcctggagctgagccccagctgcatggaggcctgcagctgccccctggatggcttcaaccctgtgtgtgaccccagcaccagggtggagtacatcaccccctgccacgccggctgcagctcctgggtggtgcaggatgccctggacaacagccaggtgttctacaccaactgcagctgtgtggtggagggcaaccctgtgctggccggcagctgtgacagcacctgcagccacctggtggtgcccttcctgctgctggtgtccctgggcagcgccctggcctgcctgacccacacccccagcttcatgctgatcctgcggggcgtgaagaaggaggacaagaccctggccgtgggcatccagttcatgttcctgcgcatcctggcctggatgcccagccctgtgattcatggcagcgccatcgacaccacctgtgtgcactgggccctgagctgtggccggcgggctgtgtgccgctactacaacaatgacctgctgaggaaccgcttcatcggcctgcagttcttcttcaagacaggcagcgtcatctgctttgccctggtgctggccgtgctgcggcagcaggacaaggaggcccggaccaaggagagccgcagcagccctgctgtggagcagcagctgctggtgtctggccctgggaagaagccagaggacagccgggtgtag

SEQ ID NO: 57444 - DNA, 1698 bp, Artificial Sequence
  derived and/or modified sequence
atgggccccagaattgaggacatgccccaggacttcaaggccagcctgtgcctgcccaccaccagcgccccagccagcgcccccagcaatggaaactgcagcagctacacagagacccagcacctgtctgtggtgggcatcatgtttgtggcccagaccctgctgggcgtgggcggcgtgcccatccagcccttcggcatctcctacattgatgactttgcccacaacagcaacagccccctgtacctgggcatcctgtttgctgtgaccatgatgggccctggcctggccttcggcctgggcagcctgatgctgcggctgtatgtggacatcaaccagatgcctgagggcggcatcagcctgaccatcaaggacccccgctgggtgggcgcctggtggctgggcttcctgattgctgctggagctgtggccctggccgccatcccctacttcttcttccccaaggagatgcccaaggagaagcgggagctgcagttccggaggaaggtgctggccgtgacagacagccctgccaggaagggcaaggacagccccagcaagcagagccctggagagagcaccaagaagcaggacggcctggtgcagatcgcccccaacctgaccgtcatccagttcatcaaggtgttcccccgggtgctgctgcagaccctgcggcaccccatcttcctgctggtggtgctgagccaggtgtgcctgagctccatggccgccggcatggccatcttcctgcccaagttcctggagcggcagttcagcatcacagccagctatgccaacctgctgattggctgcctgtccttccccagcgtcatcgtgggcatcgtggtgggcggcgtgctggtgaagaggctgcacctgggccctgtgggctgtggggccctgtgcctgctgggcatgctgctgtgcctcttcttcagcctgcccctcttcttcatcggctgcagcagccaccagattgctggcatcacccaccagaccagcgcccaccctggcctggagctgagccccagctgcatggaggcctgcagctgccccctggatggcttcaaccctgtgtgtgaccccagcaccagggtggagtacatcaccccctgccacgccggctgcagctcctgggtggtgcaggatgccctggacaacagccaggtgttctacaccaactgcagctgtgtggtggagggcaaccctgtgctggccggcagctgtgacagcacctgcagccacctggtggtgcccttcctgctgctggtgtccctgggcagcgccctggcctgcctgacccacacccccagcttcatgctgatcctgcggggcgtgaagaaggaggacaagaccctggccgtgggcatccagttcatgttcctgcgcatcctggcctggatgcccagccctgtgatccacggcagcgccatcgacaccacctgtgtgcactgggccctgagctgtggcagaagagctgtgtgccgctactacaacaatgacctgctgaggaaccgcttcatcggcctgcagttcttcttcaagacaggcagcgtcatctgctttgccctggtgctggccgtgctgcggcagcaggacaaggaggcccggaccaaggagagccgcagcagccctgctgtggagcagcagctgctggtgtctggccctgggaagaagccagaggacagccgggtgtag

SEQ ID NO: 57445 - DNA, 1449 bp, Artificial Sequence
  derived and/or modified sequence
atgatcggctacggcgccatcctggtggccctggccggcctgctgatgacactcccccacttcatttctgagccatatcgctatgacaacactagccctggcgggatatccctgacaatcaaagacccccgatgggtgggagcttggtggctgggctttctcattgctgccggggctgtcgctttggccgccattccatacttctttttcccgaaagagatgcccaaggagaagagagaactccagtttcgtcgcaaagtgttagccgtgacggatagccccgcccggaagggcaaagattcccccagcaaacagagccctggcgaatctactaagaagcaagacggccttgtgcaaatcgcccctaatctgaccgtaatccaatttataaaagtgttccctcgggtattgctgcagacactgaggcaccctatcttcttgctagtggtgttgtctcaggtgtgcctatcttccatggcggcaggaatggcgattttccttcccaaattcctagagcgccaattctcgattactgcctcatatgctaatctgttaataggatgcttgagtttccctagtgtgatcgtggggatcgtggttggaggtgttctcgtcaaacgcctacacttaggccctgtcggctgtggtgctctgtgtctgctcggcatgttactttgcttgttcttttccttgccattgttcttcataggatgcagttctcaccagatcgccgggattacgcaccaaacttccgctcatccaggactggagttgagcccaagttgtatggaggcatgttcctgcccacttgatggctttaatccggtttgcgaccccagtaccagagtggagtacattaccccttgccatgctggatgctcctcatgggtggtgcaagatgctctggataacagtcaggttttttatacgaattgtagctgcgtggtggaaggaaacccagtcctggccggcagctgcgattctacatgtagtcatctagtcgtgccgtttctgctgctggtgtccttggggtccgctttggcgtgtctgactcacacaccctctttcatgctgatcctgagaggtgtgaagaaggaagataagaccctggcagtggggattcaatttatgttccttagaatcctggcatggatgcctagccccgtgatccatggttctgccatagataccacttgtgtgcactgggcgctgagctgtggccgccgggctgtatgtagatattataacaacgaccttctacgcaataggttcataggccttcagttttttttcaaaacaggcagcgtcatctgcttcgcgttagtcctcgcagtgctgcgtcaacaagataaggaagctcgtaccaaggaaagccggtcctctccagccgtggaacagcagcttctggtctctgggcccggaaagaagcctgaagacagcagggtttag

SEQ ID NO: 57446 - DNA, 1449 bp, Artificial Sequence
  derived and/or modified sequence
atgatcggctacggcgccatcctggtggccctggccggcctgctgatgactctcccacattttatcagcgaaccatatcgatatgacaacacgagccccggggggattagcctcaccattaaggatccccggtgggtgggagcatggtggctaggatttctgatcgccgcgggcgccgttgccctggcggcgatcccatactttttcttccccaaggagatgcccaaagagaaaagagaactgcagttcaggagaaaagtcttggccgttacagactccccggcaagaaaaggcaaagactcaccttcaaaacagagcccaggagaatctacaaaaaaacaagacggtcttgtccagattgccccaaacctgacagtaatccaattcattaaggtgtttccacgagtcctgctgcagacacttcgccatccaatatttctactggtggtgctgtctcaggtatgtctgtccagcatggcggccgggatggcaatttttctgcctaaatttcttgaaaggcagtttagcatcaccgccagctatgcaaatttactgatagggtgtttgagttttccatctgtaatcgtgggaatcgtggtcgggggagtgctagttaaaaggctgcacctcggaccagtaggatgtggcgcactgtgcttgcttggaatgctgctgtgtctgtttttctctctgcctctgttcttcatcggatgctcatctcatcagatagcgggcatcactcaccaaacttccgcccaccccggcttggaactcagcccatcttgcatggaggcctgctcttgtcccctggatgggttcaaccccgtttgtgacccttccacacgggtcgagtacatcaccccatgtcacgcaggatgcagctcctgggtggtacaggacgcgctcgataatagtcaggtcttctataccaactgttcttgcgtggtggaaggcaacccagtgttggccggctcctgtgactcaacgtgcagccaccttgtcgtgccatttctgctgctggtctcactgggcagtgcgctggcttgcctgacacacactcctagttttatgctcatccttagaggcgtaaagaaagaggacaagactctcgccgttgggattcagtttatgttcttgcgcatcctggcgtggatgccaagcccagtgattcatggcagtgcgatagacacgacttgcgtgcactgggccctgtcctgtggtaggcgggccgtgtgtcgctactataacaatgatttactccggaatcggtttattggactccaattcttcttcaagacaggttccgtaatttgcttcgccttagttcttgcggtgttgcggcagcaggataaggaagcaaggaccaaagaaagccgatccagcccagctgttgagcagcagctgttagtctctggcccaggcaaaaagcctgaggattcgcgagtgtag

SEQ ID NO: 57447 - DNA, 1698 bp, Artificial Sequence
  derived and/or modified sequence
atgggcccccggatcgaggacatgccccaggacttcaaggccagcttatgtttaccgaccacaagtgctcccgcctcagctccatcgaatggtaattgttcgagctacacagaaacccagcatctgtctgtggtcggtatcatgttcgttgcccaaacgctgctcggtgtcggcggtgtgccaatccagcccttcggcatctcatacattgacgactttgcccacaattctaacagccccttgtacctggggattttgtttgctgtgaccatgatgggccctggtctggcattcggcctgggatcactcatgctcagactttatgtcgacattaatcaaatgcctgagggcgggatctccctgactattaaagatccccgttgggtgggtgcatggtggctgggctttctaatcgccgccggagccgtggctctggccgctatcccttacttttttttccccaaggaaatgcccaaagagaaacgcgaactgcagttccgaaggaaagtgttggccgtgaccgactccccagcaagaaaaggaaaggactcacccagcaaacagtcccctggtgagtcgactaaaaaacaagacgggctcgtgcagattgcgcctaacttaaccgtgattcaattcatcaaggttttcccccgagtgttgttgcagacgttgaggcaccctatttttctgctcgttgtgttatcccaggtttgtctgagctctatggccgcaggcatggccattttcctccctaaattcttggagaggcagtttagcatcacagcctcgtacgctaatctcctgattggttgcctcagttttccgtccgtgatcgtgggcatagtggtcggcggggtcctcgttaagcggctacacctgggtccagtgggctgtggggcactttgtctgctagggatgctgctgtgtctctttttctctctgcctctcttctttataggctgttcctcacaccagatcgctggaatcacacaccagactagtgctcatcccgggctggagttgtccccaagctgtatggaggcttgtagttgccccctggatgggttcaaccctgtgtgcgaccccagcacgagagtcgaatatataacgccatgccacgcgggctgtagcagttgggtagtccaggacgcgcttgacaatagccaggtcttctatacgaactgttcctgtgtggtggagggcaatcccgtactcgcgggcagttgcgactcgacctgtagccaccttgtcgttccattcctgctgctcgtgtccctgggttcggctcttgcatgtttaacacataccccctccttcatgctaatcctgagaggcgtgaaaaaagaggacaaaaccctggccgttggtatccagttcatgtttttgcgcatcctggcctggatgcccagtccagtaatccacggaagtgctatagacactacatgcgtacactgggcactgtcatgcggccgcagagccgtgtgccggtactacaacaacgatctgctgcgtaatagatttattggactgcagttctttttcaagacgggatccgtaatctgtttcgctcttgttcttgctgtgctgaggcagcaggacaaggaggccaggaccaaagagagccggtcgtcccctgccgtggagcagcaattgttagtgtctggaccaggaaaaaagccagaggactctcgggtgtag

SEQ ID NO: 57448 - DNA, 1449 bp, Artificial Sequence
  derived and/or modified sequence
atgatcggctacggcgcaatcctagtcgccctcgccggtctgttaatgacactgcctcacttcataagcgagccctatcgttacgataataccagcccaggaggcatatcgttgaccatcaaagatcctcgctgggttggggcttggtggctgggcttcctgattgccgcaggcgctgtggctcttgccgctataccatattttttttttcccaaggagatgccaaaggaaaaaagggagctgcagtttcggaggaaagtgctcgcagtcactgacagtccggctcgcaagggaaaggatagcccctcaaagcaatcccccggagaaagcactaagaaacaggatgggctggtgcagattgctccgaatcttacagtaattcaatttatcaaggtcttccctcgtgtccttttgcagaccttgcgacacccaatttttttgctggtggtcctgagtcaggtgtgcctgagttccatggccgctggtatggccatttttttgcctaagttccttgaaaggcagttttctatcacagccagttatgctaaccttctcatcgggtgccttagctttccaagcgtgatcgtaggaatcgtggttggaggggtcctggtgaagagactgcacctgggacctgttggctgcggggctctgtgcctgcttggtatgctgctatgtttgttcttttctttacccttgttcttcatagggtgctcgagtcatcagattgcgggaattacccaccaaactagtgcccatcccggactggaattatcaccgagctgcatggaggcttgttcctgtcccctcgacggcttcaaccccgtctgcgatccctctactcgcgtggaatacataaccccgtgccacgctggctgttcatcctgggtcgtgcaggacgcgctggacaatagtcaggtgttctacaccaattgttcctgcgtggtggagggaaaccctgtgctggctggatcctgcgattcaacttgctcccacctggtggtacctttcctgctgctggtgtcgctgggtagcgccttagcctgcctgacccacaccccctcatttatgctgatcctgaggggtgtcaaaaaagaagacaagactttggcggtaggaatccagttcatgtttctgaggatcctggcctggatgccttcccctgtgatacacggtagtgcgatagacacaacttgtgtgcattgggccctcagctgcggtcgacgtgccgtctgccgctactacaataatgacttactccgaaacagatttattggactccagttcttcttcaaaaccggctccgtgatctgttttgctctcgtactcgcagtgctgaggcagcaggacaaggaggctcggaccaaggaaagccggtcttcccctgccgtcgagcagcagcttctcgtcagcggcccaggcaaaaaacctgaagatagtcgggtctag

SEQ ID NO: 57449 - DNA, 1449 bp, Artificial Sequence
  derived and/or modified sequence
atgatagggtatggagctattctggtcgctttagcgggtcttctgatgacgctgccacactttatcagcgagccttatagatacgataacacctccccaggcggtattagcctgactattaaggacccccgatgggttggcgcatggtggttaggctttttgatcgcagcaggcgcagtggcactggcagcaatcccatactttttcttcccgaaagagatgccaaaagaaaagcgcgaattgcagttcagacggaaagtgctcgccgtaactgattctcctgccaggaaagggaaggatagtccttccaaacagtcacctggagaatcaaccaagaaacaagatggcctcgtccagatagcccctaacctcacggtcatacaatttattaaagtctttccaagggtgctgctgcagacactaaggcacccaatcttcctactcgttgtgctgtctcaggtgtgtctctcaagcatggcagctggtatggctatcttcctgcctaagttcttagagaggcagtttagtatcaccgcgtcttacgctaatctcttaataggttgtctgtcctttccttccgtgatcgtgggtatcgtggtaggcggagtcttggtgaagcgacttcatctggggccagtgggttgcggcgcactatgcctgctggggatgttattatgcctttttttctccttaccactgttttttatcggctgctcttcccaccagatcgctggcatcactcaccagacctcggcccatccgggtctggagctgtcccctagctgtatggaggcctgctcctgccctctcgacggatttaatccagtgtgtgacccttccaccagggtggagtatatcacgccatgccacgctgggtgctcgagttgggttgttcaggatgctttggacaacagtcaagtgttttatacaaattgctcatgtgttgtggaagggaatccagtcttagccggatcatgcgattccacctgcagtcacctagtcgtaccatttttattgcttgtctcacttggcagcgccctggcttgtctaacacacacccccagttttatgctgatcctgcggggtgtcaaaaaagaggataagactctcgctgtggggatccagttcatgttcctcaggatcctcgcctggatgcctagtccagtcatccatggatccgccattgacacaacatgcgtgcattgggctttatcttgcgggcgtagagctgtgtgccgttattacaacaacgatctgctccgaaaccggttcatagggcttcagtttttcttcaaaactggatctgttatctgtttcgcccttgtgctcgccgtgttgagacaacaggataaagaggcaagaacgaaagagtctcgttctagccccgcagttgaacagcagctgctcgtgtccgggccagggaagaagccagaggactccagagtgtag

SEQ ID NO: 57450 - DNA, 1698 bp, Artificial Sequence
  derived and/or modified sequence
atgggtcccagaattgaggacatgcctcaggacttcaaggcatctctttgcctgcccactacttccgctccagcctccgcgccaagtaacggaaactgcagctcatacactgagacacagcacctgtccgtcgtcggcattatgttcgtggcccagacattattgggggtgggaggagtgccaatccagccattcggcatcagttatatcgacgacttcgcgcacaattctaactctccattgtacttggggatcctatttgcagtcactatgatggggcctggattggcctttggcctgggttcactgatgttgcgtttatatgtcgatatcaatcagatgccagagggaggtatttctcttacaatcaaggatccacgctgggtcggcgcatggtggttgggattcctgatcgccgcaggcgcagtggcgctggccgctattccttatttttttttccctaaggagatgcctaaggagaagcgcgagctgcagttcaggcggaaggttctagccgtgactgactctcctgccagaaagggtaaagactctcccagcaagcagtccccaggtgagtctacaaaaaaacaagatggcctggttcagatcgccccaaatctaaccgttatacaatttattaaggtgttccccagggtgctcctgcagacattgaggcacccaatctttctgctggtggttctttcccaagtctgtctgtccagcatggctgcgggaatggccattttcctgcccaagtttctggaacgacagttcagcattaccgcatcatacgccaatttactcatcggttgtctatccttcccaagcgtcatcgttgggatcgtggtgggcggtgtgctggtgaagaggctccaccttgggcctgttggctgcggcgctctgtgtttgctcggaatgctcctgtgcctattcttcagtctgccactcttctttatcggatgttcctctcatcagattgccggaatcactcaccagacttccgcacatccgggtctggagctgtcacctagctgcatggaggcatgcagctgcccactggacggcttcaatcccgtctgtgaccccagtacacgggtggaatacattactccctgccacgccggatgttcttcctgggtcgtgcaagatgctctggacaatagccaggttttttacactaattgttcctgcgttgtagaaggtaacccagtgttggcaggcagctgcgactctacctgttctcacctggtggtcccctttttacttctcgtttcactcgggtctgccttggcctgcctgacccatactccttcattcatgcttattctccgaggggtgaagaaggaagacaaaacactcgcagtcggaattcagttcatgtttctccggattcttgcgtggatgcctagcccagtgatccacggtagtgctatcgatacgacctgcgtgcattgggcactcagctgtgggcgaagagcagtgtgtcgatattacaataatgatctgttgcgaaacaggttcattgggctgcaattttttttcaagacgggttctgtgatctgcttcgccctggtcctcgctgtgctcaggcagcaagataaggaagccagaactaaggaaagccgttcctcccccgcagtcgagcagcagttgctggttagtggaccgggaaaaaagccagaagatagtagagtgtag

SEQ ID NO: 57451 - DNA, 4003 bp, Artificial Sequence
  derived and/or modified sequence
aggctgaggctgagcctcagggaggcggggtgcagcttcctcttcacagagaggctggacttgaacaaacccagccttctatacaaccgtggagccagggcaagggagagacagaaggagcaagtgacccagggagacaaacacttggagatacttggggctgagtttgagcaagactccctaacctgtgtctggacaagtctgatgtcctgtgtggcccaagaagaactgaccccgtgtctggagctcccaccgttattgcatccctgctgtggctcacctgctgctgtctccaggagcccctgagaagatttgcttcctctcccctgctaagctccaggtcctgagattaaattaggggctggagctcactgcactccagcagtcatgggacccaggatagggccagcgggtgaggtaccccaggtaccagacaaggaaaccaaagccacaatgggcacagaaaacacacctggaggcaaagccagcccagaccctcaggacgtgcggccaagtgtgttccataacatcaagctgttcgttctgtgccacagcctgctgcagctggcgcagctcatgatctccggctacctaaagagctccatctccacagtggagaagcgcttcggcctctccagccagacgtcggggctgctggcctccttcaacgaggtggggaacacagccttgattgtgtttgtgagctattttggcagccgggtgcaccgaccccgaatgattggctatggggctatccttgtggccctggcgggcctgctcatgactctcccgcacttcatctcggagccataccgctacgacaacaccagccctggtggtatcagcctgaccataaaggacccccgatgggtgggtgcctggtggctgggtttcctcatcgctgccggtgcagtggccctggctgccatcccctacttcttcttccccaaggaaatgcccaaggaaaaacgtgagcttcagtttcggcgaaaggtcttagcagtcacagactcacctgccaggaagggcaaggactctccctctaagcagagccctggggagtccacgaagaagcaggatggcctagtccagattgcaccaaacctgactgtgatccagttcattaaagtcttccccagggtgctgctgcagaccctacgccaccccatcttcctgctggtggtcctgtcccaggtatgcttgtcatccatggctgcgggcatggccatcttcctgcccaagttcctggagcgccagttttccatcacagcctcctacgccaacctgctcatcggctgcctctccttcccttcggtcatcgtgggcatcgtggtgggtggcgtcctggtcaagcggctccacctgggccctgtgggatgcggtgccctttgcctgctggggatgctgctgtgcctcttcttcagcctgccgctcttctttatcggctgctccagccaccagattgcgggcatcacacaccagaccagtgcccaccctgggctggagctgtctccaagctgcatggaggcctgctcctgcccattggacggctttaaccctgtctgcgaccccagcactcgtgtggaatacatcacaccctgccacgcaggctgctcaagctgggtggtccaggatgctctggacaacagccaggttttctacaccaactgcagctgcgtggtggagggcaaccccgtgctggcaggatcctgcgactcaacgtgcagccatctggtggtgcccttcctgctcctggtcagcctgggctcggccctggcctgtctcacccacacaccctccttcatgctcatcctaagaggagtgaagaaagaagacaagactttggctgtgggcatccagttcatgttcctgaggattttggcctggatgcccagccccgtgatccacggcagcgccatcgacaccacctgtgtgcactgggccctgagctgtgggcgtcgagctgtctgtcgctactacaataatgacctgctccgaaaccggttcatcggcctccagttcttcttcaaaacaggttctgtgatctgcttcgccttagttttggctgtcctgaggcagcaggacaaagaggcaaggaccaaagagagcagatccagccctgccgtagagcagcaattgctagtgtcggggccagggaagaagccagaggattcccgagtgtgagctgtcttggggccccacctggccaagagtagcagccacagcagtacctcctctgagtcctttgcccaagattgggtgtcaagagccctgtgttccattctggctcctccactaaattgctgtgtgacttcaggcaagacattgatcctctctcagcctttgcttgctagtctgaaccaaagagttgtttgggcatttgctgtgttggccatttctggagcaagagggtcttcttcctccttcccccagccagccagctgtcctggggccaggctttcctgggtggaaagaagtatacctttccctggggccctaggatagcaaagtgagccatagtgggccaggctgccctccatgctgggccccagcccaggtctgcactcgcctggatcaccttctttgagccttagccatctcctgtcaggtaggaatgaacttgccagccttcaggctcgttcagctatgaccatctgtgcggtcagggtacactcagctctcctccccaactccagcagcctttaagaagtgtccctttggcgccccctggaggcagagcactgagctggaccctgggtagactcccacagggaggacggagctggcctcaggagtgggacacccagacttggcagggccttcaagaggcctgtgtgggggccccaggaatccttagctgaagcggggagactcactctccatctcaggaaattctagcccttgccctcagggagccacggttgagggtgaggcccaacacctgccttagggccctgggtgggcaagtctgggccctggggtagggagggagactcaggcccacacttgggtattttctaatttcagacaaacacacactcagcgcgcactcactgattcctacacattgccaagatttcacacatgtgaccaggggccaccaaagtccctgtgacctttgtgactaggatcctaatttctctattttctcctgggtgcctgggtctgtgtcacctggggcagtgtggataatgtttagttctgtgacactgttttttgggggtggcacctggttctccgatgcctgggctggtgtcaggcccaggactgtagtgctgggagcagtaaagctcagctctgtgtaatgagtgatgctatggcttgctcgtgtcttatgatccaatccttttctacatcagcccttgttttgttttatggctagtcttatctggcctggttatttccttgcggggaggagagggtttgctaatctgctcccagcccaacctattaccaccccacctcgctgggacctactgctcgggaggcagcagacagggagccaccagcagtggcttcctggccctgtgctgggggtggggggaagctgggggcacatgtggcccttgccttctgagcagctcccagtgccagggctttgagactttcccacatgataaaagaaaagggaggtacagaagttccaattccctttttattttgctggttggtatctgtaaatgtttaataaatatctgagcatgtatctatcaacgccaagaatttcaaagtctccttcaacaatatgaggcttttaggatgtttatattccttcatccctcttgtttcccaggttttgcagggaaaaaaagtctggaattatagatacagcttattattaaatttgttcttgcataatgtctcttctattacaaaaattctttcttcataaactgcattagaggtttgcaacaaccacatcatttccattaacttagatttaggttttactggattcattgctcaccattattgcttgtatattacatcttttccaatcttt

SEQ ID NO: 57452 - DNA, 3219 bp, Artificial Sequence
  derived and/or modified sequence
ccaagaagaactgaccccgtgtctggagctcccaccgttattgcatccctgctgtggctcacctgctgctgtctccaggagcccctgagaagatttgcttcctctcccctgctaagctccaggtcctgagattaaattaggggctggagctcactgcactccagcagtcatgggacccaggataggtggggaacacagccttgattgtgtttgtgagctattttggcagccgggtgcaccgaccccgaatgattggctatggggctatccttgtggccctggcgggcctgctcatgactctcccgcacttcatctcggagccataccgctacgacaacaccagccctggtggtatcagcctgaccataaaggacccccgatgggtgggtgcctggtggctgggtttcctcatcgctgccggtgcagtggccctggctgccatcccctacttcttcttccccaaggaaatgcccaaggaaaaacgtgagcttcagtttcggcgaaaggtcttagcagtcacagactcacctgccaggaagggcaaggactctccctctaagcagagccctggggagtccacgaagaagcaggatggcctagtccagattgcaccaaacctgactgtgatccagttcattaaagtcttccccagggtgctgctgcagaccctacgccaccccatcttcctgctggtggtcctgtcccaggtatgcttgtcatccatggctgcgggcatggccatcttcctgcccaagttcctggagcgccagttttccatcacagcctcctacgccaacctgctcatcggctgcctctccttcccttcggtcatcgtgggcatcgtggtgggtggcgtcctggtcaagcggctccacctgggccctgtgggatgcggtgccctttgcctgctggggatgctgctgtgcctcttcttcagcctgccgctcttctttatcggctgctccagccaccagattgcgggcatcacacaccagaccagtgcccaccctgggctggagctgtctccaagctgcatggaggcctgctcctgcccattggacggctttaaccctgtctgcgaccccagcactcgtgtggaatacatcacaccctgccacgcaggctgctcaagctgggtggtccaggatgctctggacaacagccaggttttctacaccaactgcagctgcgtggtggagggcaaccccgtgctggcaggatcctgcgactcaacgtgcagccatctggtggtgcccttcctgctcctggtcagcctgggctcggccctggcctgtctcacccacacaccctccttcatgctcatcctaagaggagtgaagaaagaagacaagactttggctgtgggcatccagttcatgttcctgaggattttggcctggatgcccagccccgtgatccacggcagcgccatcgacaccacctgtgtgcactgggccctgagctgtgggcgtcgagctgtctgtcgctactacaataatgacctgctccgaaaccggttcatcggcctccagttcttcttcaaaacaggttctgtgatctgcttcgccttagttttggctgtcctgaggcagcaggacaaagaggcaaggaccaaagagagcagatccagccctgccgtagagcagcaattgctagtgtcggggccagggaagaagccagaggattcccgagtgtgagctgtcttggggccccacctggccaagagtagcagccacagcagtacctcctctgagtcctttgcccaagattgggtgtcaagagccctgtgttccattctggctcctccactaaattgctgtgtgacttcaggcaagacattgatcctctctcagcctttgcttgctagtctgaaccaaagagttgtttgggcatttgctgtgttggccatttctggagcaagagggtcttcttcctccttcccccagccagccagctgtcctggggccaggctttcctgggtggaaagaagtatacctttccctggggccctaggatagcaaagtgagccatagtgggccaggctgccctccatgctgggccccagcccaggtctgcactcgcctggatcaccttctttgagccttagccatctcctgtcaggtaggaatgaacttgccagccttcaggctcgttcagctatgaccatctgtgcggtcagggtacactcagctctcctccccaactccagcagcctttaagaagtgtccctttggcgccccctggaggcagagcactgagctggaccctgggtagactcccacagggaggacggagctggcctcaggagtgggacacccagacttggcagggccttcaagaggcctgtgtgggggccccaggaatccttagctgaagcggggagactcactctccatctcaggaaattctagcccttgccctcagggagccacggttgagggtgaggcccaacacctgccttagggccctgggtgggcaagtctgggccctggggtagggagggagactcaggcccacacttgggtattttctaatttcagacaaacacacactcagcgcgcactcactgattcctacacattgccaagatttcacacatgtgaccaggggccaccaaagtccctgtgacctttgtgactaggatcctaatttctctattttctcctgggtgcctgggtctgtgtcacctggggcagtgtggataatgtttagttctgtgacactgttttttgggggtggcacctggttctccgatgcctgggctggtgtcaggcccaggactgtagtgctgggagcagtaaagctcagctctgtgtaatgagtgatgctatggcttgctcgtgtcttatgatccaatccttttctacatcagcccttgttttgttttatggctagtcttatctggcctggttatttccttgcggggaggagagggtttgctaatctgctcccagcccaacctattaccaccccacctcgctgggacctactgctcgggaggcagcagacagggagccaccagcagtggcttcctggccctgtgctgggggtggggggaagctgggggcacatgtggcccttgccttctgagcagctcccagtgccagggctttgagactttcccacatgataaaagaaaagggaggtacagaagttccaattccctttttattttgctggttggtatctgtaaatgtttaataaatatctgagcatgta

SEQ ID NO: 57453 - DNA, 2121 bp, Artificial Sequence
  derived and/or modified sequence
caagtgacccagggagacaaacacttggagatacttggggctgagtttgagcaagactccctaacctgtgtctggacaagtctgatgtcctgtgtggcccaagaagaactgaccccgtgtctggagctcccaccgttattgcatccctgctgtggctcacctgctgctgtctccaggagcccctgagaagatttgcttcctctcccctgctaagctccaggtcctgagattaaattaggggctggagctcactgcactccagcagtcatgggacccaggatagaggatatgccacaggacttcaaggcttccctgtgcctgcccacaacctcggccccagcctcggccccctccaatggcaactgctcaagctacacagaaacccagcatctgagtgtggtggggatcatgttcgtggcacagaccctgctgggcgtgggcggggtgcccattcagccctttggcatctcctacatcgatgactttgcccacaacagcaactcgcccctctacctcgggatcctgtttgcagtgaccatgatggggccaggcctggcctttgggctgggcagcctcatgctgcgcctttatgtggacattaaccagatgccagaaggtggtatcagcctgaccataaaggacccccgatgggtgggtgcctggtggctgggtttcctcatcgctgccggtgcagtggccctggctgccatcccctacttcttcttccccaaggaaatgcccaaggaaaaacgtgagcttcagtttcggcgaaaggtcttagcagtcacagactcacctgccaggaagggcaaggactctccctctaagcagagccctggggagtccacgaagaagcaggatggcctagtccagattgcaccaaacctgactgtgatccagttcattaaagtcttccccagggtgctgctgcagaccctacgccaccccatcttcctgctggtggtcctgtcccaggtatgcttgtcatccatggctgcgggcatggccatcttcctgcccaagttcctggagcgccagttttccatcacagcctcctacgccaacctgctcatcggctgcctctccttcccttcggtcatcgtgggcatcgtggtgggtggcgtcctggtcaagcggctccacctgggccctgtgggatgcggtgccctttgcctgctggggatgctgctgtgcctcttcttcagcctgccgctcttctttatcggctgctccagccaccagattgcgggcatcacacaccagaccagtgcccaccctgggctggagctgtctccaagctgcatggaggcctgctcctgcccattggacggctttaaccctgtctgcgaccccagcactcgtgtggaatacatcacaccctgccacgcaggctgctcaagctgggtggtccaggatgctctggacaacagccaggttttctacaccaactgcagctgcgtggtggagggcaaccccgtgctggcaggatcctgcgactcaacgtgcagccatctggtggtgcccttcctgctcctggtcagcctgggctcggccctggcctgtctcacccacacaccctccttcatgctcatcctaagaggagtgaagaaagaagacaagactttggctgtgggcatccagttcatgttcctgaggattttggcctggatgcccagccccgtgatccacggcagcgccatcgacaccacctgtgtgcactgggccctgagctgtgggcgtcgagctgtctgtcgctactacaataatgacctgctccgaaaccggttcatcggcctccagttcttcttcaaaacaggttctgtgatctgcttcgccttagttttggctgtcctgaggcagcaggacaaagaggcaaggaccaaagagagcagatccagccctgccgtagagcagcaattgctagtgtcggggccagggaagaagccagaggattcccgagtgtgagctgtcttggggccccacctggccaagagtagcagccacagcagtacctcctctgagtcctttgcccaagattgggtgtcaagagccctgtgttccattctggctcctccactaaattgctgtgtgacttcaggcaagacattgatcctctctcag

SEQ ID NO: 57454 - protein, 320 aa, Artificial Sequence
  derived and/or modified sequence
MNRHLWKSQLCEMVQPSGGPAADQDVLGEESPLGKPAMLHLPSEQGAPETLQRCLEENQELRDAIRQSNQILRERCEELLHFQASQREEKEFLMCKFQEARKLVERLGLEKLDLKRQKEQALREVEHLKRCQQQMAEDKASVKAQVTSLLGELQESQSRLEAATKECQALEGRRKLAQLQVAYHQLFQEYDNHIKSSVVGSERKRADIYKADFQAERQAREKLAEKKELLQEQLEQLQREYSKLKASCQESARIEDMRKRHVEVSQAPLPPAPAYLSSPLALPSQRRSPPEEPPDFCCPKCQYQAPDMDTLQIHVMECIE

SEQ ID NO: 57455 - DNA, 963 bp, Artificial Sequence
  derived and/or modified sequence
atgaaccgacatctgtggaagtcccaactgtgtgagatggtccagccttcaggagggcctgccgctgaccaggacgtgttaggcgaggaatcccctctaggaaaacctgccatgttgcatctcccatctgagcaaggcgcacccgagactctgcaacgctgcctggaagagaaccaagagctgcgggatgccatacgccaatccaaccagattctgcgcgagaggtgtgaggagctgctgcattttcaggcctctcagagggaagaaaaggagtttctgatgtgcaaattccaggaggcacgcaagctcgtcgagcggttgggattggagaaactggacctgaagaggcagaaagagcaggctttgagagaggtggagcacctaaaaagatgtcagcagcagatggcagaagataaggcgtccgtgaaggcccaagtgacttccctgctgggcgagttgcaagaatcccagtcacgtctggaggcagccaccaaagaatgtcaggctctcgagggcaggagaaaactggctcagctccaggtggcctaccatcagctttttcaggagtacgataatcacataaaatctagcgtagtagggagtgagagaaagcgagccgatatctacaaagccgacttccaagcagagaggcaagccagggaaaaattggctgaaaagaaggagctgctgcaggagcagcttgagcaattacagagagagtattccaagctgaaagcctcctgtcaagagtccgcccgaattgaggatatgaggaagcggcacgtggaagtgtcgcaagctcctcttccgcccgccccagcctacctctcctccccgctcgcgctgccaagccagcggaggagtccacctgaggagccacctgatttttgctgcccaaagtgccagtatcaggctcctgatatggacacgctgcagattcacgtgatggaatgcatcgagtag

SEQ ID NO: 57456 - DNA, 1654 bp, Artificial Sequence
  derived and/or modified sequence
aagggcgaccgcgaaactgggactttctcggagcgccggggccctaccagcgttcacagtccgccgctcccacccttctcacgtctgacggactctgctgacagcccttgccctgttggatgaataggcacctctggaagagccaactgtgtgagatggtgcagcccagtggtggcccggcagcagatcaggacgtactgggcgaagagtctcctctggggaagccagccatgctgcacctgccttcagaacagggcgctcctgagaccctccagcgctgcctggaggagaatcaagagctccgagatgccatccggcagagcaaccagattctgcgggagcgctgcgaggagcttctgcatttccaagccagccagagggaggagaaggagttcctcatgtgcaagttccaggaggccaggaaactggtggagagactcggcctggagaagctcgatctgaagaggcagaaggagcaggctctgcgggaggtggagcacctgaagagatgccagcagcagatggctgaggacaaggcctctgtgaaagcccaggtgacgtccttgctcggggagctgcaggagagccagagtcgcttggaggctgccactaaggaatgccaggctctggagggtcggaggaagctggcccagttgcaggtggcctatcaccagctcttccaagaatacgacaaccacatcaagagcagcgtggtgggcagtgagcggaagcgagcggatatctacaaggcggacttccaggctgagaggcaggcccgggagaagctggccgagaagaaggagctcctgcaggagcagctggagcagctgcagagggagtacagcaaactgaaggccagctgtcaggagtcggccaggatcgaggacatgaggaagcggcatgtcgaggtctcccaggcccccttgccccccgcccctgcctacctctcctctcccctggccctgcccagccagaggaggagcccccccgaggagccacctgacttctgctgtcccaagtgccagtatcaggcccctgatatggacaccctgcagatacatgtcatggagtgcattgagtagggccggccagtgcaaggccactgcctgccgaggacgtgcccgggaccgtgcagtctgcgctttcctctcccgcctgcctagcccaggatgaagggctgggtggccacaactgggatgccacctggagccccacccaggagctggccgcggcaccttacgcttcagctgttgatccgctggtcccctcttttggggtagatgcggccccgatcaggcctgactcgctgctctttttgttcccttctgtctgctcgaaccacttgcctcgggctaatccctccctcttcctccacccggcactggggaagtcaagaatggggcctggggctctcagggagaactgcttcccctggcagagctgggtggcagctcttcctcccaccggacaccgacccgcccgctgctgtgccctgggagtgctgccctcttaccatgcacacgggtgctctccttttgggctgcatgctattccattttgcagccagaccgatgtgtatttaaccagtcactattgatggacatttgggttgtttcccatctttttgttaccataaataatggcatagtaaaaa

SEQ ID NO: 57457 - DNA, 963 bp, Artificial Sequence
  derived and/or modified sequence
atgaacagacacctgtggaagagccagctgtgtgagatggtgcagcccagcggcggccctgctgctgaccaggatgtgctgggggaggagagccccctgggcaagccagccatgctgcacctgcccagcgagcagggcgcccctgagaccctgcagcgctgcctggaggagaaccaggagctgagagatgccatccggcagagcaaccagatcctgcgggagcgctgtgaggagctgctgcacttccaggccagccagcgggaggagaaggagttcctgatgtgcaagttccaggaggccaggaagctggtggagcggctgggcctggagaagctggacctgaagaggcagaaggagcaggccctgcgggaggtggagcacctgaagcgctgccagcagcagatggccgaggacaaggcctctgtgaaggcccaggtgaccagcctgctgggggagctgcaggagagccagagccggctggaggccgccaccaaggagtgccaggccctggagggccgcaggaagctggcccagctgcaggtggcctaccaccagctgttccaggagtatgacaaccacatcaagagctctgtggtgggcagcgagaggaagagagctgacatctacaaggctgacttccaggccgagcggcaggcccgggagaagctggccgagaagaaggagctgctgcaggagcagctggagcagctgcagcgggagtacagcaagctgaaggccagctgccaggagagcgccagaattgaggacatgaggaagagacatgtggaggtgtcccaggcccccctgcccccagccccagcctacctgagcagccccctggccctgcccagccagaggaggagccccccagaggagcccccagacttctgctgccccaagtgccagtaccaggccccagacatggacaccctgcagatccacgtgatggagtgcattgaatag

SEQ ID NO: 57458 - DNA, 963 bp, Artificial Sequence
  derived and/or modified sequence
atgaaccggcacctgtggaagagccagctgtgcgagatggtgcagccatcaggcggtcccgccgccgatcaagatgtgttaggtgaggagagccccctcggaaaaccggccatgctccacctaccgagtgagcagggggctcccgaaaccctgcaacggtgcctggaagagaatcaggagttgcgcgatgcaatccgccagtccaaccaaattcttagagaacggtgtgaagaactcctgcatttccaagcgagtcagagggaggagaaagagtttctaatgtgcaagtttcaggaggctagaaagctggtcgagagacttggtctggaaaagctcgatctcaaacggcaaaaggagcaagccctgagggaggttgagcacctcaaacggtgccaacagcaaatggccgaagacaaagcctcagtgaaagcccaggtgacctccctcctgggagaactgcaggaatcccagagcagactggaggccgcgaccaaggagtgccaggcactggaaggtcgccggaagctcgcccaactgcaagtcgcctaccatcagttgttccaagagtacgacaaccatatcaagtcaagcgttgtgggctcggaaagaaagagagctgacatatacaaggccgatttccaagcagagaggcaggcacgtgagaagctcgctgaaaaaaaagagctactgcaggagcagttagagcaactccagcgcgagtattctaagcttaaagctagctgtcaggagagcgctcgcatcgaggacatgaggaaacgacacgttgaggtctcacaggcacctctaccacccgcgcccgcatatttgagtagccccctggctttgccttcgcagcggagaagtcctccagaggaaccccctgacttttgctgtcctaagtgccaataccaggcccctgacatggatacactccagatccacgtgatggagtgcatagaatag

SEQ ID NO: 57459 - DNA, 963 bp, Artificial Sequence
  derived and/or modified sequence
atgaacaggcacttgtggaaatcacagctgtgtgagatggtgcaacctagcggtgggcctgccgcagaccaagacgtacttggcgaagaaagtccattgggaaaacccgcaatgctgcatctgccaagcgagcagggtgcgcctgaaaccctccagcgatgtttggaagagaaccaggaactgcgggacgcaatcagacaatcaaatcagattttgagggagcgttgcgaggaattgctgcacttccaggccagccagcgcgaggagaaagaatttctgatgtgcaagtttcaggaggcacggaagttggttgaacgactgggcctggagaagctcgatctcaaacgacagaaagagcaggccctccgcgaagtggaacacctgaagagatgtcagcagcagatggccgaggacaaggcctccgtcaaagcccaggtgaccagtttgctaggtgagctgcaggaatcccagagcagactcgaggctgccacaaaggagtgccaggctctggaggggcgtaggaaattggcacagctgcaggtcgcctaccatcagttgtttcaagaatatgataatcacatcaaatcttctgttgtgggttcagagcggaagagagcggatatctacaaggctgatttccaggctgaacgacaggctcgagagaaactggcagaaaaaaaggagctcttacaagaacagcttgagcagctacaacgcgagtactcaaagctgaaggcatcttgccaagagtctgccagaattgaggatatgagaaagcgacacgtggaagtgtcacaagctcctctgcctccggctccagcctatctgagtagcccactggctttgccttcccaaaggagatcaccgccagaggagccacccgacttctgttgtcccaagtgtcaataccaggctcccgatatggacaccctccagatccatgtgatggagtgtattgaatag

SEQ ID NO: 57460 - DNA, 963 bp, Artificial Sequence
  derived and/or modified sequence
atgaacagacacctgtggaagagccagctgtgcgagatggtgcagcccagcggcggccccgccgccgaccaggacgtgctgggcgaggagagccccctgggcaagcccgccatgctgcacctgcccagcgagcagggcgcccccgagaccctgcagagatgcctggaggagaaccaggagctgagagacgccatcagacagagcaaccagatcctgagagagagatgcgaggagctgctgcacttccaggccagccagagagaggagaaggagttcctgatgtgcaagttccaggaggccagaaagctggtggagagactgggcctggagaagctggacctgaagagacagaaggagcaggccctgagagaggtggagcacctgaagagatgccagcagcagatggccgaggacaaggccagcgtgaaggcccaggtgaccagcctgctgggcgagctgcaggagagccagagcagactggaggccgccaccaaggagtgccaggccctggagggcagaagaaagctggcccagctgcaggtggcctaccaccagctgttccaggagtacgacaaccacatcaagagcagcgtggtgggcagcgagagaaagagagccgacatctacaaggccgacttccaggccgagagacaggccagagagaagctggccgagaagaaggagctgctgcaggagcagctggagcagctgcagagagagtacagcaagctgaaggccagctgccaggagagcgccagaatcgaggacatgagaaagagacacgtggaggtgagccaggcccccctgccccccgcccccgcctacctgagcagccccctggccctgcccagccagagaagaagcccccccgaggagccccccgacttctgctgccccaagtgccagtaccaggcccccgacatggacaccctgcagatccacgtgatggagtgcatcgagtag

SEQ ID NO: 57461 - protein, 336 aa, Artificial Sequence
  derived and/or modified sequence
MPFCDKDRTLMTPVQNLEQSYMPPDSSSPENKSLEVSDTRFHSFSFYELKNVTNNFDERPISVGGNKMGEGGFGVVYKGYVNNTTVAVKKLAAMVDITTEELKQQFDQEIKVMAKCQHENLVELLGFSSDGDDLCLVYVYMPNGSLLDRLSCLDGTPPLSWHMRCKIAQGAANGINFLHENHHIHRDIKSANILLDEAFTAKISDFGLARASEKFAQTVMTSRIVGTTAYMAPEALRGEITPKSDIYSFGVVLLEIITGLPAVDEHREPQLLLDIKEEIEDEEKTIEDYIDKKMNDADSTSVEAMYSVASQCLHEKKNKRPDIKKVQQLLQEMTAS

SEQ ID NO: 57462 - DNA, 1011 bp, Artificial Sequence
  derived and/or modified sequence
atgccgttctgcgacaaggatagaaccctaatgacgcctgtgcaaaatcttgaacaatcctacatgccccccgatagcagcagccccgaaaacaagagtctagaagtctctgatactcggttccattccttctctttttatgagctgaagaatgtcactaacaattttgatgaaagacctatttcagtcggcgggaataagatgggcgaaggaggttttggggtcgtctacaaaggctacgtgaataacaccaccgtggcagtcaagaagctagctgccatggtcgatatcactactgaggaacttaagcagcagtttgatcaggagatcaaagtcatggctaaatgccaacacgagaatcttgtggaactcctgggctttagtagcgatggcgacgatctgtgtcttgtttacgtgtatatgcccaacgggtcactcctggatcgcctgagctgcctagacgggaccccaccactgtcttggcacatgcgatgtaaaattgcgcagggcgcagctaatggaataaatttccttcatgaaaaccaccacattcatagggatattaagtctgccaacattctgcttgatgaagccttcacagccaaaatcagcgactttgggctcgcccgggcctcagaaaagtttgcccaaacagtgatgacctctcgcatcgttggaaccacagcttacatggccccagaagcacttcgcggagaaattacgccgaagtcagatatttactcctttggtgttgtgctcctggaaattataactggactgcctgcggttgacgaacaccgggagccccagctactgctcgacattaaagaggaaatcgaagatgaagaaaaaactattgaagactatatagacaaaaaaatgaacgacgctgattccacaagcgttgaagcaatgtactccgtggcaagtcaatgtctgcacgagaaaaagaacaagagaccggatattaagaaggtacaacagttacttcaggagatgacggcttcttag

SEQ ID NO: 57463 - DNA, 1011 bp, Artificial Sequence
  derived and/or modified sequence
atgcccttttgtgataaggatcggacattgatgacaccagtccaaaatctagaacagagttacatgccacccgattcctcttctccagaaaataaaagcttagaagtctctgatacacggttccacagtttctcattttacgaactaaagaacgtgacaaacaatttcgacgaaagaccaatatcagtcggtggaaataaaatgggggagggtgggttcggcgttgtgtataaagggtacgtcaacaatacgaccgtggcagttaaaaaattagccgccatggtcgacattaccaccgaggagctgaaacagcagtttgaccaagagattaaagttatggcaaaatgtcagcacgagaatctggttgagctcctgggatttagctcagacggcgatgacctgtgcctggtgtatgtttacatgccaaacgggtctctgctggataggctgtcttgcctggacggcacaccccccttgtcgtggcatatgcgatgcaaaatcgctcaaggagcggctaatggaatcaatttcctgcacgaaaatcaccacattcacagagacatcaagtccgccaacattctgcttgacgaggcttttaccgcaaagatctccgactttggacttgcgcgcgctagtgaaaagttcgctcagacggttatgacctctaggatcgtgggaaccactgcatacatggcgcccgaggctttgaggggcgaaattaccccaaagtctgacatatattcattcggtgtggtcttgctggagattataaccggtctccctgccgttgatgaacaccgcgagccacagctgctgctagacattaaagaagagatcgaagatgaggaaaaaacaatagaggattatattgacaaaaaaatgaatgacgccgacagcacctccgtggaagcgatgtacagcgtcgcctcacagtgcctccacgaaaagaagaacaaacgccccgacattaaaaaagttcagcagctgctgcaggagatgacagcatcgtag

SEQ ID NO: 57464 - DNA, 1011 bp, Artificial Sequence
  derived and/or modified sequence
atgcccttctgtgacaaggacaggaccctgatgacccctgtgcagaacctggagcagagctacatgcccccagacagcagcagccctgagaacaagagcctggaggtgtctgacacccgcttccacagcttctccttctatgagctgaagaatgtgaccaacaactttgatgagcggcccatctctgtgggcggcaacaagatgggagagggcggctttggagtggtgtacaagggctacgtgaacaacaccaccgtggccgtgaagaagctggccgccatggtggacatcaccacagaggagctgaagcagcagtttgaccaggagatcaaggtgatggccaagtgccagcacgagaacctggtggagctgctgggcttcagcagtgatggagatgacctgtgcctggtgtatgtgtacatgcccaacggcagcctgctggaccggctgagctgcctggatggcaccccacccctgtcctggcacatgcgctgcaagatcgcccagggcgccgccaacggcatcaacttcctgcacgagaaccaccacatccaccgggacatcaagagcgccaacatcctgctggatgaggccttcaccgccaagatcagtgactttggcctggcccgggccagcgagaagtttgcccagacagtgatgaccagccgcatcgtgggcaccacagcctacatggcccctgaggccctgcggggggagatcacccccaagagtgacatctacagctttggagtggtgctgctggagatcatcaccggcctgcctgctgtggatgagcaccgggagccccagctgctgctggacatcaaggaggagattgaagatgaggagaagaccatcgaggactacatcgacaagaagatgaatgatgctgacagcacctctgtggaggccatgtacagcgtggccagccagtgcctgcacgagaagaagaacaagaggccagacatcaagaaggtgcagcagctgctgcaggagatgacagccagctag

SEQ ID NO: 57465 - DNA, 1011 bp, Artificial Sequence
  derived and/or modified sequence
atgcccttctgcgacaaggaccggaccctgatgacccccgtgcagaacttagaacagtcctatatgccacctgacagctcttcaccagagaataagtcactcgaggtctcggatacaagatttcatagtttcagcttctatgagttgaagaacgtaaccaataatttcgatgagcgtcctatctcagtggggggaaataagatgggcgaaggcggatttggagtggtttacaaagggtatgtgaacaatactaccgtggccgtgaaaaaactggccgcaatggtcgatattacaacagaggagctcaagcagcagttcgaccaggagatcaaagttatggcaaaatgccaacacgagaatctggtggaattactcggtttctcctcagatggagacgacctctgtctcgtgtatgtttatatgcctaacggttcgctcctggacaggttgtcatgtctcgacggcactccgccattatcatggcatatgcgctgcaagatagcccagggggccgcgaacggaataaacttcttgcacgaaaaccatcacattcacagagacattaagtcagccaatattcttctggacgaggcctttacagccaaaatttcagactttggattggccagggcatccgaaaaattcgctcagaccgtgatgacttccagaattgtgggaaccaccgcctacatggcacccgaagcactaagaggagagatcacgccgaagtctgacatctatagtttcggggtggtgctattggagatcattactggtcttccagcggtggatgagcatagagaaccccagttattgcttgatatcaaagaagagattgaggacgaagagaagactatcgaggattacatcgacaagaagatgaacgatgccgatagcacttctgtggaagccatgtatagtgtagcttcacaatgtttgcacgagaagaagaacaagcggccagatatcaagaaggttcaacagttgctgcaggagatgacagcatcctag

SEQ ID NO: 57466 - DNA, 1011 bp, Artificial Sequence
  derived and/or modified sequence
atgcccttctgcgacaaggaccggaccctgatgacccccgtgcagaacctcgagcaaagctatatgcccccagactcatcctcaccggagaataagagtcttgaggtttcagacactagatttcactcattcagtttttatgagctcaagaacgttaccaacaacttcgacgaaaggcccataagcgtcggcgggaacaaaatgggtgagggaggcttcggagtggtgtacaagggatacgtcaataacactacagtagccgtgaaaaaactcgccgctatggtcgacatcaccaccgaagagttgaaacagcagttcgatcaggagattaaggtgatggcaaaatgccagcacgaaaatcttgtggagctgctgggtttcagcagcgacggggatgacctgtgcctggtttatgtctatatgccaaacggatccctgctagatagactgtcttgtcttgacgggacgcctcccctgagctggcatatgcgctgtaagatagctcagggggcagcaaacggcatcaatttcctgcatgaaaaccaccacattcaccgtgatattaagtctgccaatattctattggacgaggcctttaccgcaaaaatttccgacttcgggttagcccgtgccagcgagaaattcgcacagactgttatgacctcaagaattgttgggacaactgcttacatggcccctgaggcccttcgcggggaaattactccaaagtctgacatctactccttcggggtggtactcttagaaattatcactggcctccccgccgtagacgaacatagggagcctcagttgctcctcgatatcaaagaggaaatagaagatgaggagaagaccattgaagactatatagacaaaaagatgaatgacgccgactcgacttctgtcgaggccatgtatagtgttgccagccagtgcttgcacgaaaaaaagaacaaacgccccgacatcaagaaggtgcagcaactgcttcaggagatgaccgccagctag

SEQ ID NO: 57467 - DNA, 1011 bp, Artificial Sequence
  derived and/or modified sequence
atgcccttttgtgacaaagatcgaacccttatgactccagtgcagaacctggagcaaagctatatgcctcctgacagtagtagccccgagaataagtccctggaagtaagcgatacccgctttcactcgttttctttctacgagctcaagaacgtcacaaataactttgatgagcgacccatttccgttggcggaaacaaaatgggagaagggggttttggcgtggtatacaagggctatgttaacaacacgaccgtggcggtaaagaagttggcggctatggttgacattacaacagaagagttgaagcagcagttcgatcaggaaatcaaagtgatggccaagtgccagcacgagaatcttgtggagctgttgggtttttcctcagatggggatgacctgtgcctcgtgtatgtatatatgcccaacggaagcctgttggaccggctgtcctgcctggatgggacccctcccctctcctggcatatgagatgcaaaatcgcgcagggagctgcaaatggcattaacttcctgcacgagaaccaccatatccaccgggacattaaatctgcgaatatcttgttggacgaggcattcacggccaaaattagcgattttggattggccagagctagcgaaaaatttgcccaaacagttatgacaagccggattgtgggaacgactgcctacatggcccctgaggcattgcggggagagattacccccaagagcgatatatattcgtttggcgttgtcctgctggaaattatcacggggctccccgctgtggatgagcaccgagagccacagctgctattggacattaaggaggagatcgaagacgaggagaagactattgaggattatattgacaagaagatgaacgatgcagatagtactagcgttgaggctatgtattccgtggctagccagtgtctacacgaaaagaagaataaacgcccagatattaagaaggtccagcagctcctccaggagatgactgcttcttag

SEQ ID NO: 57468 - DNA, 1011 bp, Artificial Sequence
  derived and/or modified sequence
atgcctttctgcgacaaggatcgaacactgatgacgccggtgcaaaacttagaacagtcctatatgccgcctgactcctctagccccgagaataaatctctggaagtgtcggatacgagattccacagcttttcattctatgaattgaagaacgtcacaaacaactttgatgaacgacccatcagcgtaggcggaaataagatgggcgaggggggttttggcgttgtgtacaagggctatgtgaacaacaccacagtcgctgtgaaaaagctggctgcaatggtggatataacaacagaggaactgaagcagcaatttgaccaggagattaaggtgatggcaaagtgtcagcatgaaaatctggttgaacttctggggttctcctcggacggagacgatctctgtctggtgtatgtctacatgccaaacggatccctactagataggctcagttgcctggatggtacgccaccactctcttggcatatgcgctgtaagattgcacagggggcagcgaatgggattaactttctgcatgagaaccatcatatccaccgcgatattaaatctgctaacattcttctcgacgaagccttcacggctaagattagtgattttggactcgctcgcgcatccgaaaagttcgcccaaactgtaatgacatcccgcatcgtaggtaccaccgcttatatggcacccgaagcactgcgaggggagatcacaccaaagtcggacatatactcttttggcgttgtgttactggagatcatcacaggactgccagccgtcgatgaacatagggaaccacagctgctgttagatattaaggaggagatcgaagacgaagaaaaaaccatagaggactatatcgataagaagatgaacgacgctgattctacgagtgtggaggcaatgtatagtgtggctagccagtgtttacatgaaaaaaagaacaagaggccagatatcaagaaggtacaacagttgctccaggaaatgaccgccagctag

SEQ ID NO: 57469 - DNA, 1011 bp, Artificial Sequence
  derived and/or modified sequence
atgcccttctgcgacaaggacagaaccctgatgacccccgtgcagaacctggagcagagctacatgccccccgacagcagcagccccgagaacaagagcctggaggtgagcgacaccagattccacagcttcagcttctacgagctgaagaacgtgaccaacaacttcgacgagagacccatcagcgtgggcggcaacaagatgggcgagggcggcttcggcgtggtgtacaagggctacgtgaacaacaccaccgtggccgtgaagaagctggccgccatggtggacatcaccaccgaggagctgaagcagcagttcgaccaggagatcaaggtgatggccaagtgccagcacgagaacctggtggagctgctgggcttcagcagcgacggcgacgacctgtgcctggtgtacgtgtacatgcccaacggcagcctgctggacagactgagctgcctggacggcaccccccccctgagctggcacatgagatgcaagatcgcccagggcgccgccaacggcatcaacttcctgcacgagaaccaccacatccacagagacatcaagagcgccaacatcctgctggacgaggccttcaccgccaagatcagcgacttcggcctggccagagccagcgagaagttcgcccagaccgtgatgaccagcagaatcgtgggcaccaccgcctacatggcccccgaggccctgagaggcgagatcacccccaagagcgacatctacagcttcggcgtggtgctgctggagatcatcaccggcctgcccgccgtggacgagcacagagagccccagctgctgctggacatcaaggaggagatcgaggacgaggagaagaccatcgaggactacatcgacaagaagatgaacgacgccgacagcaccagcgtggaggccatgtacagcgtggccagccagtgcctgcacgagaagaagaacaagagacccgacatcaagaaggtgcagcagctgctgcaggagatgaccgccagctag

SEQ ID NO: 57470 - protein, 650 aa, Artificial Sequence
  derived and/or modified sequence
MGAQLTTFALAGAVRRMNTFQDQSGSSSNREPLLRCSDARRDLELAIGGVLRAEQQIKDNLREVKAQIHSCISRHLECLRSREVWLYEQVDLIYQLKEETLQQQAQQLYSLLGQFNCLTHQLECTQNKDLANQVSVCLERLGSLTLKPEDSTVLLFEADTITLRQTITTFGSLKTIQIPEHLMAHASSANIGPFLEKRGCISMPEQKSASGIVAVPFSEWLLGSKPASGYQAPYIPSTDPQDWLTQKQTLENSQTSSRACNFFNNVGGNLKGLENWLLKSEKSSYQKCNSHSTTSSFSIEMEKVGDQELPDQDEMDLSDWLVTPQESHKLRKPENGSRETSEKFKLLFQSYNVNDWLVKTDSCTNCQGNQPKGVEIENLGNLKCLNDHLEAKKPLSTPSMVTEDWLVQNHQDPCKVEEVCRANEPCTSFAECVCDENCEKEALYKWLLKKEGKDKNGMPVEPKPEPEKHKDSLNMWLCPRKEVIEQTKAPKAMTPSRIADSFQVIKNSPLSEWLIRPPYKEGSPKEVPGTEDRAGKQKFKSPMNTSWCSFNTADWVLPGKKMGNLSQLSSGEDKWLLRKKAQEVLLNSPLQEEHNFPPDHYGLPAVCDLFACMQLKVDKEKWLYRTPLQAYFKMNFQDVTVGNFQIPCGF

SEQ ID NO: 57471 - DNA, 1953 bp, Artificial Sequence
  derived and/or modified sequence
atgggcgcccaactgaccactttcgctctggccggagccgtccggcggatgaacaccttccaggatcaatcaggatcatcgtccaaccgggaacctctgctgcgctgctccgacgcacgtcgcgacctggaactcgctattggcggtgtgttaagagccgagcagcagattaaagataacctgagggaggtgaaggcccaaatccactcgtgcatctccaggcatctggaatgcctgcgaagccgcgaagtgtggctgtacgaacaggtggacctgatttaccagctgaaggaagagacccttcagcaacaggctcagcagctgtacagccttctcggacagtttaactgtttgacacaccaactggaatgcacccagaataaagatctcgcaaaccaggtctcagtgtgccttgagcggttaggttccctgacattgaaaccagaagacagtacggttctcttgttcgaggctgacaccatcacactaagacagaccattaccaccttcggctctctgaagaccattcagatccctgagcacctgatggcccacgcttcttccgccaatatcggtccttttcttgagaaacgtggatgtatatcaatgcccgagcaaaagagcgctagcgggattgtcgccgtgccattctcggagtggcttctcgggagtaagcccgctagtgggtaccaggctccctatatcccctccactgacccccaggactggctgacacaaaaacagacccttgaaaatagccagacatctagtcgggcctgtaattttttcaataatgtcgggggcaacctgaagggactcgaaaactggcttcttaaatcagagaaaagctcataccagaaatgtaatagccactcaactacttctagcttctcgattgaaatggagaaagttggggatcaggaactacctgatcaagatgagatggatctctctgattggttggtgactcctcaggaatcgcacaagctcaggaaaccagagaatggctctcgcgaaacttctgaaaaattcaaactgctcttccagagctacaacgtgaatgactggctagtgaagaccgacagttgtacaaactgccagggcaatcagcctaagggagtggaaatcgagaacctcggtaatctgaagtgtttgaacgatcatctggaagccaagaaacctctcagcaccccctccatggtgactgaagactggctcgtgcagaaccaccaggacccttgcaaggtggaagaagtctgtagagccaatgagccatgcacaagtttcgccgaatgcgtctgcgacgagaactgcgagaaggaagctctgtacaagtggctcttgaaaaaagaagggaaagacaaaaacggcatgcctgtggagcccaagcccgagccggagaagcataaggattccttgaatatgtggctatgtccacgcaaggaagttattgagcagaccaaggcacctaaggcaatgacccctagtcggatcgccgattctttccaggtcatcaagaatagcccactttccgagtggttaatcagacccccttacaaagaagggtctccaaaggaagtgcctggcaccgaggaccgcgcaggtaagcagaaattcaaatcccccatgaatacgagttggtgtagctttaacaccgcagactgggtgttgccgggaaagaaaatgggcaacttgtcacagctgtctagcggggaggacaagtggctgctccggaaaaaggcccaagaggtgctcctgaattcccctctccaggaggagcacaacttccctccagaccattacgggcttcccgcggtgtgtgacctctttgcatgcatgcagctgaaagtggacaaagaaaagtggctgtaccggaccccacttcaagcgtattttaaaatgaatttccaggacgttaccgtgggcaacttccaaataccttgcggattctag

SEQ ID NO: 57472 - DNA, 1953 bp, Artificial Sequence
  derived and/or modified sequence
atgggcgcccagctgaccacctttgccctggccggggctgtgcggaggatgaacaccttccaggaccagagcggcagcagcagcaaccgggagcccctgctgcgctgcagtgatgcccggcgggacctggagctggccatcggcggcgtgctgcgggcagagcagcagatcaaggacaacctgcgggaggtgaaggcccagatccacagctgcatcagccgccacctggagtgcctgcggagccgggaggtgtggctgtatgagcaggtggacctgatctaccagctgaaggaggagaccctgcagcagcaggcccagcagctgtacagcctgctgggccagttcaactgcctgacccaccagctggagtgcacccagaacaaggacctggccaaccaggtgtctgtgtgcctggagcggctgggcagcctgaccctgaagccagaggacagcacagtgctgctgtttgaggccgacaccatcaccctgcggcagaccatcaccaccttcggcagcctgaagaccatccagatccctgagcacctgatggcccacgccagcagcgccaacatcggccccttcctggagaagaggggctgcatctccatgcctgagcagaagagcgccagcggcatcgtggccgtgcccttcagcgagtggctgctgggcagcaagccagccagcggctaccaggccccctacatccccagcacagacccccaggactggctgacccagaagcagaccctggagaacagccagaccagcagccgggcctgcaacttcttcaacaacgtgggcggcaacctgaagggcctggagaactggctgctgaagtctgagaagagcagctaccagaagtgcaacagccacagcaccaccagcagcttcagcattgagatggagaaggtgggggaccaggagctgcctgaccaggatgagatggacctgagtgactggctggtgaccccccaggagagccacaagctgaggaagccagaaaatggcagccgggagaccagcgagaagttcaagctgctcttccagagctacaacgtgaatgactggctggtgaagacagacagctgcaccaactgccagggcaaccagcccaagggcgtggagattgagaacctgggcaacctgaagtgcctgaatgaccacctggaggccaagaagcccctgagcacccccagcatggtgacagaggactggctggtgcagaaccaccaggacccctgcaaggtggaggaggtgtgccgggccaatgagccctgcaccagctttgctgaatgtgtgtgtgatgagaactgtgagaaggaggccctgtacaagtggctgctgaagaaggagggcaaggacaagaatggcatgcctgtggagcccaagccagagcctgagaagcacaaggacagcctgaacatgtggctgtgccccaggaaggaggtgattgagcagaccaaggcccccaaggccatgacccccagcagaattgctgacagcttccaggtgatcaagaacagccccctgtctgagtggctgatccggcccccctacaaggagggcagccccaaggaggtgcccggcacagaagatcgggccggcaagcagaagttcaagagccccatgaacacctcctggtgcagcttcaacacagctgactgggtgctgcccgggaagaagatgggcaacctgagccagctgagcagcggggaggacaagtggctgctgaggaagaaggcccaggaggtgctgctgaacagccccctgcaggaggagcacaacttccccccagaccactacggcctgcctgctgtgtgtgacctgtttgcctgcatgcagctgaaggtggacaaggagaagtggctgtaccgcacccccctgcaggcctacttcaagatgaacttccaggatgtgacagtgggcaacttccagatcccctgtggcttctag

SEQ ID NO: 57473 - DNA, 1953 bp, Artificial Sequence
  derived and/or modified sequence
atgggcgcccagctgaccaccttcgccctggccggcgccgtgcggcgtatgaatacttttcaggatcagagtggatctagttctaatcgggagcccttattgaggtgctcggacgcccgccgtgatctggaactcgcaataggtggtgtcttacgggccgaacagcagatcaaggacaacctcagggaagtgaaggcccagattcacagctgcatcagccggcatctcgagtgcttgaggagccgcgaagtgtggctttacgagcaggtggatctcatctaccagttgaaagaggaaacactgcagcagcaggcacagcagctatacagtctgctcgggcagttcaactgccttacacatcagctggagtgtacccagaataaagacctggcaaatcaggtgtccgtgtgtttggagaggcttggatcattaacgctgaagccagaagacagcacagttctgctgttcgaggcggacaccatcaccctgcgtcaaacaataacaactttcgggtccctgaaaaccattcaaatcccggaacatcttatggcccacgcatctagtgctaacatcggaccctttttggagaaacgcggttgtattagcatgccagaacagaaaagcgcttctggcatcgtagccgtccccttttccgaatggcttctgggctcgaagcctgcctctggatatcaggcaccctatatccccagcacggatccacaggactggctgacacaaaaacagacactggagaacagtcaaacatcctctcgagcctgcaactttttcaataacgttggcggcaacctgaagggactggagaactggcttctcaaaagtgagaaatcttcatatcagaagtgtaactctcactctaccacatcctcattcagcatagaaatggagaaggtgggcgaccaggagctgcccgaccaagatgagatggatttgagcgactggcttgtgactccacaagaatcccacaaactcaggaaacccgaaaacggaagccgggaaacatctgaaaaattcaagctgttgtttcagtcgtataacgtgaacgactggctggtaaagacagactcatgcactaactgtcagggaaaccagcccaagggggtcgaaatcgaaaacttagggaacctgaaatgcttaaacgaccatctagaagctaaaaaacctctgtcaacgcccagtatggtgactgaggattggctggtgcagaatcaccaggacccatgcaaggtggaggaagtctgtcgagctaatgaaccttgcacttccttcgctgagtgtgtgtgtgacgagaattgtgaaaaagaagcgctgtacaagtggctcctgaaaaaggaaggcaaggataaaaatggcatgccggtggaaccaaagcctgaaccagagaagcataaggactctctgaatatgtggctgtgtccaaggaaagaagttatcgaacaaacaaaagcaccaaaggcaatgacgccttcccggatagctgacagctttcaggtgatcaaaaacagtccgttgtctgaatggcttattagacctccatacaaggagggctccccgaaagaggttccaggaactgaggatcgcgccggcaaacaaaagttcaagtcgccaatgaacacgtcatggtgctcctttaacacagccgactgggtgctgcctggtaaaaagatggggaacctgtctcaactgagcagcggcgaagataagtggctcctgaggaaaaaggctcaggaagttcttcttaatagcccgctgcaggaagagcataactttcctccggatcactatggactgccagcggtatgcgacttgtttgcttgcatgcagctgaaagtcgataaagagaaatggttgtacaggacccccctgcaggcctactttaagatgaattttcaggatgtcaccgtggggaactttcagatcccctgtgggttttag

SEQ ID NO: 57474 - DNA, 3735 bp, Artificial Sequence
  derived and/or modified sequence
agagggcagtcaagggcttctggctgacccgagcggagatctcgcgagactgtcagacgtatggcgagaggtgtgggaggaagattgtgttgtcgcgagaactctgcctttgggccgtaggttagtgtggggccgtgtctcagtccacccaaggtctcctcggatcgcctggagaggcactcggacctgttatgtctggacacattgcttcaacatagaacgcacatgaacaatgtggaggtctaggctggaatgggggcccagttgaccacttttgctctagctggagcagtgaggagaatgaataccttccaagaccagagtggcagctccagtaatagagaaccccttttgaggtgtagtgatgcacggagggacttggagcttgctattggtggagttctccgggctgaacagcaaattaaagataacttgcgagaggtcaaagctcagattcacagttgcataagccgtcacctggaatgtcttagaagccgtgaggtatggctgtatgaacaggtggaccttatttatcagcttaaagaggagacacttcaacagcaggctcagcagctctactcgttattgggccagttcaattgtcttactcatcaactggagtgtacccaaaacaaagatctagccaatcaagtctctgtgtgcctggagagactgggcagtttgacccttaagcctgaagattcaactgtcctgctctttgaagctgacacaattactctgcgccagaccatcaccacatttgggtctctcaaaaccattcaaattcctgagcacttgatggctcatgctagttcagcaaatattgggcccttcctggagaagagaggctgtatctccatgccagagcagaagtcagcatccggtattgtagctgtccctttcagcgaatggctccttggaagcaaacctgccagtggttatcaagctccttacatacccagcaccgacccccaggactggcttacccaaaagcagaccttggagaacagtcagacttcttccagagcctgcaatttcttcaataatgtcgggggaaacctaaagggcttagaaaactggctcctcaagagtgaaaaatcaagttatcaaaagtgtaacagccattccactactagttctttctccattgaaatggaaaaggttggagatcaagagcttcctgatcaagatgagatggacctatcagattggctagtgactccccaggaatcccataagctgcggaagcctgagaatggcagtcgtgaaaccagtgagaagtttaagctcttattccagtcctataatgtgaatgattggcttgtcaagactgactcctgtaccaactgtcagggaaaccagcccaaaggtgtggagattgaaaacctgggcaatctgaagtgcctgaatgaccacttggaggccaagaaaccattgtccacccccagcatggttacagaggattggcttgtccagaaccatcaggacccatgtaaggtagaggaggtgtgcagagccaatgagccctgcacaagctttgcagagtgtgtgtgtgatgagaattgtgagaaggaggctctgtataagtggcttctgaagaaagaaggaaaggataaaaatgggatgcctgtggaacccaaacctgagcctgagaagcataaagattccctgaatatgtggctctgtcctagaaaagaagtaatagaacaaactaaagcaccaaaggcaatgactccttctagaattgctgattccttccaagtcataaagaacagccccttgtcggagtggcttatcaggcccccatacaaagaaggaagtcccaaggaagtgcctggtactgaagacagagctggcaaacagaagtttaaaagccccatgaatacttcctggtgttcctttaacacagctgactgggtcctgccaggaaagaagatgggcaacctcagccagttatcttctggagaagacaagtggctgcttcgaaagaaggcccaggaagtattacttaattcacctctacaggaggaacataacttccccccagaccattatggcctccctgcagtttgtgatctctttgcctgtatgcagcttaaagttgataaagagaagtggttatatcgaactcctctacaggcatacttcaaaatgaactttcaagatgtaaccgttgggaattttcagatcccatgtggattctagtagtttatatacctacctcgaagatgtgaaggaatggacaagagttgagcagcctttctgctgattatcacacatcatgagctgagtgactgcagcttgccaaatctttgtgtttctgggtctgaccaattagcttagttcttctcctgcctaattttgaactagtaaagcaaagtgagtcatcagattatgagttactgtttaaaagaaaaatgctgtttattcatgctgaggtgattcagttccctccttcttacagaagtattttaattcaccccacactagaaatgcagcatctttgtggacgtctttttcacaagcctccaaggctccttagattgggtcgttactaaaagtacattaaaacactcttgtttatcgaagtatattgatgtattctaaagctagtaaacttccctaacgtttaattgccctacagatgcttctcttgctgtgggttttcttttgttagtggtctgaaataattattttcctgttctattaatacatagtgtattttgcacaaaaaaattaacctggtcaatagtgattaccaaaatatatattaataatcttggcaatttttgacattaattatgaaacattttagcccacgttagttctacattattcttcacttaaactcagctactgcaaattttgtctttctgtaaatgttattaaaatatccagtgagctctttagaaggactcagtattatttcaagactatttttgaggtaattctagccttttaaaatattctacagacctacggggcttaaaagaaccccagtaccgactaagcaaataggcaaaagacatgttggaaatgtagtatagtacttgaaacagtcactatcatagggataattggtgcatcctgtgtaaatggaagctgagcttgacacctggtgcttttaagtagggataaagtcatcctctcactgcaagcacagcatacctgtacctccaaaagtgacgttttagtgaacaggccgttttcaacacttgtgccttggggtgttcattgaagctttgtgaaaactactgatgttttctcagtctccttaaagttacgtccatgctttaaaatgtctgtgtaggagagaagtggggtttataatgttttctctaagatatctttgctgctttccagactttgaaactattaagcttcttaactgcctcttaccggaaatacttctggggaaacttcatggtcccaaaatgtcattgccatacagcttcactagagttctttgaaccacagctgaaaagagctttgtattattttttaattccctccccagatatcatttaggagtattatataaaggtggtgggcaaaaacaatgtaaggagcctttccagttatcttgagttgcagctctgtagtttcttgaggccaaacacactgtattttacaagtcaaaatataatttacattaatcactatgttaatgagtatgtaaaacattcttttgcattgatgaattttgtatctgcttccattaaaagcataacagcc

SEQ ID NO: 57475 - DNA, 1953 bp, Artificial Sequence
  derived and/or modified sequence
atgggcgctcaactgaccacattcgcactggcaggcgcagtgagaaggatgaatacctttcaggaccagtctggtagctcatccaatcgcgagccgctgctgaggtgctccgacgctagaagagatctggagcttgctatagggggagtgcttcgcgcagagcaacagatcaaagataatttgcgcgaggttaaagcccagatccactcctgcatctcccgccatttagagtgcctgagatccagggaagtttggctgtacgaacaggtcgatttgatataccagttaaaggaggagaccttgcagcagcaggcccaacagctttatagcctcctgggacagtttaactgtctaactcatcaactcgaatgcactcagaacaaagatctggctaatcaggtttccgtctgcctcgagaggttgggtagtctcactctaaagccagaagattctacagtgctcctgttcgaggccgataccatcacactccggcagaccatcacaacgttcggctctctgaagactatccagattcctgagcatctcatggcccacgcatctagcgcaaatatagggccatttctggagaaacggggttgcatcagcatgcctgagcagaaatccgcttctggaattgtggcagtgccatttagcgaatggctcttgggtagtaagcctgcctcaggctaccaggcaccgtacataccctcgaccgatccccaagattggctcactcagaaacagacgctcgaaaactcccagactagctccagagcttgcaatttttttaacaacgtgggcggtaatctgaaaggcttagaaaattggctgctgaagagcgaaaagtctagttaccagaagtgtaattctcacagcacgactagttccttcagcatcgagatggaaaaggtcggtgaccaggagctgccggatcaggacgagatggacttaagcgattggttggtcactccccaggaatcccacaagctcagaaagcctgaaaacggatcccgggagacctcagaaaagttcaagcttctgtttcagtcctacaatgtgaatgattggctggtgaagacggattcttgcacaaactgtcaaggtaatcagcccaagggcgtcgagattgagaacctggggaatctgaaatgtctgaacgaccacctggaggctaaaaaacccctatctacaccatctatggtgaccgaggactggctggtgcagaaccaccaggatccctgcaaagtcgaagaggtttgtagagccaacgagccttgtacgtcctttgccgagtgcgtgtgcgatgaaaactgtgagaaagaggccctgtataagtggctgcttaaaaaagaagggaaggacaagaatggcatgcctgtggaaccgaagcctgagcccgagaagcacaaagatagtctcaatatgtggctctgtcccaggaaagaagttattgagcagacaaaagccccaaaagctatgaccccaagtagaatcgccgatagctttcaggtcattaagaacagtccactgtccgagtggctcattaggccaccctataaggagggaagtcccaaggaggtccccggaacagaggacagggctggaaagcagaagtttaaatcacctatgaacacgtcatggtgctcgtttaatacagcagattgggtacttcctggcaaaaaaatggggaacttgagtcagcttagctcgggtgaagataaatggcttctgagaaaaaaagcccaggaagtgctactgaattcgcctctccaggaagagcataactttccgcctgatcattacggtttacctgccgtttgtgatctgtttgcctgtatgcagctaaaagttgataaagaaaagtggctctaccgcaccccccttcaggcttactttaagatgaacttccaggacgtcacagtgggaaattttcagattccttgtggcttttag

SEQ ID NO: 57476 - DNA, 1953 bp, Artificial Sequence
  derived and/or modified sequence
atgggcgcccagctgaccaccttcgccctggccggcgccgtgagaagaatgaacaccttccaggaccagagcggcagcagcagcaacagagagcccctgctgagatgcagcgacgccagaagagacctggagctggccatcggcggcgtgctgagagccgagcagcagatcaaggacaacctgagagaggtgaaggcccagatccacagctgcatcagcagacacctggagtgcctgagaagcagagaggtgtggctgtacgagcaggtggacctgatctaccagctgaaggaggagaccctgcagcagcaggcccagcagctgtacagcctgctgggccagttcaactgcctgacccaccagctggagtgcacccagaacaaggacctggccaaccaggtgagcgtgtgcctggagagactgggcagcctgaccctgaagcccgaggacagcaccgtgctgctgttcgaggccgacaccatcaccctgagacagaccatcaccaccttcggcagcctgaagaccatccagatccccgagcacctgatggcccacgccagcagcgccaacatcggccccttcctggagaagagaggctgcatcagcatgcccgagcagaagagcgccagcggcatcgtggccgtgcccttcagcgagtggctgctgggcagcaagcccgccagcggctaccaggccccctacatccccagcaccgacccccaggactggctgacccagaagcagaccctggagaacagccagaccagcagcagagcctgcaacttcttcaacaacgtgggcggcaacctgaagggcctggagaactggctgctgaagagcgagaagagcagctaccagaagtgcaacagccacagcaccaccagcagcttcagcatcgagatggagaaggtgggcgaccaggagctgcccgaccaggacgagatggacctgagcgactggctggtgaccccccaggagagccacaagctgagaaagcccgagaacggcagcagagagaccagcgagaagttcaagctgctgttccagagctacaacgtgaacgactggctggtgaagaccgacagctgcaccaactgccagggcaaccagcccaagggcgtggagatcgagaacctgggcaacctgaagtgcctgaacgaccacctggaggccaagaagcccctgagcacccccagcatggtgaccgaggactggctggtgcagaaccaccaggacccctgcaaggtggaggaggtgtgcagagccaacgagccctgcaccagcttcgccgagtgcgtgtgcgacgagaactgcgagaaggaggccctgtacaagtggctgctgaagaaggagggcaaggacaagaacggcatgcccgtggagcccaagcccgagcccgagaagcacaaggacagcctgaacatgtggctgtgccccagaaaggaggtgatcgagcagaccaaggcccccaaggccatgacccccagcagaatcgccgacagcttccaggtgatcaagaacagccccctgagcgagtggctgatcagacccccctacaaggagggcagccccaaggaggtgcccggcaccgaggacagagccggcaagcagaagttcaagagccccatgaacaccagctggtgcagcttcaacaccgccgactgggtgctgcccggcaagaagatgggcaacctgagccagctgagcagcggcgaggacaagtggctgctgagaaagaaggcccaggaggtgctgctgaacagccccctgcaggaggagcacaacttcccccccgaccactacggcctgcccgccgtgtgcgacctgttcgcctgcatgcagctgaaggtggacaaggagaagtggctgtacagaacccccctgcaggcctacttcaagatgaacttccaggacgtgaccgtgggcaacttccagatcccctgcggcttctag

SEQ ID NO: 57477 - protein, 614 aa, Artificial Sequence
  derived and/or modified sequence
MNTFQDQSGSSSNREPLLRCSDARRDLELAIGGVLRAEQQIKDNLREVKAQIHSCISRHLECLRSREVWLYEQVDLIYQLKEETLQQQAQQLYSLLGQFNCLTHQLECTQNKDLANQVSVCLERLGSLTLKPEDSTVLLFEADTITLRQTITTFGSLKTIQIPEHLMAHASSANIGPFLEKRGCISMPEQKSASGIVAVPFSEWLLGSKPASGYQAPYIPSTDPQDWLTQKQTLENSQTSSRACNFFNNVGGNLKGLENWLLKSEKSSYQKCNSHSTTSSFSIEMEKVGDQELPDQDEMDLSDWLVTPQESHKLRKPENGSRETSEKFKLLFQSYNVNDWLVKTDSCTNCQGNQPKGVEIENLGNLKCLNDHLEAKKPLSTPSMVTEDWLVQNHQDPCKVEEVCRANEPCTSFAECVCDENCEKEALYKWLLKKEGKDKNGMPVEPKPEPEKHKDSLNMWLCPRKEVIEQTKAPKAMTPSRIADSFQVIKNSPLSEWLIRPPYKEGSPKEVPGTEDRAGKQKFKSPMNTSWCSFNTADWVLPGKKMGNLSQLSSGEDKWLLRKKAQEVLLNSPLQEEHNFPPDHYGLPAVCDLFACMQLKVDKEKWLYRTPLQM

SEQ ID NO: 57478 - protein, 287 aa, Artificial Sequence
  derived and/or modified sequence
MNTFQDQSGSSSNREPLLRCSDARRDLELAIGGVLRAEQQIKDNLREVKAQIHSCISRHLECLRSREVWLYEQVDLIYQLKEETLQQQAQQLYSLLGQFNCLTHQLECTQNKDLANQVSVCLERLGSLTLKPEDSTVLLFEADTITLRQTITTFGSLKTIQIPEHLMAHASSANIGPFLEKRGCISMPEQKSASGIVAVPFSEWLLGSKPASGYQAPYIPSTDPQDWLTQKQTLENSQQEVLLNSPLQEEHNFPPDHYGLPAVCDLFACMQLKVDKEKWLYRTPLQV

SEQ ID NO: 57479 - protein, 575 aa, Artificial Sequence
  derived and/or modified sequence
MNTFQDQSGSSSNREPLLRCSDARRDLELAIGGVLRAEQQIKDNLREVKAQIHSCISRHLECLRSREVWLYEQVDLIYQLKEETLQQQAQQLYSLLGQFNCLTHQLECTQNKDLANQVSVCLERLGSLTLKPEDSTVLLFEADTITLRQTITTFGSLKTIQIPEHLMAHASSANIGPFLEKRGCISMPEQKSASGIVAVPFSEWLLGSKPASGYQAPYIPSTDPQDWLTQKQTLENSQTSSRACNFFNNVGGNLKGLENWLLKSEKSSYQKCNSHSTTSSFSIEMEKVGDQELPDQDEMDLSDWLVTPQESHKLRKPENGSRETSEKFKLLFQSYNVNDWLVKTDSCTNCQGNQPKGVEIENLGNLKCLNDHLEAKKPLSTPSMVTEDWLVQNHQDPCKVEEVCRANEPCTSFAECVCDENCEKEALYKWLLKKEGKDKNGMPVEPKPEPEKHKDSLNMWLCPRKEVIEQTKAPKAMTPSRIADSFQVIKNSPLSEWLIRPPYKEGSPKEVPGTEDRAGKQKYYLIHLYRRNITSPQTIMASLQFVISLPVCSLKLIKRSGYIELLYRCEGMDKS

SEQ ID NO: 57480 - protein, 448 aa, Artificial Sequence
  derived and/or modified sequence
MAHASSANIGPFLEKRGCISMPEQKSASGIVAVPFSEWLLGSKPASGYQAPYIPSTDPQDWLTQKQTLENSQTSSRACNFFNNVGGNLKGLENWLLKSEKSSYQKCNSHSTTSSFSIEMEKVGDQELPDQDEMDLSDWLVTPQESHKLRKPENGSRETSEKFKLLFQSYNVNDWLVKTDSCTNCQGNQPKGVEIENLGNLKCLNDHLEAKKPLSTPSMVTEDWLVQNHQDPCKVEEVCRANEPCTSFAECVCDENCEKEALYKWLLKKEGKDKNGMPVEPKPEPEKHKDSLNMWLCPRKEVIEQTKAPKAMTPSRIADSFQVIKNSPLSEWLIRPPYKEGSPKEVPGTEDRAGKQKFKSPMNTSWCSFNTADWVLPGKKMGNLSQLSSGEDKWLLRKKAQEVLLNSPLQEEHNFPPDHYGLPAVCDLFACMQLKVDKEKWLYRTPLQM

SEQ ID NO: 57481 - protein, 514 aa, Artificial Sequence
  derived and/or modified sequence
MNRWTLFISLKRRHFNSRLSSSTRLGSLTLKPEDSTVLLFEADTITLRQTITTFGSLKTIQIPEHLMAHASSANIGPFLEKRGCISMPEQKSASGIVAVPFSEWLLGSKPASGYQAPYIPSTDPQDWLTQKQTLENSQTSSRACNFFNNVGGNLKGLENWLLKSEKSSYQKCNSHSTTSSFSIEMEKVGDQELPDQDEMDLSDWLVTPQESHKLRKPENGSRETSEKFKLLFQSYNVNDWLVKTDSCTNCQGNQPKGVEIENLGNLKCLNDHLEAKKPLSTPSMVTEDWLVQNHQDPCKVEEVCRANEPCTSFAECVCDENCEKEALYKWLLKKEGKDKNGMPVEPKPEPEKHKDSLNMWLCPRKEVIEQTKAPKAMTPSRIADSFQVIKNSPLSEWLIRPPYKEGSPKEVPGTEDRAGKQKFKSPMNTSWCSFNTADWVLPGKKMGNLSQLSSGEDKWLLRKKAQEVLLNSPLQEEHNFPPDHYGLPAVCDLFACMQLKVDKEKWLYRTPLQM

SEQ ID NO: 57482 - protein, 264 aa, Artificial Sequence
  derived and/or modified sequence
  misc_feature (1)..(1): Xaa can be any naturally occurring amino acid
XCTPAWAAELDSVSKQKKNPKPTFKKKTEERTCEVKKVSRLGSLTLKPEDSTVLLFEADTITLRQTITTFGSLKTIQIPEHLMAHASSANIGPFLEKRGCISMPEQKSASGIVAVPFSEWLLGSKPASGYQAPYIPSTDPQDWLTQKQTLENSQTSSRACNFFNNVGGNLKGLENWLLKSEKSSYQKCNSHSTTSSFSIEMEKVGDQELPDQDEMDLSDWLVTPQESHKLRKPENGSRETSEKFKLLFQSYNVNDWLVKTDSCT

SEQ ID NO: 57483 - protein, 630 aa, Artificial Sequence
  derived and/or modified sequence
MGAQLTTFALAGAVRRMNTFQDQSGSSSNREPLLRCSDARRDLELAIGGVLRAEQQIKDNLREVKAQIHSCISRHLECLRSREVWLYEQVDLIYQLKEETLQQQAQQLYSLLGQFNCLTHQLECTQNKDLANQVSVCLERLGSLTLKPEDSTVLLFEADTITLRQTITTFGSLKTIQIPEHLMAHASSANIGPFLEKRGCISMPEQKSASGIVAVPFSEWLLGSKPASGYQAPYIPSTDPQDWLTQKQTLENSQTSSRACNFFNNVGGNLKGLENWLLKSEKSSYQKCNSHSTTSSFSIEMEKVGDQELPDQDEMDLSDWLVTPQESHKLRKPENGSRETSEKFKLLFQSYNVNDWLVKTDSCTNCQGNQPKGVEIENLGNLKCLNDHLEAKKPLSTPSMVTEDWLVQNHQDPCKVEEVCRANEPCTSFAECVCDENCEKEALYKWLLKKEGKDKNGMPVEPKPEPEKHKDSLNMWLCPRKEVIEQTKAPKAMTPSRIADSFQVIKNSPLSEWLIRPPYKEGSPKEVPGTEDRAGKQKFKSPMNTSWCSFNTADWVLPGKKMGNLSQLSSGEDKWLLRKKAQEVLLNSPLQEEHNFPPDHYGLPAVCDLFACMQLKVDKEKWLYRTPLQM

SEQ ID NO: 57484 - DNA, 3431 bp, Artificial Sequence
  derived and/or modified sequence
ggttagtgtggggccgtgtctcagtccacccaaggtctcctcggatcgcctggagaggcactcggacctggagcagtgaggagaatgaataccttccaagaccagagtggcagctccagtaatagagaaccccttttgaggtgtagtgatgcacggagggacttggagcttgctattggtggagttctccgggctgaacagcaaattaaagataacttgcgagaggtcaaagctcagattcacagttgcataagccgtcacctggaatgtcttagaagccgtgaggtatggctgtatgaacaggtggaccttatttatcagcttaaagaggagacacttcaacagcaggctcagcagctctactcgttattgggccagttcaattgtcttactcatcaactggagtgtacccaaaacaaagatctagccaatcaagtctctgtgtgcctggagagactgggcagtttgacccttaagcctgaagattcaactgtcctgctctttgaagctgacacaattactctgcgccagaccatcaccacatttgggtctctcaaaaccattcaaattcctgagcacttgatggctcatgctagttcagcaaatattgggcccttcctggagaagagaggctgtatctccatgccagagcagaagtcagcatccggtattgtagctgtccctttcagcgaatggctccttggaagcaaacctgccagtggttatcaagctccttacatacccagcaccgacccccaggactggcttacccaaaagcagaccttggagaacagtcagacttcttccagagcctgcaatttcttcaataatgtcgggggaaacctaaagggcttagaaaactggctcctcaagagtgaaaaatcaagttatcaaaagtgtaacagccattccactactagttctttctccattgaaatggaaaaggttggagatcaagagcttcctgatcaagatgagatggacctatcagattggctagtgactccccaggaatcccataagctgcggaagcctgagaatggcagtcgtgaaaccagtgagaagtttaagctcttattccagtcctataatgtgaatgattggcttgtcaagactgactcctgtaccaactgtcagggaaaccagcccaaaggtgtggagattgaaaacctgggcaatctgaagtgcctgaatgaccacttggaggccaagaaaccattgtccacccccagcatggttacagaggattggcttgtccagaaccatcaggacccatgtaaggtagaggaggtgtgcagagccaatgagccctgcacaagctttgcagagtgtgtgtgtgatgagaattgtgagaaggaggctctgtataagtggcttctgaagaaagaaggaaaggataaaaatgggatgcctgtggaacccaaacctgagcctgagaagcataaagattccctgaatatgtggctctgtcctagaaaagaagtaatagaacaaactaaagcaccaaaggcaatgactccttctagaattgctgattccttccaagtcataaagaacagccccttgtcggagtggcttatcaggcccccatacaaagaaggaagtcccaaggaagtgcctggtactgaagacagagctggcaaacagaagtttaaaagccccatgaatacttcctggtgttcctttaacacagctgactgggtcctgccaggaaagaagatgggcaacctcagccagttatcttctggagaagacaagtggctgcttcgaaagaaggcccaggaagtattacttaattcacctctacaggaggaacataacttccccccagaccattatggcctccctgcagtttgtgatctctttgcctgtatgcagcttaaagttgataaagagaagtggttatatcgaactcctctacagatgtgaaggaatggacaagagttgagcagcctttctgctgattatcacacatcatgagctgagtgactgcagcttgccaaatctttgtgtttctgggtctgaccaattagcttagttcttctcctgcctaattttgaactagtaaagcaaagtgagtcatcagattatgagttactgtttaaaagaaaaatgctgtttattcatgctgaggtgattcagttccctccttcttacagaagtattttaattcaccccacactagaaatgcagcatctttgtggacgtctttttcacaagcctccaaggctccttagattgggtcgttactaaaagtacattaaaacactcttgtttatcgaagtatattgatgtattctaaagctagtaaacttccctaacgtttaattgccctacagatgcttctcttgctgtgggttttcttttgttagtggtctgaaataattattttcctgttctattaatacatagtgtattttgcacaaaaaaattaacctggtcaatagtgattaccaaaatatatattaataatcttggcaatttttgacattaattatgaaacattttagcccacgttagttctacattattcttcacttaaactcagctactgcaaattttgtctttctgtaaatgttattaaaatatccagtgagctctttagaaggactcagtattatttcaagactatttttgaggtaattctagccttttaaaatattctacagacctacggggcttaaaagaaccccagtaccgactaagcaaataggcaaaagacatgttggaaatgtagtatagtacttgaaacagtcactatcatagggataattggtgcatcctgtgtaaatggaagctgagcttgacacctggtgcttttaagtagggataaagtcatcctctcactgcaagcacagcatacctgtacctccaaaagtgacgttttagtgaacaggccgttttcaacacttgtgccttggggtgttcattgaagctttgtgaaaactactgatgttttctcagtctccttaaagttacgtccatgctttaaaatgtctgtgtaggagagaagtggggtttataatgttttctctaagatatctttgctgctttccagactttgaaactattaagcttcttaactgcctcttaccggaaatacttctggggaaacttcatggtcccaaaatgtcattgccatacagcttcactagagttctttgaaccacagctgaaaagagctttgtattattttttaattccctccccagatatcatttaggagtattatataaaggtggtgggcaaaaacaatgtaaggagcctttccagttatcttgagttgcagctctgtagtttcttgaggccaaacacactgtattttacaagtcaaaatataatttacattaatcactatgttaatgagtatgtaaaacattcttttgcattgatgaattttgtatctgcttccattaaaagcataacagcca

SEQ ID NO: 57485 - DNA, 3575 bp, Artificial Sequence
  derived and/or modified sequence
attgattcaattttacactgtgccaggcattgtggcattccacacaaatggtgagaagctaaaagtgagaaatttggcacaggtgaagaaggctgggtaacacatttgaaagactgctaaacaggtcttgcatgactggcctaagtgcaaagtgaagcagcccatcacgctccagctctccaaatcggagccggcatttcacccatgtgatacaggagcagtgaggagaatgaataccttccaagaccagagtggcagctccagtaatagagaaccccttttgaggtgtagtgatgcacggagggacttggagcttgctattggtggagttctccgggctgaacagcaaattaaagataacttgcgagaggtcaaagctcagattcacagttgcataagccgtcacctggaatgtcttagaagccgtgaggtatggctgtatgaacaggtggaccttatttatcagcttaaagaggagacacttcaacagcaggctcagcagctctactcgttattgggccagttcaattgtcttactcatcaactggagtgtacccaaaacaaagatctagccaatcaagtctctgtgtgcctggagagactgggcagtttgacccttaagcctgaagattcaactgtcctgctctttgaagctgacacaattactctgcgccagaccatcaccacatttgggtctctcaaaaccattcaaattcctgagcacttgatggctcatgctagttcagcaaatattgggcccttcctggagaagagaggctgtatctccatgccagagcagaagtcagcatccggtattgtagctgtccctttcagcgaatggctccttggaagcaaacctgccagtggttatcaagctccttacatacccagcaccgacccccaggactggcttacccaaaagcagaccttggagaacagtcagacttcttccagagcctgcaatttcttcaataatgtcgggggaaacctaaagggcttagaaaactggctcctcaagagtgaaaaatcaagttatcaaaagtgtaacagccattccactactagttctttctccattgaaatggaaaaggttggagatcaagagcttcctgatcaagatgagatggacctatcagattggctagtgactccccaggaatcccataagctgcggaagcctgagaatggcagtcgtgaaaccagtgagaagtttaagctcttattccagtcctataatgtgaatgattggcttgtcaagactgactcctgtaccaactgtcagggaaaccagcccaaaggtgtggagattgaaaacctgggcaatctgaagtgcctgaatgaccacttggaggccaagaaaccattgtccacccccagcatggttacagaggattggcttgtccagaaccatcaggacccatgtaaggtagaggaggtgtgcagagccaatgagccctgcacaagctttgcagagtgtgtgtgtgatgagaattgtgagaaggaggctctgtataagtggcttctgaagaaagaaggaaaggataaaaatgggatgcctgtggaacccaaacctgagcctgagaagcataaagattccctgaatatgtggctctgtcctagaaaagaagtaatagaacaaactaaagcaccaaaggcaatgactccttctagaattgctgattccttccaagtcataaagaacagccccttgtcggagtggcttatcaggcccccatacaaagaaggaagtcccaaggaagtgcctggtactgaagacagagctggcaaacagaagtttaaaagccccatgaatacttcctggtgttcctttaacacagctgactgggtcctgccaggaaagaagatgggcaacctcagccagttatcttctggagaagacaagtggctgcttcgaaagaaggcccaggaagtattacttaattcacctctacaggaggaacataacttccccccagaccattatggcctccctgcagtttgtgatctctttgcctgtatgcagcttaaagttgataaagagaagtggttatatcgaactcctctacagatgtgaaggaatggacaagagttgagcagcctttctgctgattatcacacatcatgagctgagtgactgcagcttgccaaatctttgtgtttctgggtctgaccaattagcttagttcttctcctgcctaattttgaactagtaaagcaaagtgagtcatcagattatgagttactgtttaaaagaaaaatgctgtttattcatgctgaggtgattcagttccctccttcttacagaagtattttaattcaccccacactagaaatgcagcatctttgtggacgtctttttcacaagcctccaaggctccttagattgggtcgttactaaaagtacattaaaacactcttgtttatcgaagtatattgatgtattctaaagctagtaaacttccctaacgtttaattgccctacagatgcttctcttgctgtgggttttcttttgttagtggtctgaaataattattttcctgttctattaatacatagtgtattttgcacaaaaaaattaacctggtcaatagtgattaccaaaatatatattaataatcttggcaatttttgacattaattatgaaacattttagcccacgttagttctacattattcttcacttaaactcagctactgcaaattttgtctttctgtaaatgttattaaaatatccagtgagctctttagaaggactcagtattatttcaagactatttttgaggtaattctagccttttaaaatattctacagacctacggggcttaaaagaaccccagtaccgactaagcaaataggcaaaagacatgttggaaatgtagtatagtacttgaaacagtcactatcatagggataattggtgcatcctgtgtaaatggaagctgagcttgacacctggtgcttttaagtagggataaagtcatcctctcactgcaagcacagcatacctgtacctccaaaagtgacgttttagtgaacaggccgttttcaacacttgtgccttggggtgttcattgaagctttgtgaaaactactgatgttttctcagtctccttaaagttacgtccatgctttaaaatgtctgtgtaggagagaagtggggtttataatgttttctctaagatatctttgctgctttccagactttgaaactattaagcttcttaactgcctcttaccggaaatacttctggggaaacttcatggtcccaaaatgtcattgccatacagcttcactagagttctttgaaccacagctgaaaagagctttgtattattttttaattccctccccagatatcatttaggagtattatataaaggtggtgggcaaaaacaatgtaaggagcctttccagttatcttgagttgcagctctgtagtttcttgaggccaaacacactgtattttacaagtcaaaatataatttacattaatcactatgttaatgagtatgtaaaacattcttttgcattgatgaattttgtatctgcttccattaaaagcataacagcc

SEQ ID NO: 57486 - DNA, 3487 bp, Artificial Sequence
  derived and/or modified sequence
ctggagttgccgtgtgacgcgtgggcgggacgaggcccgggctcggggacctttcgcactcgggtcaggggtaaagcagcctgtcgcttgccgggcagctggtgagtcggtgacctggcctgtgaggagcagtgaggagaatgaataccttccaagaccagagtggcagctccagtaatagagaaccccttttgaggtgtagtgatgcacggagggacttggagcttgctattggtggagttctccgggctgaacagcaaattaaagataacttgcgagaggtcaaagctcagattcacagttgcataagccgtcacctggaatgtcttagaagccgtgaggtatggctgtatgaacaggtggaccttatttatcagcttaaagaggagacacttcaacagcaggctcagcagctctactcgttattgggccagttcaattgtcttactcatcaactggagtgtacccaaaacaaagatctagccaatcaagtctctgtgtgcctggagagactgggcagtttgacccttaagcctgaagattcaactgtcctgctctttgaagctgacacaattactctgcgccagaccatcaccacatttgggtctctcaaaaccattcaaattcctgagcacttgatggctcatgctagttcagcaaatattgggcccttcctggagaagagaggctgtatctccatgccagagcagaagtcagcatccggtattgtagctgtccctttcagcgaatggctccttggaagcaaacctgccagtggttatcaagctccttacatacccagcaccgacccccaggactggcttacccaaaagcagaccttggagaacagtcagacttcttccagagcctgcaatttcttcaataatgtcgggggaaacctaaagggcttagaaaactggctcctcaagagtgaaaaatcaagttatcaaaagtgtaacagccattccactactagttctttctccattgaaatggaaaaggttggagatcaagagcttcctgatcaagatgagatggacctatcagattggctagtgactccccaggaatcccataagctgcggaagcctgagaatggcagtcgtgaaaccagtgagaagtttaagctcttattccagtcctataatgtgaatgattggcttgtcaagactgactcctgtaccaactgtcagggaaaccagcccaaaggtgtggagattgaaaacctgggcaatctgaagtgcctgaatgaccacttggaggccaagaaaccattgtccacccccagcatggttacagaggattggcttgtccagaaccatcaggacccatgtaaggtagaggaggtgtgcagagccaatgagccctgcacaagctttgcagagtgtgtgtgtgatgagaattgtgagaaggaggctctgtataagtggcttctgaagaaagaaggaaaggataaaaatgggatgcctgtggaacccaaacctgagcctgagaagcataaagattccctgaatatgtggctctgtcctagaaaagaagtaatagaacaaactaaagcaccaaaggcaatgactccttctagaattgctgattccttccaagtcataaagaacagccccttgtcggagtggcttatcaggcccccatacaaagaaggaagtcccaaggaagtgcctggtactgaagacagagctggcaaacagaagtttaaaagccccatgaatacttcctggtgttcctttaacacagctgactgggtcctgccaggaaagaagatgggcaacctcagccagttatcttctggagaagacaagtggctgcttcgaaagaaggcccaggaagtattacttaattcacctctacaggaggaacataacttccccccagaccattatggcctccctgcagtttgtgatctctttgcctgtatgcagcttaaagttgataaagagaagtggttatatcgaactcctctacagatgtgaaggaatggacaagagttgagcagcctttctgctgattatcacacatcatgagctgagtgactgcagcttgccaaatctttgtgtttctgggtctgaccaattagcttagttcttctcctgcctaattttgaactagtaaagcaaagtgagtcatcagattatgagttactgtttaaaagaaaaatgctgtttattcatgctgaggtgattcagttccctccttcttacagaagtattttaattcaccccacactagaaatgcagcatctttgtggacgtctttttcacaagcctccaaggctccttagattgggtcgttactaaaagtacattaaaacactcttgtttatcgaagtatattgatgtattctaaagctagtaaacttccctaacgtttaattgccctacagatgcttctcttgctgtgggttttcttttgttagtggtctgaaataattattttcctgttctattaatacatagtgtattttgcacaaaaaaattaacctggtcaatagtgattaccaaaatatatattaataatcttggcaatttttgacattaattatgaaacattttagcccacgttagttctacattattcttcacttaaactcagctactgcaaattttgtctttctgtaaatgttattaaaatatccagtgagctctttagaaggactcagtattatttcaagactatttttgaggtaattctagccttttaaaatattctacagacctacggggcttaaaagaaccccagtaccgactaagcaaataggcaaaagacatgttggaaatgtagtatagtacttgaaacagtcactatcatagggataattggtgcatcctgtgtaaatggaagctgagcttgacacctggtgcttttaagtagggataaagtcatcctctcactgcaagcacagcatacctgtacctccaaaagtgacgttttagtgaacaggccgttttcaacacttgtgccttggggtgttcattgaagctttgtgaaaactactgatgttttctcagtctccttaaagttacgtccatgctttaaaatgtctgtgtaggagagaagtggggtttataatgttttctctaagatatctttgctgctttccagactttgaaactattaagcttcttaactgcctcttaccggaaatacttctggggaaacttcatggtcccaaaatgtcattgccatacagcttcactagagttctttgaaccacagctgaaaagagctttgtattattttttaattccctccccagatatcatttaggagtattatataaaggtggtgggcaaaaacaatgtaaggagcctttccagttatcttgagttgcagctctgtagtttcttgaggccaaacacactgtattttacaagtcaaaatataatttacattaatcactatgttaatgagtatgtaaaacattcttttgcattgatgaattttgtatctgcttccattaaaagcataacagcca

SEQ ID NO: 57487 - DNA, 1893 bp, Artificial Sequence
  derived and/or modified sequence
atgggagcacagctgacgacattcgcattggctggagccgtccgaagaatgaatacatttcaagaccagtctggatcgtcctcaaacagagaaccgttgctgagatgctccgatgccagacgtgacctggaactggccatcggcggcgttctgcgggcagagcagcaaattaaggacaacctccgagaggtgaaggcccagatccacagttgcatttctaggcacctcgaatgtctgcgcagtcgggaggtgtggctttacgaacaggtagatctgatctaccagctcaaagaggaaaccctgcaacagcaagcacagcagctgtactccctcttggggcagttcaactgcttgacccaccagctcgaatgtacacagaataaagaccttgctaatcaggtgtctgtttgtctggagagactcggatccctcactctgaagcccgaggacagtaccgttctgctgttcgaggccgatacgatcactctgcgtcaaactatcacaactttcggttcccttaagactattcagatccccgagcacctcatggcgcatgctagttcagccaacatcgggccatttttggaaaaacgaggatgcatcagcatgccagagcagaagtctgcgagcggtatcgtggcagttcctttctctgagtggctacttggctcaaaacccgccagtggttaccaggcgccctacatcccgagcacagatcctcaggattggctgacacagaagcagaccttggaaaactcccagacatcgtctagagcttgcaactttttcaataatgtgggagggaacttgaaaggcttagaaaattggctgctgaagtcggagaagtcatcctaccagaagtgcaactcccacagcacaacatcaagcttttcaattgagatggaaaaggtgggcgatcaggagttgcccgaccaggacgagatggaccttagtgattggctggtgacccctcaagaatcacacaagttacgcaagcctgagaacggttccagggagacatctgaaaagttcaagctgctgtttcagagctataatgtcaacgactggctcgttaaaacagatagctgtactaattgccagggcaaccagcccaaaggcgtcgaaatagaaaacctgggaaacctgaaatgtcttaatgaccacttggaggctaaaaagcctctttctactccttccatggtgacagaggattggctggttcaaaatcatcaggacccctgcaaggtggaagaggtgtgcagagctaacgagccttgcacctcattcgcagagtgcgtgtgcgatgagaactgtgagaaagaggcactgtataaatggttattgaaaaaggagggaaaagataagaatggtatgccagttgagcctaaacctgaacccgaaaagcataaagactcactgaacatgtggctttgcccgcggaaggaggttattgaacaaactaaagctccaaaggccatgactccttcaaggatcgctgactcttttcaagtgattaagaattcacccctctccgagtggctcattcgacctccctataaggaaggctcccctaaagaagtgcctggcaccgaggatcgagccggaaaacaaaaattcaaatcaccaatgaacacgtcctggtgctcattcaacacagctgattgggtgcttcctggcaagaaaatggggaatctctcgcagctgtccagcggagaagataagtggttgctaaggaaaaaagcccaagaagtgttactaaattcacccctccaggaagaacataacttccccccagatcactatggcctgcccgcggtctgtgacctgtttgcgtgtatgcagcttaaggtagataaggagaagtggttatatcgcacaccgctgcagatgtag

SEQ ID NO: 57488 - DNA, 1893 bp, Artificial Sequence
  derived and/or modified sequence
atgggcgcccagctgaccacctttgccctggccggggctgtgcggaggatgaacaccttccaggaccagagcggcagcagcagcaaccgggagcccctgctgcgctgcagtgatgcccggcgggacctggagctggccatcggcggcgtgctgcgggcagagcagcagatcaaggacaacctgcgggaggtgaaggcccagatccacagctgcatcagccgccacctggagtgcctgcggagccgggaggtgtggctgtatgagcaggtggacctgatctaccagctgaaggaggagaccctgcagcagcaggcccagcagctgtacagcctgctgggccagttcaactgcctgacccaccagctggagtgcacccagaacaaggacctggccaaccaggtgtctgtgtgcctggagcggctgggcagcctgaccctgaagccagaggacagcacagtgctgctgtttgaggccgacaccatcaccctgcggcagaccatcaccaccttcggcagcctgaagaccatccagatccctgagcacctgatggcccacgccagcagcgccaacatcggccccttcctggagaagaggggctgcatctccatgcctgagcagaagagcgccagcggcatcgtggccgtgcccttcagcgagtggctgctgggcagcaagccagccagcggctaccaggccccctacatccccagcacagacccccaggactggctgacccagaagcagaccctggagaacagccagaccagcagccgggcctgcaacttcttcaacaacgtgggcggcaacctgaagggcctggagaactggctgctgaagtctgagaagagcagctaccagaagtgcaacagccacagcaccaccagcagcttcagcattgagatggagaaggtgggggaccaggagctgcctgaccaggatgagatggacctgagtgactggctggtgaccccccaggagagccacaagctgaggaagccagaaaatggcagccgggagaccagcgagaagttcaagctgctcttccagagctacaacgtgaatgactggctggtgaagacagacagctgcaccaactgccagggcaaccagcccaagggcgtggagattgagaacctgggcaacctgaagtgcctgaatgaccacctggaggccaagaagcccctgagcacccccagcatggtgacagaggactggctggtgcagaaccaccaggacccctgcaaggtggaggaggtgtgccgggccaatgagccctgcaccagctttgctgaatgtgtgtgtgatgagaactgtgagaaggaggccctgtacaagtggctgctgaagaaggagggcaaggacaagaatggcatgcctgtggagcccaagccagagcctgagaagcacaaggacagcctgaacatgtggctgtgccccaggaaggaggtgattgagcagaccaaggcccccaaggccatgacccccagcagaattgctgacagcttccaggtgatcaagaacagccccctgtctgagtggctgatccggcccccctacaaggagggcagccccaaggaggtgcccggcacagaagatcgggccggcaagcagaagttcaagagccccatgaacacctcctggtgcagcttcaacacagctgactgggtgctgcccgggaagaagatgggcaacctgagccagctgagcagcggggaggacaagtggctgctgaggaagaaggcccaggaggtgctgctgaacagccccctgcaggaggagcacaacttccccccagaccactacggcctgcctgctgtgtgtgacctgtttgcctgcatgcagctgaaggtggacaaggagaagtggctgtaccgcacccccctgcagatgtag

SEQ ID NO: 57489 - DNA, 1893 bp, Artificial Sequence
  derived and/or modified sequence
atgggcgcccagctgaccaccttcgccctggccggcgccgtgcggcgcatgaacactttccaggatcagtccggctcaagctcaaacagggagccactgttgcgctgttctgatgcaagacgcgatctggaactggcgatagggggagttctcagagctgaacagcagatcaaagataatcttcgtgaggtgaaggcacagattcacagctgcatcagcagacatctggaatgcttacgtagtcgggaggtgtggttgtatgaacaagtagaccttatctatcagctgaaggaggagacgctccagcagcaggcccaacagctgtactctctccttgggcagtttaactgtttaacacatcagctagagtgtacccagaacaaagacctggccaaccaggtatcagtgtgtcttgagaggttggggtctttgacactgaaacccgaggattccaccgtactcctgttcgaggctgacacgattaccctcagacagactatcaccacgtttggatcactgaagacgattcagatcccagaacacctgatggcccacgcctcaagcgcgaacatcggaccctttctggaaaaaagagggtgcataagcatgcccgaacagaagagcgcgtcgggcatcgtcgcagttccattcagtgaatggttgcttggctccaagcccgcctccggctatcaggctccatatataccctcgactgaccctcaggattggctcacacaaaagcagaccctggaaaatagtcagacctcaagccgggcttgcaactttttcaacaatgtgggcggcaatctgaaaggtttggagaactggctcctgaaaagcgagaaatcctcataccagaaatgcaatagccattccactactagctctttttcaattgagatggagaaggtgggcgaccaggaactgccagatcaagatgagatggacctgtcggattggttagtgactccccaggaatcccataaactgaggaagccggaaaacggttctcgtgagaccagtgagaagtttaagctgttgttccagtcctacaacgtcaatgactggcttgtcaaaactgattcttgtacaaattgtcaggggaaccaacctaaaggggttgagattgaaaatctcgggaacctcaaatgtctcaatgaccatctcgaggctaagaaacccctctcgaccccctctatggttacagaagactggcttgtgcaaaatcaccaggatccatgcaaggtggaggaagtgtgcagagccaacgaaccttgcacgtctttcgccgaatgcgtctgtgacgagaattgcgaaaaagaggccctctacaagtggcttctgaagaaagaaggcaaagacaagaacgggatgcctgtcgaaccaaaacctgagccggaaaagcacaaggactccctgaacatgtggttgtgccccagaaaagaggtcatagagcagactaaagcacccaaggccatgacaccatctcgaattgctgatagcttccaggttatcaaaaactctcccctgtccgaatggttgatccgccctccttataaagaggggtctccaaaagaggtacctggaactgaagacagggccggtaagcaaaaatttaagagtccaatgaacacgagttggtgttcattcaacaccgccgactgggtattacctggcaagaaaatgggcaatttatcacagcttagctcgggggaggacaagtggcttctccggaaaaaagcccaggaagtcctgctgaattcacccctccaggaggagcataattttcctccagaccactacggtctgcctgcagtgtgcgacctgtttgcttgtatgcagctgaaagtggacaaggagaaatggttgtaccggacccccttgcaaatgtag

SEQ ID NO: 57490 - DNA, 945 bp, Artificial Sequence
  derived and/or modified sequence
ggttagtgtggggccgtgtctcagtccacccaaggtctcctcggatcgcctggagaggcactcggacctggagcagtgaggagaatgaataccttccaagaccagagtggcagctccagtaatagagaaccccttttgaggtgtagtgatgcacggagggacttggagcttgctattggtggagttctccgggctgaacagcaaattaaagataacttgcgagaggtcaaagctcagattcacagttgcataagccgtcacctggaatgtcttagaagccgtgaggtatggctgtatgaacaggtggaccttatttatcagcttaaagaggagacacttcaacagcaggctcagcagctctactcgttattgggccagttcaattgtcttactcatcaactggagtgtacccaaaacaaagatctagccaatcaagtctctgtgtgcctggagagactgggcagtttgacccttaagcctgaagattcaactgtcctgctctttgaagctgacacaattactctgcgccagaccatcaccacatttgggtctctcaaaaccattcaaattcctgagcacttgatggctcatgctagttcagcaaatattgggcccttcctggagaagagaggctgtatctccatgccagagcagaagtcagcatccggtattgtagctgtccctttcagcgaatggctccttggaagcaaacctgccagtggttatcaagctccttacatacccagcaccgacccccaggactggcttacccaaaagcagaccttggagaacagtcagcaggaagtattacttaattcacctctacaggaggaacataacttccccccagaccattatggcctccctgcagtttgtgatctctttgcctgtatgcagcttaaagttgataaagagaagtggttatatcgaactcctctacaggtg

SEQ ID NO: 57491 - DNA, 3293 bp, Artificial Sequence
  derived and/or modified sequence
cgggtcaggggtaaagcagcctgtcgcttgccgggcagctggtgagtcggtgacctggcctgtgaggagcagtgaggagaatgaataccttccaagaccagagtggcagctccagtaatagagaaccccttttgaggtgtagtgatgcacggagggacttggagcttgctattggtggagttctccgggctgaacagcaaattaaagataacttgcgagaggtcaaagctcagattcacagttgcataagccgtcacctggaatgtcttagaagccgtgaggtatggctgtatgaacaggtggaccttatttatcagcttaaagaggagacacttcaacagcaggctcagcagctctactcgttattgggccagttcaattgtcttactcatcaactggagtgtacccaaaacaaagatctagccaatcaagtctctgtgtgcctggagagactgggcagtttgacccttaagcctgaagattcaactgtcctgctctttgaagctgacacaattactctgcgccagaccatcaccacatttgggtctctcaaaaccattcaaattcctgagcacttgatggctcatgctagttcagcaaatattgggcccttcctggagaagagaggctgtatctccatgccagagcagaagtcagcatccggtattgtagctgtccctttcagcgaatggctccttggaagcaaacctgccagtggttatcaagctccttacatacccagcaccgacccccaggactggcttacccaaaagcagaccttggagaacagtcagacttcttccagagcctgcaatttcttcaataatgtcgggggaaacctaaagggcttagaaaactggctcctcaagagtgaaaaatcaagttatcaaaagtgtaacagccattccactactagttctttctccattgaaatggaaaaggttggagatcaagagcttcctgatcaagatgagatggacctatcagattggctagtgactccccaggaatcccataagctgcggaagcctgagaatggcagtcgtgaaaccagtgagaagtttaagctcttattccagtcctataatgtgaatgattggcttgtcaagactgactcctgtaccaactgtcagggaaaccagcccaaaggtgtggagattgaaaacctgggcaatctgaagtgcctgaatgaccacttggaggccaagaaaccattgtccacccccagcatggttacagaggattggcttgtccagaaccatcaggacccatgtaaggtagaggaggtgtgcagagccaatgagccctgcacaagctttgcagagtgtgtgtgtgatgagaattgtgagaaggaggctctgtataagtggcttctgaagaaagaaggaaaggataaaaatgggatgcctgtggaacccaaacctgagcctgagaagcataaagattccctgaatatgtggctctgtcctagaaaagaagtaatagaacaaactaaagcaccaaaggcaatgactccttctagaattgctgattccttccaagtcataaagaacagccccttgtcggagtggcttatcaggcccccatacaaagaaggaagtcccaaggaagtgcctggtactgaagacagagctggcaaacagaagtattacttaattcacctctacaggaggaacataacttccccccagaccattatggcctccctgcagtttgtgatctctttgcctgtatgcagcttaaagttgataaagagaagtggttatatcgaactcctctacagatgtgaaggaatggacaagagttgagcagcctttctgctgattatcacacatcatgagctgagtgactgcagcttgccaaatctttgtgtttctgggtctgaccaattagcttagttcttctcctgcctaattttgaactagtaaagcaaagtgagtcatcagattatgagttactgtttaaaagaaaaatgctgtttattcatgctgaggtgattcagttccctccttcttacagaagtattttaattcaccccacactagaaatgcagcatctttgtggacgtctttttcacaagcctccaaggctccttagattgggtcgttactaaaagtacattaaaacactcttgtttatcgaagtatattgatgtattctaaagctagtaaacttccctaacgtttaattgccctacagatgcttctcttgctgtgggttttcttttgttagtggtctgaaataattattttcctgttctattaatacatagtgtattttgcacaaaaaaattaacctggtcaatagtgattaccaaaatatatattaataatcttggcaatttttgacattaattatgaaacattttagcccacgttagttctacattattcttcacttaaactcagctactgcaaattttgtctttctgtaaatgttattaaaatatccagtgagctctttagaaggactcagtattatttcaagactatttttgaggtaattctagccttttaaaatattctacagacctacggggcttaaaagaaccccagtaccgactaagcaaataggcaaaagacatgttggaaatgtagtatagtacttgaaacagtcactatcatagggataattggtgcatcctgtgtaaatggaagctgagcttgacacctggtgcttttaagtagggataaagtcatcctctcactgcaagcacagcatacctgtacctccaaaagtgacgttttagtgaacaggccgttttcaacacttgtgccttggggtgttcattgaagctttgtgaaaactactgatgttttctcagtctccttaaagttacgtccatgctttaaaatgtctgtgtaggagagaagtggggtttataatgttttctctaagatatctttgctgctttccagactttgaaactattaagcttcttaactgcctcttaccggaaatacttctggggaaacttcatggtcccaaaatgtcattgccatacagcttcactagagttctttgaaccacagctgaaaagagctttgtattattttttaattccctccccagatatcatttaggagtattatataaaggtggtgggcaaaaacaatgtaaggagcctttccagttatcttgagttgcagctctgtagtttcttgaggccaaacacactgtattttacaagtcaaaatataatttacattaatcactatgttaatgagtatgtaaaacattcttttgcattgatgaattttgtatctgcttccattaaaagcataacagccata

SEQ ID NO: 57492 - DNA, 3646 bp, Artificial Sequence
  derived and/or modified sequence
agagggcagtcaagggcttctggctgacccgagcggagatctcgcgagactgtcagacgtatggcgagaggtgtgggaggaagattgtgttgtcgcgagaactctgcctttgggccgtaggttagtgtggggccgtgtctcagtccacccaaggtctcctcggatcgcctggagaggcactcggacctgttatgtctggacacattgcttcaacatagaacgcacatgaacaatgtggaggtctaggctggaatgggggcccagttgaccacttttgctctagctggagcagtgaggagaatgaataccttccaagaccagagtggcagctccagtaatagagaaccccttttgaggtgtagtgatgcacggagggacttggagcttgctattggtggagttctccgggctgaacagcaaattaaagataacttgcgagaggtcaaagctcagattcacagttgcataagccgtcacctggaatgtcttagaagccgtgaggtatggctgtatgaacaggtggaccttatttatcagcttaaagaggagacacttcaacagcaggctcagcagctctactcgttattgggccagttcaattgtcttactcatcaactggagtgtacccaaaacaaagatctagccaatcaagtctctgtgtgcctggagagactgggcagtttgacccttaagcctgaagattcaactgtcctgctctttgaagctgacacaattactctgcgccagaccatcaccacatttgggtctctcaaaaccattcaaattcctgagcacttgatggctcatgctagttcagcaaatattgggcccttcctggagaagagaggctgtatctccatgccagagcagaagtcagcatccggtattgtagctgtccctttcagcgaatggctccttggaagcaaacctgccagtggttatcaagctccttacatacccagcaccgacccccaggactggcttacccaaaagcagaccttggagaacagtcagacttcttccagagcctgcaatttcttcaataatgtcgggggaaacctaaagggcttagaaaactggctcctcaagagtgaaaaatcaagttatcaaaagtgtaacagccattccactactagttctttctccattgaaatggaaaaggttggagatcaagagcttcctgatcaagatgagatggacctatcagattggctagtgactccccaggaatcccataagctgcggaagcctgagaatggcagtcgtgaaaccagtgagaagtttaagctcttattccagtcctataatgtgaatgattggcttgtcaagactgactcctgtaccaactgtcagggaaaccagcccaaaggtgtggagattgaaaacctgggcaatctgaagtgcctgaatgaccacttggaggccaagaaaccattgtccacccccagcatggttacagaggattggcttgtccagaaccatcaggacccatgtaaggtagaggaggtgtgcagagccaatgagccctgcacaagctttgcagagtgtgtgtgtgatgagaattgtgagaaggaggctctgtataagtggcttctgaagaaagaaggaaaggataaaaatgggatgcctgtggaacccaaacctgagcctgagaagcataaagattccctgaatatgtggctctgtcctagaaaagaagtaatagaacaaactaaagcaccaaaggcaatgactccttctagaattgctgattccttccaagtcataaagaacagccccttgtcggagtggcttatcaggcccccatacaaagaaggaagtcccaaggaagtgcctggtactgaagacagagctggcaaacagaagtttaaaagccccatgaatacttcctggtgttcctttaacacagctgactgggtcctgccaggaaagaagatgggcaacctcagccagttatcttctggagaagacaagtggctgcttcgaaagaaggcccaggaagtattacttaattcacctctacaggaggaacataacttccccccagaccattatggcctccctgcagtttgtgatctctttgcctgtatgcagcttaaagttgataaagagaagtggttatatcgaactcctctacagatgtgaaggaatggacaagagttgagcagcctttctgctgattatcacacatcatgagctgagtgactgcagcttgccaaatctttgtgtttctgggtctgaccaattagcttagttcttctcctgcctaattttgaactagtaaagcaaagtgagtcatcagattatgagttactgtttaaaagaaaaatgctgtttattcatgctgaggtgattcagttccctccttcttacagaagtattttaattcaccccacactagaaatgcagcatctttgtggacgtctttttcacaagcctccaaggctccttagattgggtcgttactaaaagtacattaaaacactcttgtttatcgaagtatattgatgtattctaaagctagtaaacttccctaacgtttaattgccctacagatgcttctcttgctgtgggttttcttttgttagtggtctgaaataattattttcctgttctattaatacatagtgtattttgcacaaaaaaattaacctggtcaatagtgattaccaaaatatatattaataatcttggcaatttttgacattaattatgaaacattttagcccacgttagttctacattattcttcacttaaactcagctactgcaaattttgtctttctgtaaatgttattaaaatatccagtgagctctttagaaggactcagtattatttcaagactatttttgaggtaattctagccttttaaaatattctacagacctacggggcttaaaagaaccccagtaccgactaagcaaataggcaaaagacatgttggaaatgtagtatagtacttgaaacagtcactatcatagggataattggtgcatcctgtgtaaatggaagctgagcttgacacctggtgcttttaagtagggataaagtcatcctctcactgcaagcacagcatacctgtacctccaaaagtgacgttttagtgaacaggccgttttcaacacttgtgccttggggtgttcattgaagctttgtgaaaactactgatgttttctcagtctccttaaagttacgtccatgctttaaaatgtctgtgtaggagagaagtggggtttataatgttttctctaagatatctttgctgctttccagactttgaaactattaagcttcttaactgcctcttaccggaaatacttctggggaaacttcatggtcccaaaatgtcattgccatacagcttcactagagttctttgaaccacagctgaaaagagctttgtattattttttaattccctccccagatatcatttaggagtattatataaaggtggtgggcaaaaacaatgtaaggagcctttccagttatcttgagttgcagctctgtagtttcttgaggccaaacacactgtattttacaagtcaaaatataatttacattaatcactatgttaatgagtatgtaaaacattcttttgcattgatgaattttgtatctgcttccattaaaagcataacagcc

SEQ ID NO: 57493 - DNA, 1893 bp, Artificial Sequence
  derived and/or modified sequence
atgggagctcaacttacgaccttcgctctggccggtgcggtcagacgcatgaatacctttcaggaccagtctggttcctccagcaatcgagagcctttattgagatgctccgatgctcgacgcgacctcgaattggcaatagggggtgtcctgcgggctgagcagcagattaaggataatctgagagaggtcaaagcccagattcatagctgcatcagccggcacctggaatgcctccgcagtcgggaggtgtggctgtatgagcaagtggacctgatttatcaactgaaggaggaaactctgcaacaacaagcacagcagctttactcgctgctgggacagtttaactgccttactcatcaactggaatgcacccagaacaaggatctggccaatcaggtgagtgtttgtttggaacggcttggttcacttacactgaaacccgaggactccacagtattactgttcgaagcggatacaataacactaaggcagaccattaccacattcgggagcctgaagaccatccagatccccgaacacctgatggcacatgcaagttcggcaaatattgggccttttctggaaaagagaggttgcattagcatgcccgagcaaaaaagtgcaagcggtattgtggcagtccctttctccgaatggctgctggggtccaagccagcgagcggatatcaggcaccatacattccttctactgatccacaagattggctcacacagaagcagacacttgagaattcacagactagttccagggcttgcaatttcttcaataatgttggagggaacctgaaggggcttgagaattggctcttgaaaagtgagaaaagttcctaccagaagtgcaattcgcacagtactacatcatcttttagtatcgaaatggaaaaggttggagatcaagagcttccagaccaagacgaaatggatctatcagattggctcgtgaccccccaggagtcacacaaactcagaaagccagagaacggatcaagagagacctcggagaagttcaaattactttttcagagctataatgttaatgattggctggtcaaaacagattcttgcaccaattgtcaggggaaccagcccaaaggggtagagattgagaatctcgggaatctgaagtgtttgaacgaccatctcgaggccaagaagccgttgagcaccccctcaatggtgactgaggactggcttgtccaaaatcaccaggacccctgtaaggtagaagaggtgtgtcgtgctaatgagccgtgtacttcatttgcagagtgtgtgtgcgacgagaactgcgagaaggaggccttatacaaatggttgctaaaaaaagagggtaaggataagaacggcatgcccgtggaacctaaaccagagcctgaaaagcataaagactccctgaacatgtggctatgcccacgcaaggaggtcatcgaacagacaaaggcacccaaggccatgacgccaagtcgcatagctgattcctttcaggttatcaagaattccccactttccgaatggcttatcagacccccatacaaggaaggcagccccaaggaagtcccaggtacggaggacagggccggaaagcagaagtttaaatctcctatgaacacctcctggtgtagtttcaacacggcagactgggtcttacccggtaagaagatgggcaatctgagtcaattatcttccggtgaggacaagtggctgcttcgtaagaaggctcaggaagttctgctcaattctcccttacaggaggaacataacttcccccctgatcactatggactgccggcagtctgcgacctgttcgcctgtatgcaactgaaggtggacaaagaaaaatggctttacaggacacctctgcagatgtag

SEQ ID NO: 57494 - DNA, 1893 bp, Artificial Sequence
  derived and/or modified sequence
atgggcgcccagctgaccaccttcgccctggccggcgccgtgagaagaatgaacaccttccaggaccagagcggcagcagcagcaacagagagcccctgctgagatgcagcgacgccagaagagacctggagctggccatcggcggcgtgctgagagccgagcagcagatcaaggacaacctgagagaggtgaaggcccagatccacagctgcatcagcagacacctggagtgcctgagaagcagagaggtgtggctgtacgagcaggtggacctgatctaccagctgaaggaggagaccctgcagcagcaggcccagcagctgtacagcctgctgggccagttcaactgcctgacccaccagctggagtgcacccagaacaaggacctggccaaccaggtgagcgtgtgcctggagagactgggcagcctgaccctgaagcccgaggacagcaccgtgctgctgttcgaggccgacaccatcaccctgagacagaccatcaccaccttcggcagcctgaagaccatccagatccccgagcacctgatggcccacgccagcagcgccaacatcggccccttcctggagaagagaggctgcatcagcatgcccgagcagaagagcgccagcggcatcgtggccgtgcccttcagcgagtggctgctgggcagcaagcccgccagcggctaccaggccccctacatccccagcaccgacccccaggactggctgacccagaagcagaccctggagaacagccagaccagcagcagagcctgcaacttcttcaacaacgtgggcggcaacctgaagggcctggagaactggctgctgaagagcgagaagagcagctaccagaagtgcaacagccacagcaccaccagcagcttcagcatcgagatggagaaggtgggcgaccaggagctgcccgaccaggacgagatggacctgagcgactggctggtgaccccccaggagagccacaagctgagaaagcccgagaacggcagcagagagaccagcgagaagttcaagctgctgttccagagctacaacgtgaacgactggctggtgaagaccgacagctgcaccaactgccagggcaaccagcccaagggcgtggagatcgagaacctgggcaacctgaagtgcctgaacgaccacctggaggccaagaagcccctgagcacccccagcatggtgaccgaggactggctggtgcagaaccaccaggacccctgcaaggtggaggaggtgtgcagagccaacgagccctgcaccagcttcgccgagtgcgtgtgcgacgagaactgcgagaaggaggccctgtacaagtggctgctgaagaaggagggcaaggacaagaacggcatgcccgtggagcccaagcccgagcccgagaagcacaaggacagcctgaacatgtggctgtgccccagaaaggaggtgatcgagcagaccaaggcccccaaggccatgacccccagcagaatcgccgacagcttccaggtgatcaagaacagccccctgagcgagtggctgatcagacccccctacaaggagggcagccccaaggaggtgcccggcaccgaggacagagccggcaagcagaagttcaagagccccatgaacaccagctggtgcagcttcaacaccgccgactgggtgctgcccggcaagaagatgggcaacctgagccagctgagcagcggcgaggacaagtggctgctgagaaagaaggcccaggaggtgctgctgaacagccccctgcaggaggagcacaacttcccccccgaccactacggcctgcccgccgtgtgcgacctgttcgcctgcatgcagctgaaggtggacaaggagaagtggctgtacagaacccccctgcagatgtag

SEQ ID NO: 57495 - protein, 95 aa, Artificial Sequence
  derived and/or modified sequence
MLRPKALTQVLSQANTGGVQSTLLLNNEGSLLAYSGYGDTDARVTAAIASNIWAAYDRNGNQAFNEDNLKFILMDCMAQALVQYLEEPLTQVAAS

SEQ ID NO: 57496 - DNA, 288 bp, Artificial Sequence
  derived and/or modified sequence
atgctgagacccaaggccctgacccaggtgctgagccaggccaacaccggcggcgtgcagagcaccctgctgctgaacaacgagggcagcctgctggcctacagcggctacggcgacaccgacgccagagtgaccgccgccatcgccagcaacatctgggccgcctacgacagaaacggcaaccaggccttcaacgaggacaacctgaagttcatcctgatggactgcatggcccaggccctggtgcagtacctggaggagcccctgacccaggtggccgccagctag

SEQ ID NO: 57497 - DNA, 288 bp, Artificial Sequence
  derived and/or modified sequence
atgctgaggcctaaggctctgacgcaggtcctaagccaagccaatacaggcggtgtccaatctacactactcctgaacaacgagggcagtctgctggcctatagtggctacggagatactgacgctcgcgttaccgcggctatcgcttccaacatttgggctgcctacgataggaacggaaaccaggcttttaacgaggacaatctcaaattcatcttaatggattgtatggctcaggccctggtacagtatttggaggagcccctcactcaggtagcagctagttag

SEQ ID NO: 57498 - DNA, 521 bp, Artificial Sequence
  derived and/or modified sequence
ggagcaggccaacgggactacgggaagcagcgggcagcggcccgcgggaggcacctcggagatctgggtgcaaaagcccagggttaggaaccgtaggcatgctgcgccccaaggctttgacccaggtgctaagccaagccaacactggaggcgtccagagcaccctgctgctgaataacgagggatcactgctggcctactctggttacggggacactgacgcccgggtcaccgctgccatagccagtaacatctgggccgcctacgaccggaacgggaaccaagcgtttaatgaagacaatctcaaattcatcctcatggactgcatggcccaggctttggtgcagtacctggaggagcccctcacccaagtggcggcatcttaacggcattggtggaagctggggtcagaaaagagaaatgaccatttggaggggcggggcctcctagaagaaccttcttagacaatggggggaggatgggactttgttttttccaagaataaacttcaactcctgtca

SEQ ID NO: 57499 - DNA, 288 bp, Artificial Sequence
  derived and/or modified sequence
atgctgcggcccaaggccctgacccaggtgctgagccaggccaacacaggaggagtgcagagcaccctgctgctgaacaatgaaggcagcctgctggcctacagcggctatggagacacagatgcccgggtgacagctgccatcgccagcaacatctgggccgcctatgacagaaatggaaaccaggccttcaatgaagacaacctgaagttcatcctgatggactgcatggcccaggccctggtgcagtacctggaggagcccctgacccaggtggccgccagctag

SEQ ID NO: 57500 - DNA, 288 bp, Artificial Sequence
  derived and/or modified sequence
atgctgcggcccaaggccctgacccaggtgctgagccaggccaacacgggcggcgtgcaatccacactactactcaacaacgaggggagtctgcttgcctacagcgggtatggagatactgatgcgagagtaaccgctgcgattgccagtaatatttgggccgcctacgataggaacgggaatcaggcattcaatgaagacaacctgaaatttatcttgatggattgtatggcgcaagcattagtgcagtatctcgaggaacctttgactcaagtggcagcttcttag

SEQ ID NO: 57501 - DNA, 288 bp, Artificial Sequence
  derived and/or modified sequence
atgctgagacccaaagctctcacccaagtgctttctcaggcaaacaccggtggcgtccagagtaccctgctgcttaataacgagggctccctgcttgcgtactcaggatacggagacactgacgccagggttaccgcggctattgctagtaacatttgggcagcctatgaccggaacgggaaccaagcatttaacgaggacaatttgaagtttatcctgatggattgcatggctcaggcattggtccagtatctcgaggagcctctgacacaggtagcagcaagctag

SEQ ID NO: 57502 - protein, 165 aa, Artificial Sequence
  derived and/or modified sequence
MALTGASDPSAEAEANGEKPFLLRALQIALVVSLYWVTSISMVFLNKYLLDSPSLRLDTPIFVTFYQCLVTTLLCKGLSALAACCPGAVDFPSLRLDLRVARSVLPLSVVFIGMITFNNLCLKYVGVAFYNVGRSLTTVFNVLLSYLLLKQTTSFYALLTCGIII

SEQ ID NO: 57503 - DNA, 1056 bp, Artificial Sequence
  derived and/or modified sequence
atggcactgacaggtgcctcagaccccagtgctgaggcagaggccaacggtgagaaaccttttctgctccgcgccctccagattgccctggtagtgtccctgtactgggttacatccatcagtatggtgttcttgaataagtatctgctggactctccttcactgcggctggacacgccgatcttcgtgaccttttaccagtgtctggtgaccaccctgctatgcaaagggctgagcgccctggctgcatgctgtccaggggccgtggattttccatccctcagacttgacctccgtgttgctagatcagtgctgccactgtcagttgtcttcatcggaatgatcacattcaataatctctgccttaagtacgtgggagtcgctttctacaatgtgggacgcagcctgacaaccgtgttcaacgttctgcttagttatctgttgctcaagcagactactagcttttatgccctgctgacttgcggaatcatcatcggtggcttctggctcggcgtggaccaggaaggcgccgaaggaaccctctcttggctgggcaccgtgttcggcgttctcgcttcactctgtgtgagcctgaacgctatctatacaaccaaagttctgcccgccgttgacgggtcaatttggcgcctgacattttataacaacgtgaatgcctgtatcttgttcctgcccttattgctcttgctcggtgaactgcaggcattaagagatttcgcccagctcggctcagctcatttctgggggatgatgacactggggggtttattcggctttgcgattggctacgttacaggacttcagattaagtttacatcaccccttactcataacgtgtctggcaccgcaaaggcatgtgcacagacggtgcttgcagtgctgtactacgaggagaccaaatcttttttatggtggactagtaatatgatggttcttggtgggagcagcgcgtacacttgggtgaggggctgggagatgaaaaagactccggaggagccatcacccaaggactccgagaagagtgccatgggtgtctag

SEQ ID NO: 57504 - DNA, 1056 bp, Artificial Sequence
  derived and/or modified sequence
atggctctaacgggcgcttccgacccgtctgccgaggcagaagccaacggagagaaaccctttctccttcgggcactgcagattgcccttgtggtcagcctgtattgggtgacttcaatatcgatggtgttcctgaacaagtacctgctggattccccgtcattgagactggatactcccattttcgtgactttttaccagtgcctggtgaccacactgctgtgcaaggggttaagcgctctggcagcctgctgtccaggcgcagtggatttcccatctttgagactggatctcagggtggccagaagcgtcttgcctctttccgtggtgtttattggaatgattaccttcaacaacttgtgcctcaagtacgtgggggtcgcgttctataacgtgggacgctccctgactaccgtctttaacgtattgctttcctacttactcctcaaacagacgaccagtttttatgcactcctgacttgcgggatcatcattggcggattttggctgggcgtcgatcaggaaggagctgagggtactctgagctggctagggaccgtgtttggggtgcttgcctcactgtgcgtaagtctcaatgctatctatacaacaaaggtactccccgccgttgacggttctatttggagactcacgttctacaacaatgtgaatgcttgtattctctttctgcctctcctgttactgcttggggaactgcaggccctgagagatttcgcgcagctgggttccgcccacttctggggaatgatgactttgggaggcctgtttggttttgccatcggatatgtgacagggctccaaattaaattcaccagtcctctgacacataacgtgagtggcacagccaaggcttgtgcacaaactgtgctggcagtgctttattacgaggagactaaaagctttttgtggtggactagtaacatgatggttctgggagggtccagtgcctacacgtgggtgcgggggtgggagatgaagaagaccccagaggaaccttcccccaaagattctgagaagtcagccatgggtgtttag

SEQ ID NO: 57505 - DNA, 1056 bp, Artificial Sequence
  derived and/or modified sequence
atggccctgaccggggccagtgaccccagcgctgaggccgaggccaacggggagaagcccttcctgctgcgggccctgcagatcgccctggtggtgtccctgtactgggtgaccagcatctccatggtgttcctgaacaagtacctgctggacagccccagcctgcggctggacacccccatctttgtgaccttctaccagtgcctggtgaccaccctgctgtgcaagggcctgagcgccctggccgcctgctgccctggagctgtggacttccccagcctgcggctggacctgcgggtggcccggtctgtgctgcccctgtctgtggtgttcatcggcatgatcaccttcaacaacctgtgcctgaagtatgtgggcgtggccttctacaacgtgggccgcagcctgaccaccgtcttcaacgtgctgctgagctacctgctgctgaagcagaccaccagcttctacgccctgctgacctgtggcatcatcattggaggcttctggctgggcgtggaccaggagggcgctgagggcaccctgtcctggctgggcaccgtgtttggagtgctggccagcctgtgtgtgtccctgaatgccatctacaccaccaaggtgctgcctgctgtggatggcagcatctggaggctgaccttctacaacaacgtgaatgcctgcatcctcttcctgcccctgctgctgctgctgggggagctgcaggccctgcgggactttgcccagctgggcagcgcccacttctggggcatgatgaccctgggcggcctgtttggatttgccatcggctacgtgacaggcctgcagatcaagttcaccagccccctgacccacaacgtgtctggaacagccaaggcctgtgcccagacagtgctggccgtgctgtactatgaggagaccaagagcttcctgtggtggaccagcaacatgatggtgctgggcggcagcagcgcctacacctgggtgcggggctgggagatgaagaagaccccagaggagcccagccccaaggacagcgagaagagcgccatgggcgtgtag

SEQ ID NO: 57506 - DNA, 1056 bp, Artificial Sequence
  derived and/or modified sequence
atggccctgaccggcgccagcgaccccagcgccgaggccgaggccaacggcgaaaagcctttcctgctaagggcactccagatcgcgctggttgtctcactctactgggtcacgagcatctcaatggtttttctgaacaaatacctgctggactccccatccctacgcctggacaccccaatattcgtgactttctaccagtgcttagtcacgacgctcttatgcaagggactgagtgctttggccgcctgttgccctggcgcggtggacttcccatctctcaggctagacttgagagtggctcggtcagtactccctctcagcgtggtgttcatcgggatgatcacgttcaataatctatgcttaaaatacgttggggtggcgttctacaacgtgggccgctccttgaccactgtatttaatgtgctgttatcttacctgttgcttaagcagacaacaagcttttacgccctgctaacatgcggcattatcatcggcggattttggttaggcgtggatcaggagggcgctgaagggaccctgtcatggctgggtacggtgtttggagttttggcatcattgtgcgttagtcttaacgcgatctacactactaaagtgctaccagccgtcgacggcagcatttggagactgacattctataacaacgtcaacgcatgcatactctttttgccactgcttctgctgctgggagagcttcaggcgctgagagatttcgcccagctcggctctgcccatttttgggggatgatgacactgggcgggctgttcgggttcgctatcgggtacgttaccggcctgcaaattaaattcaccagtccgctcactcataacgtcagcggcacggcaaaggcctgtgcccaaactgtgctagctgtgttgtattacgaggagacaaaaagctttctctggtggactagtaatatgatggtgctgggcggcagctctgcttacacctgggttcgcggatgggaaatgaagaaaacgccagaagaacccagccccaaagactctgaaaaaagcgcaatgggagtgtag

SEQ ID NO: 57507 - DNA, 1056 bp, Artificial Sequence
  derived and/or modified sequence
atggccctgaccggcgccagcgaccccagcgccgaggccgaggccaatggcgaaaaaccgtttctgctccgcgccctgcaaatagctcttgtggtttcactctactgggtgacgtctatcagcatggtgttcttgaacaagtacctcctagacagcccatccttacggttagacacaccaatctttgtgaccttctaccaatgcctcgtgaccactctgctctgcaaaggcctcagtgctttggccgcttgttgccccggggccgtcgatttcccatcactgcgccttgacctaagagtcgcaaggtccgtcctgccactgtcagtggtgttcattggcatgattaccttcaataacctctgtttaaaatacgtgggggtcgcattctacaacgttggaagatctttgactaccgtatttaatgtgctactgagctacctgttgttgaagcagaccacctcgttttacgccttgctcacttgtggaatcattatcggaggcttttggctaggcgtggatcaggagggtgccgagggcacgctctcttggttgggcaccgtgttcggagtgctggcctcattgtgtgtcagcctgaacgccatctacacaaccaaggtcctcccagccgtggatgggtctatttggagactgacgttctacaataatgtcaatgcctgtatcctgtttctacccctgctgcttttattaggcgagctacaggctctgcgggactttgcacagctgggaagcgctcatttctggggcatgatgaccctggggggcctgtttggcttcgctataggctacgtcacaggacttcagattaaattcacatcccctctgactcacaatgtcagcggtaccgcaaaagcatgcgcccagaccgtgctcgccgtgctgtattacgaggagacaaaatctttcctgtggtggacgagcaatatgatggtgttagggggatcatccgcatacacttgggtgagaggctgggaaatgaagaagaccccagaagagccctctcccaaagacagcgagaaaagtgccatgggcgtgtag

SEQ ID NO: 57508 - DNA, 1056 bp, Artificial Sequence
  derived and/or modified sequence
atggcactcacaggtgcttctgacccttcagctgaggctgaagcaaacggggagaagcccttcttgctcagggcactccagatagccttggtggtaagcctctactgggtcaccagcataagcatggtcttcctgaacaaatacctactggattcccctagtctccgactcgacactcctatcttcgtcaccttttatcagtgcctcgtaaccactttactctgcaaaggcctgtctgccctggccgcatgctgtccaggcgctgtggacttccctagcctgcgtctggacctccgagtagcgaggagcgtcctgcccctgagcgtggtttttatcggaatgataacgttcaataacttgtgcctgaagtatgttggtgttgctttctataatgtcgggagatccctgaccaccgtatttaatgtattattaagctacctcctactcaaacagaccacaagcttctacgcgttgctgacctgcggcatcatcatcggcggattttggttaggggtagaccaggaaggcgcagaaggcaccctgagttggctgggcactgttttcggcgtgctggcctctctgtgtgtgagcctgaacgcaatttacaccacaaaggtgctacccgcagtagacggttctatatggcgccttaccttctacaataacgtcaatgcttgtatcctgtttttgccactgctactgctcttaggcgaactacaggccttgcgcgactttgcccaattgggatcggcccacttctgggggatgatgacactaggaggactgttcggatttgctatcggttacgtgacaggcttgcaaataaagtttactagccccctgacccacaatgtttccggtaccgctaaggcatgtgctcagaccgtgctggccgtgttgtattacgaagagaccaaaagcttcctctggtggaccagcaatatgatggtcctcgggggtagctccgcctatacgtgggtgcggggatgggaaatgaagaaaacccctgaggagccaagccctaaagatagcgagaagtctgcaatgggtgtctag

SEQ ID NO: 57509 - DNA, 1056 bp, Artificial Sequence
  derived and/or modified sequence
atggctctgaccggcgcatctgatccatctgccgaggcagaggcaaatggggagaaaccatttctgctgcgcgcactccagatcgcgctcgtggtctcactttactgggtcacttcaattagtatggtctttttaaataagtacttgctagattcaccatctctccgcctcgatactccgattttcgtgacgttctaccagtgccttgtgacgactctgctttgcaagggactgtctgcactggcagcgtgctgccccggtgctgtggacttcccaagcctaaggcttgacctgcgagtcgctcgtagtgtcttgcccctatcagtggtgtttatcggaatgatcacattcaacaatctgtgtctcaagtatgtgggcgtcgccttttataacgttggacggtcactgacaacggtcttcaatgtcctgcttagctatctcctcctaaagcagacaactagtttctacgcattactgacctgtggtatcattatcgggggattctggctgggagtggaccaggaaggcgcagagggaaccttgtcatggttaggtactgtctttggtgtactggccagtttgtgtgtctctctgaacgccatctataccaccaaagtcctgccggctgtggacgggtctatctggcggctgactttttacaataacgtcaacgcctgtatcctgttcctgccgctgctgctgctgttaggcgaactgcaagcccttagggactttgcacaactgggaagcgctcacttttggggcatgatgaccctaggaggcctgttcggcttcgccattggttatgtaactggcctccagatcaagttcaccagtccgttgacacacaatgtaagtggcaccgctaaagcctgtgctcagaccgtgctagctgttctttactacgaggagacaaagagctttctgtggtggacctctaacatgatggtactcgggggaagtagcgcatatacctgggtgcggggttgggaaatgaaaaagactcctgaggagcccagtccgaaggactcggaaaaatccgctatgggggtctag

SEQ ID NO: 57510 - DNA, 1056 bp, Artificial Sequence
  derived and/or modified sequence
atggccctgaccggcgccagcgaccccagcgccgaggccgaggccaacggcgagaagcccttcctgctgagagccctgcagatcgccctggtggtgagcctgtactgggtgaccagcatcagcatggtgttcctgaacaagtacctgctggacagccccagcctgagactggacacccccatcttcgtgaccttctaccagtgcctggtgaccaccctgctgtgcaagggcctgagcgccctggccgcctgctgccccggcgccgtggacttccccagcctgagactggacctgagagtggccagaagcgtgctgcccctgagcgtggtgttcatcggcatgatcaccttcaacaacctgtgcctgaagtacgtgggcgtggccttctacaacgtgggcagaagcctgaccaccgtgttcaacgtgctgctgagctacctgctgctgaagcagaccaccagcttctacgccctgctgacctgcggcatcatcatcggcggcttctggctgggcgtggaccaggagggcgccgagggcaccctgagctggctgggcaccgtgttcggcgtgctggccagcctgtgcgtgagcctgaacgccatctacaccaccaaggtgctgcccgccgtggacggcagcatctggagactgaccttctacaacaacgtgaacgcctgcatcctgttcctgcccctgctgctgctgctgggcgagctgcaggccctgagagacttcgcccagctgggcagcgcccacttctggggcatgatgaccctgggcggcctgttcggcttcgccatcggctacgtgaccggcctgcagatcaagttcaccagccccctgacccacaacgtgagcggcaccgccaaggcctgcgcccagaccgtgctggccgtgctgtactacgaggagaccaagagcttcctgtggtggaccagcaacatgatggtgctgggcggcagcagcgcctacacctgggtgagaggctgggagatgaagaagacccccgaggagcccagccccaaggacagcgagaagagcgccatgggcgtgtag

SEQ ID NO: 57511 - DNA, 1176 bp, Artificial Sequence
  derived and/or modified sequence
atgattttgaacggagaagagatcatcttaagtctccagaagacaaaacatttgcttggtcctgattataccgaaaccctgtatagcccacggggagaggagataactaccaaacctgaaaatatggagcactgctactacaaggggaatatcctcaatgagaaaaactctgtcgcctccattagtacttgcgacggacttcgcgggtattttacccatcaccaccagcgctatcagatcaagcctctgaaatccaccgatgaaaaggagcacgctgtgttcactagcaatcaggaggagcaagaccctgctaaccatacctgcggcgttaaatctaccgatgggaagcaagggcccattcgtattagccgctccctgaaaagcccagaaaaggaggactttctccgggcccagaagtatattgatctgtatctggtcctggataatgctttttacaaaaattacaatgagaacctgacgttgattcgcagtttcgtgttcgacgtcatgaatcttctcaacgtgatttacaatacaatagacgtccaagtcgccctggtaggtatggagatatggagcgacggggacaagatcaaagtggttccatccgcttcgacaaccttcgacaactttctgcggtggcatagcagcaatttggggaagaagatacacgatcacgcacaactcctttcaggaatcagctttaataatcgccgcgtgggtctggcggcctcaaacagtttatgtagcccttccagcgttgccgtgatcgaggcgaaaaaaaaaaacaacgtcgcattggtcggagtcatgagccacgaactggggcacgtactggggatgcctgacgtgccctttaacacaaagtgcccatctggctcctgtgtgatgaatcagtacctgtctagtaaatttcccaaggatttttccacatcttgtagagcacattttgaacggtatctgctgagtcagaagcccaagtgcctgctccaggctcccatccctaccaacatcatgactaccccagtgtgcggtaaccacctattggaggtgggggaggattgtgactgtggctcccctaaggagtgcacgaacctctgttgtgaagccctcacttgcaagctcaaacctggtaccgactgcggcggggatgcgcccaatcacaccactgagtag

SEQ ID NO: 57512 - DNA, 1176 bp, Artificial Sequence
  derived and/or modified sequence
atgatcctcaacggagaagaaatcattctgagcctccaaaagacgaagcatctgctcggaccagattataccgaaaccctctatagcccgagaggggaagagataactaccaaacccgagaacatggaacactgctattataaggggaacatcctgaatgagaaaaactctgtcgcttctatcagtacttgcgatggcctgcgcggatacttcacccaccaccatcagcgctaccaaattaaaccacttaagtctacagatgagaaggagcacgcggtgttcaccagtaaccaggaggagcaagaccccgctaaccatacttgtggtgttaagtctacggacggcaagcagggccccatccgtatctcccgtagtttaaagtctccagaaaaggaggattttctgcgtgcccagaagtacattgatttgtatctggtgcttgataacgccttttacaaaaactacaacgagaacctgaccctcatcagaagctttgtgtttgacgtaatgaacttattgaatgttatctataataccatcgatgtacaagttgcacttgtcgggatggaaatctggtccgatggagataaaatcaaggtagtccctagcgcatcaaccacatttgataactttctccgctggcatagttccaatctgggaaaaaaaatacacgatcatgcacagttgctgtcaggcatctctttcaacaatcggagggtgggtttagcagctagcaattccctgtgttcaccctctagcgtcgctgtaatcgaggcaaaaaagaaaaataatgtggcattagttggtgtgatgagccacgaactggggcatgtgctcggtatgcccgacgtcccatttaatacaaagtgcccaagtggatcatgtgtgatgaaccagtacctctctagtaagttcccaaaggatttttctaccagttgccgagcccatttcgaaagatatttgctgagccaaaaaccaaaatgcttgctgcaagcgccaattcccacaaatattatgaccactccagtatgcggcaaccatctcctggaagtgggggaggactgtgattgcgggagccccaaggagtgtaccaacctgtgctgtgaggctttgacttgcaaacttaagccaggaacagattgcggaggcgacgccccgaatcatactaccgaatag

SEQ ID NO: 57513 - DNA, 1176 bp, Artificial Sequence
  derived and/or modified sequence
atgatcctgaatggagaggagatcatcctgagcctgcagaagaccaagcacctgctgggccctgactacacagagaccctgtacagccccagaggagaggagatcaccaccaagccagagaacatggagcactgctactacaagggcaacatcctgaatgagaagaacagcgtggccagcatcagcacctgtgatggcctgcggggctacttcacccaccaccaccagcgctaccagatcaagcccctgaagagcacagatgagaaggagcacgctgtgttcaccagcaaccaggaggagcaggaccctgccaaccacacctgtggggtgaagagcacagatggcaagcagggccccatccgcatcagccgcagcctgaagagccctgagaaggaggacttcctgcgggcccagaagtacatcgacctgtacctggtgctggacaatgccttctacaagaactacaatgaaaacctgaccctcatccgcagctttgtgtttgatgtgatgaacctgctgaatgtcatctacaacaccattgatgtgcaggtggccctggtgggcatggagatctggagcgatggagacaagatcaaggtggtgcccagcgccagcaccacctttgacaacttcctgcgctggcacagcagcaacctgggcaagaagatccatgaccacgcccagctgctgagcggcatctccttcaacaacagaagagtgggcctggccgccagcaacagcctgtgcagccccagctctgtggccgtgattgaggccaagaagaagaacaacgtggccctggtgggcgtgatgagccatgagctgggccacgtgctgggcatgccagatgtgcccttcaacaccaagtgccccagcggcagctgtgtgatgaaccagtacctgagcagcaagttccccaaggacttcagcaccagctgccgggcccactttgagcgctacctgctgagccagaagcccaagtgcctgctgcaggcccccatccccaccaacatcatgaccacccctgtgtgtggcaaccacctgctggaggtgggggaggactgtgactgtggcagccccaaggagtgcaccaacctgtgctgtgaggccctgacctgcaagctgaagccaggcacagactgtggaggagatgcccccaaccacaccacagaatag

SEQ ID NO: 57514 - DNA, 1176 bp, Artificial Sequence
  derived and/or modified sequence
atgatcctgaacggcgaggagatcatcctgagcctgcagaagaccaaacacctgctgggcccagactatactgaaaccctgtacagtccaagaggagaagagattacaactaaacctgaaaacatggaacattgttactacaagggcaatattcttaacgaaaagaacagcgtggccagcatctccacgtgcgatgggttgcgcggctactttacccaccaccatcagcgataccagattaagcccctgaagtctacggacgaaaaagagcatgcggttttcacctccaaccaagaggaacaggaccctgcaaatcacacctgcggcgtgaaatccacagacggcaaacaaggccccatccgtatatcgcgatcgctgaaatcacccgaaaaagaagatttcctgcgagcccagaagtatattgatctttatctggttctggacaatgcattttataagaactataatgagaacctaacactcatccgaagctttgtctttgatgtgatgaatctgctgaatgtcatatacaacactattgacgttcaggtggcactggttggaatggaaatctggagtgatggcgacaaaatcaaggttgtgcccagcgcgtcgacaactttcgataatttcctcaggtggcactcctccaatctgggaaaaaaaatacatgaccacgcacaactgctctctggcatctctttcaataatagaagagtgggtttagctgcttctaacagtctttgttctccctcctccgtcgctgtcattgaagctaagaaaaagaacaatgtggccctcgtgggagtgatgtcccacgagctgggtcatgtgttaggaatgcctgacgtcccctttaataccaagtgcccaagtggatcgtgcgtaatgaatcagtacctgtctagcaagtttccaaaagactttagcacctcatgtagagcccattttgagagatacctgctttcacagaaaccaaagtgcctgctgcaggcacctattccaaccaatatcatgactactccggtgtgcggaaatcacctgctggaggttggagaggattgtgattgtggaagtcctaaagaatgcacgaacctctgttgtgaagcccttacctgtaagctaaagcctggaaccgactgcggaggggacgctccaaaccacacaaccgagtag

SEQ ID NO: 57515 - DNA, 1176 bp, Artificial Sequence
  derived and/or modified sequence
atgatcctgaacggcgaggagatcatcctgagcctgcagaagaccaaacacctgctcgggccggattacaccgagacactgtattcccctaggggtgaagaaattaccaccaagccggaaaacatggagcactgctactataaagggaacattctcaatgagaaaaacagtgttgcctctataagtacatgtgacggactacgggggtattttacccatcaccatcaaaggtatcagattaaacccttaaagagtaccgatgagaaggagcacgcagtctttacgtcgaaccaggaggagcaagacccggctaatcatacatgcggtgtgaaatcaactgacggaaagcagggaccaatccgcatcagtcgtagtcttaaatcacccgagaaagaggactttcttcgagcccagaaatacatcgacctgtatcttgttctggacaacgctttttacaagaactacaatgagaatcttaccttgatacggagcttcgtgtttgacgttatgaacctcctgaacgttatttataatacgatcgatgtgcaagttgcgttagtgggtatggaaatatggagcgatggcgataagatcaaagttgtgcctagtgccagcaccacgtttgacaactttctgagatggcactcctcgaatttaggcaagaagatacacgatcatgcccagctgctatcgggcattagcttcaataaccgacgcgtgggtctcgctgcgagcaattccctgtgtagtccaagcagcgtcgctgtcatcgaggccaaaaaaaaaaataacgtggcactagttggcgtgatgagccacgagctgggacacgtactcggaatgcctgatgttccatttaacacaaagtgcccctctggatcttgcgtgatgaatcaatatttgtcctcaaaattccccaaggacttcagcacctcctgccgggctcacttcgaacggtatcttctctcccagaagccaaagtgtctgctgcaagctccgatccccactaacatcatgactacccctgtctgcggcaaccacctcctggaggtgggggaggactgcgattgcggcagccccaaggaatgcacaaatctatgctgtgaggctctgacttgcaaattaaagcctggaactgactgtggcggtgacgctcctaaccatacaacagaatag

SEQ ID NO: 57516 - DNA, 1176 bp, Artificial Sequence
  derived and/or modified sequence
atgattctgaacggggaggaaataattctgtccttacagaagactaagcatctgctggggcctgactacactgaaaccctctactctccccgtggggaagagattacgaccaaacccgaaaacatggaacactgctactacaaaggaaacatactcaacgaaaaaaactctgttgccagtatcagtacttgtgatggactccgaggctattttacccaccaccaccaaagatatcagatcaagcctctgaagtcaacagacgagaaggagcacgctgtttttaccagcaaccaggaggaacaggaccctgcaaaccacacctgtggcgttaagagtacagacggaaagcaaggacctatccgtatttcccgctctctgaaaagcccagaaaaggaggatttcttgagggctcagaaatacatcgacctgtacctggtgctggataatgctttctataagaactacaatgaaaatctgacactcatccgcagcttcgtattcgatgtgatgaacctcctcaacgtgatctacaataccatagatgtccaagtggcactggttggtatggagatctggtctgacggggataagataaaggtggtgccaagtgcaagcacgacattcgataacttcttaagatggcactccagtaatctgggcaagaagatacacgatcatgctcagttgttaagcggtattagtttcaacaaccgcagagttgggcttgcagcatctaattctctctgcagtccctcatctgtggctgtgattgaggccaagaagaaaaacaatgtggctctggtgggcgtgatgtcacacgaactcggccacgtcctaggaatgcccgacgtgcccttcaatacaaaatgtccgagcggatcatgcgtgatgaaccagtatctgtcctctaaatttcctaaagacttctccacatcatgtagggcccacttcgagcgctatcttctaagtcagaagcctaaatgcttgctgcaggcccctattccaactaacataatgaccactcctgtgtgtgggaaccacttgctggaggtgggagaggattgtgattgtggatcgcctaaggagtgcactaatctgtgctgtgaggccttgacttgcaagctgaaacctggcacagattgcggaggcgacgccccaaatcataccacagaatag

SEQ ID NO: 57517 - DNA, 1176 bp, Artificial Sequence
  derived and/or modified sequence
atgatcctgaatggtgaggagatcattctgtcccttcagaagacgaaacatctgctcggaccggactacactgaaactttatattcccccagaggagaggagataactacaaagccggaaaatatggagcactgctactacaagggcaatatactgaacgagaagaactccgtggccagcatcagcacgtgcgacggactccgcggatatttcacccaccaccaccagaggtaccaaattaagcccctgaagtctaccgacgaaaaagaacacgctgtattcactagtaaccaagaggaacaggatccagctaaccacacatgtggcgtgaagagcaccgatggcaagcagggccctatccgtatttctcggtccttgaagagtccagagaaggaggacttcttacgggctcagaagtatatcgacctctacttggtgctggataacgctttctacaagaactacaatgagaatctcactctgataagatccttcgtctttgatgtcatgaacctgctaaacgtcatttacaataccatagatgttcaagtcgctcttgtggggatggagatttggtctgatggagataagatcaaggtggtgccctctgccagcaccaccttcgataatttcctccggtggcacagcagcaatctcggaaagaagatccacgatcacgcccagcttctgtccggcatctcctttaataatagacgggtcggcctcgctgcaagcaacagtctgtgctctccaagcagtgtggccgtgatagaggctaaaaaaaaaaacaatgtcgcactggtgggtgtgatgagccacgagctgggacacgtcctgggaatgcccgatgtgcccttcaacaccaagtgcccttccggatcctgtgtgatgaaccaatatctttcttctaagtttcccaaggattttagcactagttgcagagcccacttcgaacgttacctactcagccaaaagcccaagtgtttgctgcaggcacctatcccgacaaatatcatgaccacacccgtctgtggcaaccatctgctggaagtgggcgaagactgcgattgcggatcacctaaagagtgcaccaatctgtgctgtgaggcattgacctgcaagctgaaacccggtacagattgcggtggcgatgcacctaatcataccacagaatag

SEQ ID NO: 57518 - DNA, 1176 bp, Artificial Sequence
  derived and/or modified sequence
atgatcctgaacggcgaggagatcatcctgagcctgcagaagaccaagcacctgctgggccccgactacaccgagaccctgtacagccccagaggcgaggagatcaccaccaagcccgagaacatggagcactgctactacaagggcaacatcctgaacgagaagaacagcgtggccagcatcagcacctgcgacggcctgagaggctacttcacccaccaccaccagagataccagatcaagcccctgaagagcaccgacgagaaggagcacgccgtgttcaccagcaaccaggaggagcaggaccccgccaaccacacctgcggcgtgaagagcaccgacggcaagcagggccccatcagaatcagcagaagcctgaagagccccgagaaggaggacttcctgagagcccagaagtacatcgacctgtacctggtgctggacaacgccttctacaagaactacaacgagaacctgaccctgatcagaagcttcgtgttcgacgtgatgaacctgctgaacgtgatctacaacaccatcgacgtgcaggtggccctggtgggcatggagatctggagcgacggcgacaagatcaaggtggtgcccagcgccagcaccaccttcgacaacttcctgagatggcacagcagcaacctgggcaagaagatccacgaccacgcccagctgctgagcggcatcagcttcaacaacagaagagtgggcctggccgccagcaacagcctgtgcagccccagcagcgtggccgtgatcgaggccaagaagaagaacaacgtggccctggtgggcgtgatgagccacgagctgggccacgtgctgggcatgcccgacgtgcccttcaacaccaagtgccccagcggcagctgcgtgatgaaccagtacctgagcagcaagttccccaaggacttcagcaccagctgcagagcccacttcgagagatacctgctgagccagaagcccaagtgcctgctgcaggcccccatccccaccaacatcatgaccacccccgtgtgcggcaaccacctgctggaggtgggcgaggactgcgactgcggcagccccaaggagtgcaccaacctgtgctgcgaggccctgacctgcaagctgaagcccggcaccgactgcggcggcgacgcccccaaccacaccaccgagtag

SEQ ID NO: 57519 - protein, 724 aa, Artificial Sequence
  derived and/or modified sequence
MDGDQIVVEIQEAVFVSNIVDSDITVHNFVPDDPDSVVIQDVVEDVVIEEDVQCSDILEEADVSENVIIPEQVLDSDVTEEVSLPHCTVPDDVLASDITSTSMSMPEHVLTSESMHVCDIGHVEHMVHDSVVEAEIITDPLTSDIVSEEVLVADCAPEAVIDASGISVDQQDNDKASCEDYLMISLDDAGKIEHDGSTGVTIDAESEMDPCKVDSTCPEVIKVYIFKADPGEDDLGGTVDIVESEPENDHGVELLDQNSSIRVPREKMVYMTVNDSQQEDEDLSNNSDGIENRNGTASALLHIDESAGLGRLAKQKPKKKRRPDSRQYQTAIIIGPDGHPLTVYPCMICGKKFKSRGFLKRHMKNHPEHLAKKKYHCTDCDYTTNKKISLHNHLESHKLTSKAEKAIECDECGKHFSHAGALFTHKMVHKEKGANKMHKCKFCEYETAEQGLLNRHLLAVHSKNFPHICVECGKGFRHPSELRKHMRIHTGEKPYQCQYCEYRSADSSNLKTHIKTKHSKEMPFKCDICLLTFSDTKEVQQHTLVHQESKTHQCLHCDHKSSNSSDLKRHVISVHTKDYPHKCEMCEKGFHRPSELKKHVAVHKGKKMHQCRHCDFKIADPFVLSRHILSVHTKDLPFRCKRCRKGFRQQNELKKHMKTHSGRKVYQCEYCEYSTTDASGFKRHVISIHTKDYPHRCEYCKKGFRRPSEKNQHIMRHHKEVGLP

SEQ ID NO: 57520 - protein, 610 aa, Artificial Sequence
  derived and/or modified sequence
MDEDEFELQPQEPNSFFDGIVDDAGKIEHDGSTGVTIDAESEMDPCKVDSTCPEVIKVYIFKADPGEDDLGGTVDIVESEPENDHGVELLDQNSSIRVPREKMVYMTVNDSQQEDEDLNVAEIADEVYMEVIVGEEDAAVAAAAAAVHEQQIDEDEMKTFVPIAWAAAYGNNSDGIENRNGTASALLHIDESAGLGRLAKQKPKKKRRPDSRQYQTAIIIGPDGHPLTVYPCMICGKKFKSRGFLKRHMKNHPEHLAKKKYHCTDCDYTTNKKISLHNHLESHKLTSKAEKAIECDECGKHFSHAGALFTHKMVHKEKGANKMHKCKFCEYETAEQGLLNRHLLAVHSKNFPHICVECGKGFRHPSELRKHMRIHTGEKPYQCQYCEYRSADSSNLKTHIKTKHSKEMPFKCDICLLTFSDTKEVQQHTLVHQESKTHQCLHCDHKSSNSSDLKRHVISVHTKDYPHKCEMCEKGFHRPSELKKHVAVHKGKKMHQCRHCDFKIADPFVLSRHILSVHTKDLPFRCKRCRKGFRQQNELKKHMKTHSGRKVYQCEYCEYSTTDASGFKRHVISIHTKDYPHRCEYCKKGFRRPSEKNQHIMRHHKEVGLP

SEQ ID NO: 57521 - DNA, 1833 bp, Artificial Sequence
  derived and/or modified sequence
atggacgaggacgagttcgagctgcagccccaggagcccaacagcttcttcgacggcatcgtggacgacgccggcaagatcgagcacgacggcagcaccggcgtgaccatcgacgccgagagcgagatggacccctgcaaggtggacagcacctgccccgaggtgatcaaggtgtacatcttcaaggccgaccccggcgaggacgacctgggcggcaccgtggacatcgtggagagcgagcccgagaacgaccacggcgtggagctgctggaccagaacagcagcatcagagtgcccagagagaagatggtgtacatgaccgtgaacgacagccagcaggaggacgaggacctgaacgtggccgagatcgccgacgaggtgtacatggaggtgatcgtgggcgaggaggacgccgccgtggccgccgccgccgccgccgtgcacgagcagcagatcgacgaggacgagatgaagaccttcgtgcccatcgcctgggccgccgcctacggcaacaacagcgacggcatcgagaacagaaacggcaccgccagcgccctgctgcacatcgacgagagcgccggcctgggcagactggccaagcagaagcccaagaagaagagaagacccgacagcagacagtaccagaccgccatcatcatcggccccgacggccaccccctgaccgtgtacccctgcatgatctgcggcaagaagttcaagagcagaggcttcctgaagagacacatgaagaaccaccccgagcacctggccaagaagaagtaccactgcaccgactgcgactacaccaccaacaagaagatcagcctgcacaaccacctggagagccacaagctgaccagcaaggccgagaaggccatcgagtgcgacgagtgcggcaagcacttcagccacgccggcgccctgttcacccacaagatggtgcacaaggagaagggcgccaacaagatgcacaagtgcaagttctgcgagtacgagaccgccgagcagggcctgctgaacagacacctgctggccgtgcacagcaagaacttcccccacatctgcgtggagtgcggcaagggcttcagacaccccagcgagctgagaaagcacatgagaatccacaccggcgagaagccctaccagtgccagtactgcgagtacagaagcgccgacagcagcaacctgaagacccacatcaagaccaagcacagcaaggagatgcccttcaagtgcgacatctgcctgctgaccttcagcgacaccaaggaggtgcagcagcacaccctggtgcaccaggagagcaagacccaccagtgcctgcactgcgaccacaagagcagcaacagcagcgacctgaagagacacgtgatcagcgtgcacaccaaggactacccccacaagtgcgagatgtgcgagaagggcttccacagacccagcgagctgaagaagcacgtggccgtgcacaagggcaagaagatgcaccagtgcagacactgcgacttcaagatcgccgaccccttcgtgctgagcagacacatcctgagcgtgcacaccaaggacctgcccttcagatgcaagagatgcagaaagggcttcagacagcagaacgagctgaagaagcacatgaagacccacagcggcagaaaggtgtaccagtgcgagtactgcgagtacagcaccaccgacgccagcggcttcaagagacacgtgatcagcatccacaccaaggactacccccacagatgcgagtactgcaagaagggcttcagaagacccagcgagaagaaccagcacatcatgagacaccacaaggaggtgggcctgccctag

SEQ ID NO: 57522 - DNA, 1833 bp, Artificial Sequence
  derived and/or modified sequence
atggatgaagatgagttcgaactccagccccaggaacctaactccttcttcgatgggatcgttgatgatgctggaaagatcgaacatgatggatcaaccggggtaactatcgatgccgagtccgaaatggacccatgtaaggtcgattccacgtgccccgaagtgatcaaggtatacatattcaaggccgaccctggtgaggatgatctgggaggcacagtcgatattgtggagtcggaacccgagaacgatcacggagtggaattattagatcaaaattcatcaatcagggtgcctcgcgaaaagatggtctatatgactgtcaacgactctcaacaggaagacgaagatctaaacgtggcggaaatagccgacgaagtctacatggaagtaatagtgggcgaggaagatgcagctgtcgccgcggcagccgctgccgtgcacgaacagcagatcgatgaggacgagatgaaaacatttgtgcccatcgcttgggccgcagcttacgggaacaactccgatggaatcgagaacagaaatggaacagcatccgccctgctccatatcgatgagtccgcaggactcggccgccttgctaagcaaaaacccaagaagaagagacgccccgattcaagacagtatcaaaccgcaataatcataggacctgatgggcatccacttactgtatacccttgtatgatctgcgggaagaaattcaagtcccggggattcctcaaaaggcatatgaagaaccacccggaacacctcgcaaagaagaagtatcactgtaccgattgtgattatacaactaacaaaaagatctccctgcataaccacttagagagccataaactgacaagcaaggctgaaaaggccatcgagtgtgacgaatgcggtaagcacttttctcacgcaggggcactgtttactcacaaaatggtgcacaaggaaaagggggcgaacaagatgcataagtgtaagttttgtgagtacgagacagcagagcaggggctactcaaccgccatctgttggcagtccattccaagaacttcccacatatctgtgtggagtgcggaaaaggatttaggcacccttcagaattaaggaagcatatgagaatccacacgggggaaaaaccataccagtgccaatattgtgagtaccgctccgccgattcatccaacctgaagacacacatcaaaaccaagcattcaaaagagatgccattcaaatgcgatatctgtctgctaaccttttctgacaccaaagaggttcagcaacatacgctcgtgcaccaggaatccaaaacccaccagtgcctgcactgcgatcacaaatcttccaatagcagcgacctgaagaggcacgtcatatctgttcacacaaaagattatccccataagtgcgaaatgtgcgagaaaggtttccacaggcccagtgagctgaaaaagcatgtcgccgttcacaagggtaagaagatgcaccaatgtaggcactgcgactttaaaatagctgatccttttgttctatctaggcacatcctttccgtgcataccaaggatctgccattcagatgtaaaaggtgcagaaaggggtttcgccagcagaacgagttaaaaaagcacatgaaaacgcacagcgggagaaaagtgtaccaatgtgagtactgcgagtacagtactacagatgcctccggctttaagaggcatgtgatctccatccataccaaagattaccctcatcggtgcgaatactgcaaaaagggttttcgtcgccccagtgagaagaatcagcacattatgcgccaccacaaggaggtgggcctgccttag

SEQ ID NO: 57523 - DNA, 1833 bp, Artificial Sequence
  derived and/or modified sequence
atggatgaagatgaatttgagctgcagccccaggagcccaacagcttctttgatggcatcgtggatgatgctgggaagattgaacatgatggcagcactggagtgaccattgatgctgagagcgagatggacccctgcaaggtggacagcacctgcccagaggtgatcaaggtgtacatcttcaaggctgaccctggagaagatgacctgggcggcaccgtggacatcgtggagagcgagccagaaaatgaccatggagtggagctgctggaccagaacagcagcatccgggtgccccgggagaagatggtgtacatgacagtgaatgacagccagcaggaggatgaggacctgaatgtggccgagattgctgatgaggtgtacatggaggtgattgtgggggaggaggatgctgctgtggccgctgctgctgctgctgtgcatgagcagcagattgatgaagatgagatgaagacctttgtgcccatcgcctgggccgccgcctacggcaacaacagtgatggcattgaaaatagaaatggaacagccagcgccctgctgcacattgatgagagcgctggcctgggccgcctggccaagcagaagcccaagaagaagagaagaccagacagccggcagtaccagacagccatcatcatcggcccagatggccaccccctgactgtgtacccctgcatgatctgtgggaagaagttcaagagccggggcttcctgaagaggcacatgaagaaccaccctgagcacctggccaagaagaagtaccactgcacagactgtgactacaccaccaacaagaagatcagcctgcacaaccacctggagagccacaagctgaccagcaaggccgagaaggccattgaatgtgatgaatgtgggaagcacttcagccatgctggggccctcttcacccacaagatggtgcacaaggagaagggggccaacaagatgcacaagtgcaagttctgtgaatatgaaacagctgagcagggcctgctgaacagacacctgctggccgtgcacagcaagaacttcccccacatctgtgtggagtgtgggaagggcttccgccaccccagcgagctgaggaagcacatgaggatccacactggagagaagccctaccagtgccagtactgtgagtacagatctgctgacagcagcaacctgaagacccacatcaagaccaagcacagcaaggagatgcccttcaagtgtgacatctgcctgctgaccttcagtgacaccaaggaggtgcagcagcacaccctggtgcaccaggagagcaagacccaccagtgcctgcactgtgaccacaagagcagcaacagcagtgacctgaagagacatgtgatctctgtgcacaccaaggactacccccacaagtgtgagatgtgtgagaagggcttccaccggcccagcgagctgaagaagcacgtggccgtgcacaagggcaagaagatgcaccagtgccgccactgtgacttcaagattgctgacccctttgtgctgagccgccacatcctgtctgtgcacaccaaggacctgcccttccgctgcaagcgctgcaggaagggcttccggcagcagaatgagctgaagaagcacatgaagacccacagcggcaggaaggtgtaccagtgtgagtactgtgagtacagcaccacagatgccagcggcttcaagagacatgtgatcagcatccacaccaaggactacccccaccgctgtgagtactgcaagaagggcttcagaagacccagcgagaagaaccagcacatcatgaggcaccacaaggaggtgggcctgccctag

SEQ ID NO: 57524 - DNA, 1833 bp, Artificial Sequence
  derived and/or modified sequence
atggacgaggacgagttcgagctgcagccccaggagcccaacagcttttttgatggtatagtcgacgacgccggcaagattgaacacgacggatctacaggtgtcactattgacgctgagagtgaaatggacccatgcaaggtggacagtacttgcccggaagtaatcaaagtatacatcttcaaagccgaccctggcgaagatgacttagggggtacagttgacatagtcgagtcagaaccagagaatgaccacggtgttgaactcctcgatcagaacagctcgatccgggtgccccgggagaaaatggtgtacatgaccgtgaatgactcccaacaggaagatgaggacctaaatgtggcagagatcgcggatgaggtctacatggaagtgattgtcggagaagaggacgcagctgtggctgctgccgccgctgcagtgcacgagcagcagatcgacgaggatgagatgaagaccttcgttcccattgcctgggcagctgcatatggcaacaattctgacggaatcgaaaaccgcaacggtaccgcctcagcgctgctgcacatagacgagagtgccggactcgggcgcttagccaagcagaaacctaaaaaaaagaggcggcctgatagtagacagtatcagactgctattataatcggccctgacggacatcccctgacggtttatccgtgcatgatctgtggaaagaaattcaagtctagaggatttctgaagcgtcacatgaaaaatcatcctgaacaccttgctaagaagaagtaccattgtacagactgtgattacacaacaaataaaaagatctccttgcacaatcatctagagtcccacaagttgacctcaaaggccgagaaggccattgagtgtgatgagtgcggcaagcatttcagtcacgccggagcactgttcacacataaaatggtgcacaaggagaaaggagccaataagatgcataagtgtaaattctgcgagtacgaaacggccgaacagggcctcctgaatcgacacctactggccgtgcatagtaaaaactttccccatatctgtgtggaatgcgggaaaggttttcggcacccttctgagctcaggaaacacatgcgaatccacactggcgagaagccctatcagtgccagtactgtgaatatcgcagtgctgactccagcaatctgaagacccatatcaaaactaaacacagtaaagagatgcccttcaagtgcgacatttgcttgttgaccttctctgatactaaggaagtccagcagcacacactggtacaccaggaatccaagacccatcaatgtctccactgcgatcataagtcttcaaattcctctgatttgaagaggcacgtcatttcagtgcatactaaggactacccgcacaagtgtgaaatgtgcgaaaagggttttcacaggccttctgaattgaaaaagcatgtcgcagtgcataaggggaaaaaaatgcaccaatgcaggcattgtgacttcaagatcgccgaccctttcgtcttaagccgacacatcttgagcgtgcacacaaaggacctgccattcaggtgtaagcggtgtaggaagggctttcgacagcagaacgaactgaagaaacacatgaagacacactcagggcggaaggtttaccagtgtgaatattgcgaatattcaactaccgacgcttcgggtttcaaaagacacgtcatttccatccataccaaggactaccctcatagatgtgaatattgtaaaaaaggctttcggcggcccagcgaaaaaaaccaacacattatgagacaccacaaggaagttgggttgccatag

SEQ ID NO: 57525 - DNA, 1833 bp, Artificial Sequence
  derived and/or modified sequence
atggacgaagacgaattcgaattgcaaccgcaggaacctaactccttcttcgatggaatcgtcgacgatgctgggaagatcgagcacgatgggagcactggggtcacaattgacgcagagtccgagatggatccttgcaaggtagactcaacctgtcccgaggtgattaaggtatacatctttaaggcagatcctggggaggacgatcttggagggactgtcgatatcgtcgaatctgagcctgagaacgaccatggagtggaactgttggatcagaattccagcatccgggtgccgagagaaaaaatggtgtacatgaccgttaatgacagccaacaagaagacgaagacctcaatgttgctgagatcgctgatgaagtgtatatggaggtcattgtgggcgaggaagatgctgccgtggcggctgctgctgctgctgtgcacgagcaacaaatcgatgaagatgagatgaagacattcgtgccaattgcgtgggcagcggcttatggtaacaattcagatggcatagaaaacaggaacggaactgctagtgccctgttgcacatagatgaaagcgccggattaggaaggctcgcaaaacagaagccaaaaaaaaagaggcgcccagattcaaggcaatatcagacagcaattatcattggccctgacggacatccgcttacagtgtacccatgtatgatttgtggaaaaaaattcaaaagccgagggttcctcaagcgtcacatgaaaaatcacccagagcatctggcaaagaaaaagtatcactgcacggattgtgattataccacaaataagaaaattagcttgcataaccacctcgagtcccataagctgactagtaaagccgagaaggctattgaatgcgatgaatgtggaaagcactttagtcatgccggtgcgttattcacacataaaatggtacacaaggaaaagggcgcaaacaagatgcacaaatgcaaattttgtgaatacgagaccgccgaacagggactgctgaaccggcacctgctagctgtccacagtaaaaattttccccatatctgcgtggagtgtgggaaggggtttaggcacccatccgaattacggaagcatatgcgcatccatactggcgaaaaaccatatcagtgtcagtattgcgagtacaggtctgccgactcttctaatctaaaaacccacattaaaactaagcatagcaaggagatgccctttaaatgtgacatctgcctcctcactttctctgataccaaggaggttcagcaacacactctggtgcatcaagagagcaagacccaccagtgcctccattgcgaccacaaaagctcgaatagttcggatctgaaaaggcatgttattagcgtgcacacaaaagattatccacacaaatgtgagatgtgtgaaaaagggttccacagaccgtcagaactgaaaaagcacgttgccgtgcataaaggtaagaagatgcaccagtgccggcactgtgacttcaaaattgctgacccatttgtcttatcccgacacatattgtccgtgcatacaaaggacctcccttttaggtgcaagcggtgtcgcaagggctttagacagcagaatgagctaaaaaagcacatgaaaacacactctggtcggaaagtgtatcagtgtgaatattgcgaatactcgacgacagacgcaagcggttttaaacggcacgttatttccattcatacaaaggactacccccaccggtgtgagtactgtaaaaagggatttaggaggccaagcgagaagaaccaacacattatgcgccatcacaaggaggttgggctgccttag

SEQ ID NO: 57526 - DNA, 4749 bp, Artificial Sequence
  derived and/or modified sequence
agtggtgacggcgggcgcgcggagaaaaggaacgttgtgacggaaactccagctgccggagaccccaccgcagtgaggtcactggactccccggactcggggcgtgaccggcgccgacccggggcgccgagaggcccaccgggcggagggggcccaactaccatcccgcattttcctgggtctctctcccgggcggtgacgtgacgtgctgacggcgggcccgtgccggggagctgggccgctttttgtcagctccgaactcggcccctcctccctccctccgcccgccctaccagccggagcccggcccagtgctccagagaaaggccgtcctgcagcacccgccgctgtcgccgaccgcccgcacatccgtcgggagctgtgactaatgagaattaaaggccatggatgaagatgaatttgaattgcagccacaagagccaaactcattttttgatggaatagtggatgatgctggcaaaatagaacatgatggttccactggagtgaccatcgatgcagaatcagaaatggatccttgtaaagtggatagcacttgtcctgaagtcatcaaggtgtacatttttaaagctgaccctggagaagatgacttaggtggaactgtagacattgtggagagtgaacctgaaaatgatcatggagttgaactacttgatcagaacagcagtattcgtgttcccagggaaaagatggtttatatgactgtcaatgactctcaacaagaagatgaagatttaaatgttgctgaaattgctgatgaagtttatatggaagtgatcgtaggagaggaggatgctgctgttgcagcagcagcagctgctgtgcatgagcagcaaattgatgaggatgaaatgaaaaccttcgtaccaattgcatgggcagcagcttatggtaataattctgatggaattgaaaaccggaatggcactgcaagtgccctcttgcacatagatgagtctgctggccttggcagactggctaaacagaaaccaaagaaaaagagaagacctgattccaggcagtaccaaacagcaataattattggccctgatggtcatcctttgactgtctatccttgcatgatttgtgggaagaagtttaagtcgaggggttttttgaaaagacacatgaaaaaccatcctgaacaccttgccaagaagaagtaccactgtactgactgtgattacactaccaataagaagataagtttacataaccacctggagagccacaagctgaccagcaaggcagagaaggccattgaatgtgatgagtgtgggaagcatttttctcatgcaggggctttgtttactcacaaaatggtgcataaggaaaaaggggccaacaaaatgcacaagtgtaaattctgtgaatatgagacagctgaacaggggttattgaatcgccacctcttggcagtccacagcaagaactttcctcatatttgtgtggagtgtggtaaaggtttccgacacccgtcggaactgagaaagcacatgcgaatccataccggcgagaagccataccaatgccagtactgtgaatataggtctgcagactcttctaacttgaaaacacatataaaaacaaagcatagtaaagagatgccattcaagtgtgacatttgtcttctgactttctcagataccaaagaagtgcagcaacatactcttgtccaccaagaaagcaaaacacatcagtgtttgcattgcgaccacaagagttcaaactcaagtgatttgaaacgacatgtaatttcagttcatacgaaagactatcctcataagtgtgagatgtgcgagaaaggctttcacaggccttcagaacttaagaaacatgtggctgtccacaaaggtaaaaaaatgcaccaatgtagacattgtgactttaagattgcagacccatttgttctaagtcgccatattctctcagttcacacaaaggatcttccatttaggtgtaagagatgtagaaagggatttaggcaacaaaatgagcttaaaaagcatatgaagacacacagtggcaggaaagtatatcagtgtgagtactgtgagtatagcactacagatgcctcaggctttaaacggcacgttatttccattcatacaaaagactatcctcatcggtgtgagtactgcaagaaaggcttccgaagaccttcagaaaagaaccagcacataatgagacaccataaagaagttggtctgccctaacagtgtgtctacaagcttgtaaagatgttggccttgaagcagaaaattcattttttaaagccagtcttgttcacatccattactatacattgaattatgctgtgtaaaaatagaattattgcttctagtccacttttctttacattttattcaatacgctgtcctgaatcctattcagtttctttaatagatgaggaaaaatagcaacaagcaagttgcttataataaaataatttgtgattctatactgaattttcagtcataaaagctttactatttatttacatatttattcatgttcatggtactcttctaagacaaaatcagattgataactatgaaagtaacatttttgacccatttcctcctacacaagtgtttcacattggagacatctgctaatataaatgggaggttttactgtcaagtccaattagcaaaacgtggtaataatttttttgtcagtattttcagattacatgataaaattttacatttgagcttctagcattgattaatataggatattgaccacgtttatgtttaaatttcattttgttcagcagacaaaatgtacttcccttaactttcattaatagtgtttacatcttttgtcagcacagcaaacttttagaaagtaatagttttacttatttttatcttctgttttctctttgtactgctttgtcttgcattgtgttccaacacatgagacttactgctcactgaattttggagtcttttagaggtaaattgtggactcaggattttttgaaacttggtgtgtaactctaaatcttgtatatgcatctttgttgcttattacatatttacacacacaaccacaaattttaaacttatgatgaaaatttacaataacctgaaagatccagagatgtatgagagcattttgtaacttgttattcagttactaaatttgaggtgaataattaaaaagaaaaggacattaggagagtgaaaatcttctcttcaaataatctttgatagataaaaatggaaggtaagatgtttctagatagaatgttttcatacaatttcagcttcatatcataaatttttctggaaagctatttcagacatagatttcatagtatttttctgagaatcctgtgaaggaacgctgtctctttgcaaagtaaggaggactaagggaaaatgatggtaccatgtaacagaatgagagctaattccaaattagcaacttcatcctgctttctattttacattgagtaaagttttaaaaagacaacagtcaagttgattttgattagaagataaaagtacataatgaaaatccatggccttatttggaatatatatcactttccaaattttattatttatttgagagttaataagttaatgttattaagcagttaataatttatatgtatggatataatataaaatgaattcatataattaaaaagaatttggttaataagaatttggagaatggaaaatacatttttaggttccttaatttggctgttggtacctgtgtatttggaatattttaggggattcgaattttttttaacccacattacagctaccttctagctttagtatggtagtgcttcattcaacttttgctgtcaggtttttattttcacctttttctgtgccaccaattcaaaagttataggattaggaaatataaatttatatttggtgattggcagcctctgaaatgttagattaatttgatctagttctaaagtgctttagtcatatatgaatttaaacctagtaccatccaaaaccatgtaatggattttaagaatctgttaggccttcttagcctttatacatgtccctacctgatttttactgtccttcatgatcctgttcttgaaaacttcagtttgtatttgagaatcctttaaatctccttccaatttgttttctccctgaagtaatataaaaggaagtatttaagtgaaagtttaagagttttaaaacattctttaaaattaatacagatagttagctatttatcttttaaaaataaactaaggtaaaaaacgtgacactttacatatttcatatttttcatatagtctggaggtatacacagttgttttgtttttaaccacggtattgaaacctttaaaaggtaattaagcatttggtcaagtaaatatagaacatttgtataaagaaagaaatgaaattgtgcttaatgttatatactgttattatttgcaggctggttttaattcttaatttgattagcaaagctaaaaaagtggatgttgaagttgaaagttttaaagaggtacaaaatcttacaaggacataaattattatttggttgaaaaatagcctattagatattgtatgtcccttcctctgtacaaattgtaaaatacttaaaataactatgaagaattcatataggaagtgtgatactattgtaaatgtgtatttgagaatatgcaaaaataaaaataatattttactgttaataaatgtttacttgtatatg

SEQ ID NO: 57527 - DNA, 903 bp, Artificial Sequence
  derived and/or modified sequence
atgaagacagccactaacatttatattttcaacctggccctggccgacgcactcgctacctctacactccccttccagagtgtgaactatctcatgggaacttggccctttggcaccatcctgtgtaaaattgtgatctccatcgattattacaacatgttcacatctattttcactctgtgcacgatgagcgtggacagatacattgcagtttgccatcccgtgaaagccctcgactttcgcaccccgcgtaacgctaagataatcaacgtctgtaactggattctaagttctgccattggcctacccgttatgtttatggccacaactaaataccgacagggctccatcgactgtacgcttacatttagtcacccgacttggtactgggagaatctgctcaaaatttgcgttttcatatttgcattcattatgccggtactcattatcacggtttgttacgggctgatgatcctaagattgaagagcgtccgcatgttatctggtagcaaagagaaggacagaaatctgcgtagaattactagaatggtgctggtcgtggttgcagtatttattgtgtgttggacacccatccatatctatgtaatcatcaaagcactggttaccattccagagactacctttcaaaccgttagttggcatttctgtatagcactcggctacacgaactcgtgcttgaacccggtgctttacgccttcctggacgagaattttaagcggtgctttcgggaattttgtataccaacgagttctaatatcgaacagcagaacagtactcgcattaggcagaatacaagggaccaccctagtactgccaacaccgtcgaccgcacaaaccaccagttagagaatctagaggcagaaacagcacctctgccatag

SEQ ID NO: 57528 - DNA, 903 bp, Artificial Sequence
  derived and/or modified sequence
atgaagacggctaccaacatttacatttttaacctcgccttggcagacgccctggctacatccactctgccatttcagagtgtcaattatctcatgggcacctggccatttgggaccatcttgtgtaaaatagtgatcagtatagattattacaacatgttcactagcatcttcactctgtgcaccatgtccgttgataggtacattgctgtttgtcatcccgtcaaggctctagatttcaggaccccgaggaacgctaaaatcatcaacgtttgtaactggattctgtcatctgccataggcttgcccgtcatgtttatggctacgaccaagtatagacaggggtccatcgattgtacccttaccttcagccatcccacatggtattgggagaatttactgaaaatctgcgtgttcattttcgcattcattatgcctgtgctcatcatcacagtgtgttacggactcatgatattacggctgaaaagcgtgcgcatgctcagcggttccaaagagaaggaccgcaatctgagaagaatcacccggatggtgttggtggtggtggccgtctttatagtttgttggacacccatccacatttacgtgataatcaaagcactcgtcactatccctgagacaacttttcagactgtgtcatggcacttctgtattgcactgggctacactaattcttgtttaaaccccgtactttacgcttttttagacgaaaatttcaagagatgttttcgggagttttgtatccccacaagttctaacatcgagcagcaaaatagcaccaggattaggcagaatacaagagaccaccccagtaccgccaacactgtggaccgaactaatcatcaactggaaaacctagaggccgaaaccgctccactgccatag

SEQ ID NO: 57529 - DNA, 903 bp, Artificial Sequence
  derived and/or modified sequence
atgaagactgcgaccaacatctacatcttcaatctggctctcgccgatgctctcgcgaccagtactttgccattccaaagcgtgaattacttaatggggacctggcccttcggcacaattctgtgcaagattgtgatttccatagattactataacatgttcactagcatattcacgctctgtacaatgagtgttgacagatatattgccgtatgtcaccccgtgaaggcactcgactttcggaccccccgaaacgctaagatcatcaacgtttgtaattggatcctcagctcagcaatcgggctccccgtgatgtttatggctactaccaagtatcgccaggggtctatcgactgcacactgaccttttcccatccaacttggtattgggaaaatctcctgaagatttgtgtgtttatcttcgccttcatcatgccagtcctcatcatcacagtctgctacggtctgatgatcctccgccttaaaagtgtacgcatgctgtccgggtctaaagagaaagatagaaatctgaggcgaataacaagaatggtcctggtagtggtggcagtctttattgtgtgctggaccccgatccatatttacgtgattattaaagcgttggttaccatccctgaaacaaccttccagacagtgtcttggcacttctgcattgccctgggctatactaacagttgcctgaatccagtactctatgcctttttggacgagaactttaagaggtgttttcgggagttctgtatccccacaagcagcaacatcgagcagcagaactctaccagaatccgccaaaacacacgggatcatccaagtacggctaacaccgtggaccgaactaatcaccagctagagaatctggaagccgaaaccgcccccctgccatag

SEQ ID NO: 57530 - DNA, 903 bp, Artificial Sequence
  derived and/or modified sequence
atgaagacagccaccaacatctacatcttcaacctggccctggctgatgccctggccaccagcaccctgcccttccagagcgtgaactacctgatgggcacctggcccttcggcaccatcctgtgcaagatcgtcatcagcattgactactacaacatgttcaccagcatcttcaccctgtgcaccatgtctgtggaccgctacatcgctgtgtgccaccctgtgaaggccctggacttccgcaccccaagaaatgccaagatcatcaacgtgtgcaactggatcctgagcagcgccatcggcctgcctgtgatgttcatggccaccaccaagtaccggcagggcagcattgactgcaccctgaccttcagccaccccacctggtactgggagaacctgctgaagatctgtgtgttcatctttgccttcatcatgcctgtgctgatcatcaccgtgtgctacggcctgatgatcctgcggctgaagtctgtgaggatgctgagcggcagcaaggagaaggacaggaacctgcggcgcatcaccaggatggtgctggtggtggtggccgtgttcatcgtgtgctggacccccatccacatctacgtgatcatcaaggccctggtgaccatccctgagaccaccttccagacagtgtcctggcacttctgcatcgccctgggctacaccaacagctgcctgaaccctgtgctgtatgccttcctggatgagaacttcaagcgctgcttccgggagttctgcatccccaccagcagcaacatcgagcagcagaacagcacccgcatccggcagaacacccgggaccaccccagcacagccaacacagtggacaggaccaaccaccagctggagaacctggaggccgagacagcccccctgccctag

SEQ ID NO: 57531 - DNA, 903 bp, Artificial Sequence
  derived and/or modified sequence
atgaagaccgccaccaacatctacatcttcaacctggccctggccgacgctcttgccacaagcaccctcccattccaatcagtcaactaccttatggggacttggccatttgggacgattctatgcaaaatcgtgatttccattgattattataacatgttcacctcaatttttactctgtgtaccatgtctgtcgatcgctacatcgctgtctgccatcctgttaaggcactggattttcgcaccccccgcaacgcgaagataataaacgtctgtaattggatcctgtccagcgctattgggctgccagtcatgtttatggccactacaaagtatagacagggttccatcgactgtactctgaccttttctcatcccacatggtactgggaaaacctgctcaaaatctgcgtctttatatttgccttcatcatgcctgttctgattattaccgtttgttatggattgatgatcctgagattaaagagcgtccgtatgctgtctggctcaaaggaaaaagacagaaatctgagacggatcaccaggatggtgttggttgtggtcgcggtgttcatagtgtgctggactcctattcatatttacgtgatcataaaggccctcgttacaatcccagaaaccactttccagactgtgtcatggcacttttgcatcgcgctcggttatacaaactcttgtctcaatcccgtcctgtacgcatttctggacgaaaattttaaacggtgttttagggagttctgcatccccacaagttcaaacatcgagcagcaaaattccactagaatccggcagaacacacgggaccacccaagtacagccaatacagtagaccgcacaaaccatcagcttgaaaatctcgaggctgagactgcccctttaccctag

SEQ ID NO: 57532 - DNA, 903 bp, Artificial Sequence
  derived and/or modified sequence
atgaagaccgccaccaacatctacatcttcaacctggccctggccgacgcgctggccactagtaccttgccttttcagtccgtcaactatctcatgggtacctggccatttggaaccatcttgtgtaagattgtcatctccattgactactataatatgttcaccagcatcttcacactctgtacgatgagtgtcgaccgctacatcgcagtgtgccacccagtgaaagcactggatttccggaccccccgtaacgccaaaattataaatgtgtgtaactggatcctgtcaagcgccatcgggctccctgtgatgttcatggctaccaccaaatatcgtcagggctcgatcgactgcacgttgaccttttctcatccaacatggtattgggaaaacctccttaaaatttgcgtgtttattttcgccttcatcatgcccgtgctcatcatcactgtctgctacgggcttatgattcttcggttgaaaagcgttaggatgctgtccggatctaaggagaaagatcgcaacctgcgtcgaatcactcgaatggttctggtcgtggttgccgtgtttattgtgtgttggactcccatccacatctatgttataattaaggccctggtgacaatcccggaaactactttccagaccgtgtcttggcacttttgtattgcattgggttatacaaattcttgcctgaaccccgtcttatacgccttcttggacgagaatttcaaaagatgcttccgggagttctgcattccgacatcgagcaacatcgaacagcagaacagtacccgcatccggcagaacacccgcgaccatccatctaccgccaatacagttgacaggactaaccaccagttagaaaacctggaggcagagacagctccactgccctag

SEQ ID NO: 57533 - DNA, 903 bp, Artificial Sequence
  derived and/or modified sequence
atgaagaccgccaccaacatctacatcttcaacctggccctggccgatgcgctggctacttctaccttgccttttcagtcagtcaattatctcatgggaacatggccgtttggcaccatcctctgcaaaatcgtgatttccatcgactactacaacatgttcacctctatttttacgctgtgtaccatgtctgttgatcgatatatcgccgtctgccatcccgtgaaggcactcgatttcaggaccccccggaacgcaaaaataatcaacgtgtgcaattggatcctatcatcggctattggtctgccagtgatgttcatggccacaactaagtatcgacagggttccatcgattgtacattgacttttagccaccctacatggtactgggagaatttgctgaaaatctgtgtgttcatcttcgcctttataatgcccgtgctgatcattactgtatgttatggactgatgatactgcgactgaagagcgtgcgaatgctttctggtagtaaggagaaagatcgtaatctgcgtaggattacaagaatggttttagtggtggttgccgtgtttatcgtttgctggacccctatccatatttacgtaatcattaaagcattagtgactatccccgaaactacctttcagactgtttcatggcatttctgtatcgctttgggctacactaatagttgcctgaaccctgtgctgtacgccttcctagacgaaaattttaagcgatgcttccgcgaattctgtataccaaccagcagcaacatcgagcaacaaaacagcacacggatcagacagaacactagagatcacccgagtacagcaaatacagtagaccgtacgaatcaccagctggaaaatcttgaagcagaaaccgcaccgctcccctag

SEQ ID NO: 57534 - DNA, 903 bp, Artificial Sequence
  derived and/or modified sequence
atgaaaaccgcaacgaacatctacatcttcaatctggcccttgcagacgccctagccacgtcaactctgcctttccagtccgtgaattatctgatgggaacctggccattcggcacgatcctgtgcaagatagtgatttctatcgattattacaacatgtttacctcaatttttacactttgcacaatgagcgtggaccggtacattgctgtgtgccatcctgtgaaggccttggactttcgaacacccaggaacgctaagatcataaacgtgtgcaactggattttgtcctccgccattggtctcccagtcatgtttatggccacaaccaagtataggcaggggtcgattgattgtacactgaccttctctcacccaacctggtactgggaaaatctgctgaagatctgtgtgttcattttcgcctttatcatgcccgtactcattatcaccgtgtgttatggactcatgattctcaggctcaaatctgtgcgtatgcttagcggctctaaggagaaagatcgaaatctgaggaggataacacgcatggtgctagttgtcgtcgccgtgtttatagtgtgctggacccctatacacatctatgtgattataaaggcattggttacgattccggagactaccttccaaaccgtgagctggcacttctgcattgccctgggctatactaactcctgtcttaaccccgtgttatatgctttcctggatgaaaactttaagcggtgttttcgcgaattctgcatccctacttcaagcaacatcgagcaacaaaattctacacggatacgccagaacacccgagaccacccttcaaccgctaacaccgttgaccgcaccaatcaccagttagaaaatcttgaggccgagacagcacctctgccatag

SEQ ID NO: 57535 - DNA, 903 bp, Artificial Sequence
  derived and/or modified sequence
atgaagactgcgacaaacatatatatctttaaccttgcactggctgatgctttagcaaccagtactttaccattccagagcgtaaactacctgatgggtacatggccattcggcactatcctgtgcaagatcgtcatctccatcgattattataacatgtttacttcgatttttacactgtgtactatgtccgtggaccgatacattgctgtgtgccatcccgtcaaggccctcgacttccggactcccaggaacgcaaagataataaacgtgtgcaactggatcttgtccagcgccataggactgccggtcatgtttatggctaccacgaagtaccgccagggcagcatcgactgcacgctgacttttagccatcccacctggtattgggaaaatctcctgaaaatctgcgtgttcatctttgcctttatcatgcccgtcctcattattaccgtgtgctatggcttgatgatactgaggctcaaaagcgtccgcatgctgtccggcagtaaggaaaaagaccgaaatctgcgtagaatcacacggatggtgctcgtggttgtggccgtcttcatcgtctgctggacaccaattcacatctacgtcatcattaaggccctggttacgatccccgaaactacgttccagacagtgtcctggcacttctgcattgccctcggttatacaaactcttgtctcaaccccgtcctttatgcatttctggatgaaaattttaagcggtgcttcagagagttctgcatacctacctcctctaatatagaacagcagaattctacccggattcggcagaatacaagggaccaccctagtactgctaataccgtggaccggaccaatcatcaattggaaaatcttgaggcagagaccgcaccccttccctag

SEQ ID NO: 57536 - DNA, 903 bp, Artificial Sequence
  derived and/or modified sequence
atgaagacggccacgaacatttacatcttcaacctggctctcgctgacgcactggcaacttcgacactgcccttccagagtgtgaactatcttatggggacatggccctttgggactatactgtgtaaaattgtcatctctatagactactataatatgtttacaagtattttcaccctgtgcaccatgagtgttgacaggtatatcgctgtttgtcaccctgtaaaagccctggactttagaacgccaaggaatgccaagatcatcaacgtatgcaactggattctcagcagcgctattggactaccggtgatgtttatggcaacgacaaagtaccgacagggctccatcgactgtactctgacctttagccatcctacatggtattgggaaaatctactcaagatctgcgtttttatctttgcttttatcatgccagtcctgataattacggtgtgttacgggctgatgatcttacgtctgaagtctgttaggatgctatccggttccaaagagaaagatcggaacttaaggagaatcacacgtatggtgctggtggtggttgcagtcttcattgtgtgttggaccccaatccacatttacgtgatcatcaaagcgctggtgacaattcctgagacaacattccagaccgtgtcttggcacttctgtattgcgcttggctacactaattcatgtttgaaccccgttctctacgcctttctcgacgagaatttcaagaggtgtttcagagaattctgcattcctacctctagcaacatcgagcagcaaaattccacccgcattagacagaatacaagagatcacccgtccacagccaatactgttgaccgcacgaaccatcagctggagaatctggaggccgagaccgctcctttgccatag

SEQ ID NO: 57537 - DNA, 903 bp, Artificial Sequence
  derived and/or modified sequence
atgaagaccgccaccaacatctacatcttcaacctggccctggccgacgccctggccaccagcaccctgcccttccagagcgtgaactacctgatgggcacctggcccttcggcaccatcctgtgcaagatcgtgatcagcatcgactactacaacatgttcaccagcatcttcaccctgtgcaccatgagcgtggacagatacatcgccgtgtgccaccccgtgaaggccctggacttcagaacccccagaaacgccaagatcatcaacgtgtgcaactggatcctgagcagcgccatcggcctgcccgtgatgttcatggccaccaccaagtacagacagggcagcatcgactgcaccctgaccttcagccaccccacctggtactgggagaacctgctgaagatctgcgtgttcatcttcgccttcatcatgcccgtgctgatcatcaccgtgtgctacggcctgatgatcctgagactgaagagcgtgagaatgctgagcggcagcaaggagaaggacagaaacctgagaagaatcaccagaatggtgctggtggtggtggccgtgttcatcgtgtgctggacccccatccacatctacgtgatcatcaaggccctggtgaccatccccgagaccaccttccagaccgtgagctggcacttctgcatcgccctgggctacaccaacagctgcctgaaccccgtgctgtacgccttcctggacgagaacttcaagagatgcttcagagagttctgcatccccaccagcagcaacatcgagcagcagaacagcaccagaatcagacagaacaccagagaccaccccagcaccgccaacaccgtggacagaaccaaccaccagctggagaacctggaggccgagaccgcccccctgccctag

SEQ ID NO: 57538 - protein, 319 aa, Artificial Sequence
  derived and/or modified sequence
MMRAKSISTKAGKPSRYTKMKTATNIYIFNLALADALATSTLPFQSVNYLMGTWPFGTILCKIVISIDYYNMFTSIFTLCTMSVDRYIAVCHPVKALDFRTPRNAKIINVCNWILSSAIGLPVMFMATTKYRQGSIDCTLTFSHPTWYWENLLKICVFIFAFIMPVLIITVCYGLMILRLKSVRMLSGSKEKDRNLRRITRMVLVVVAVFIVCWTPIHIYVIIKALVTIPETTFQTVSWHFCIALGYTNSCLNPVLYAFLDENFKRCFREFCIPTSSNIEQQNSTRIRQNTRDHPSTANTVDRTNHQLENLEAETAPLP

SEQ ID NO: 57539 - protein, 300 aa, Artificial Sequence
  derived and/or modified sequence
MKTATNIYIFNLALADALATSTLPFQSVNYLMGTWPFGTILCKIVISIDYYNMFTSIFTLCTMSVDRYIAVCHPVKALDFRTPRNAKIINVCNWILSSAIGLPVMFMATTKYRQGSIDCTLTFSHPTWYWENLLKICVFIFAFIMPVLIITVCYGLMILRLKSVRMLSGSKEKDRNLRRITRMVLVVVAVFIVCWTPIHIYVIIKALVTIPETTFQTVSWHFCIALGYTNSCLNPVLYAFLDENFKRCFREFCIPTSSNIEQQNSTRIRQNTRDHPSTANTVDRTNHQLENLEAETAPLP

SEQ ID NO: 57540 - DNA, 960 bp, Artificial Sequence
  derived and/or modified sequence
atgatgagagcaaaaagcattagcactaaggcggggaaaccgtcaaggtacactaagatgaaaacagcgaccaatatatacatctttaatctggccctggctgacgcactcgcgacctcgactttaccattccagagtgtaaattacctgatgggaacctggcccttcggcacaattctctgcaagattgtgatctccatcgattactataacatgttcaccagcatctttacattgtgcacgatgtcagttgataggtacatcgccgtgtgccacccagtgaaggctctggactttcggacgccccgaaatgccaagatcattaacgtgtgcaattggattctatccagtgccatcggcctccctgttatgttcatggccacaacaaaatatcgccaaggctctattgattgtaccctgaccttctctcatccaacgtggtactgggaaaacctgttgaagatttgtgtgtttatcttcgcctttattatgccagtactcattatcactgtttgctatggtttaatgatcctgcggctgaagagcgtgagaatgctgagtggcagcaaggaaaaagatcggaacttgcggaggattacccggatggtgcttgtagtcgtggctgtcttcattgtgtgttggaccccaatccacatctacgtcatcatcaaagccctggtcaccatccccgaaactacattccagaccgtatcatggcacttttgcatcgcgctcggatacaccaactcctgcctcaacccggtcctctatgcattcctggacgagaatttcaaacggtgctttagggagttctgcatcccaacatcgagcaacatcgagcagcagaacagtacacgtataagacagaacacaagagaccacccatcaacggcaaataccgtcgaccgtactaatcaccaactggaaaatctggaagccgagactgcgcccctcccatag

SEQ ID NO: 57541 - DNA, 960 bp, Artificial Sequence
  derived and/or modified sequence
atgatgagggccaagagcatcagcaccaaggccggcaagcccagccgctacaccaagatgaagacagccaccaacatctacatcttcaacctggccctggctgatgccctggccaccagcaccctgcccttccagagcgtgaactacctgatgggcacctggcccttcggcaccatcctgtgcaagatcgtcatcagcattgactactacaacatgttcaccagcatcttcaccctgtgcaccatgtctgtggaccgctacatcgctgtgtgccaccctgtgaaggccctggacttccgcaccccaagaaatgccaagatcatcaacgtgtgcaactggatcctgagcagcgccatcggcctgcctgtgatgttcatggccaccaccaagtaccggcagggcagcattgactgcaccctgaccttcagccaccccacctggtactgggagaacctgctgaagatctgtgtgttcatctttgccttcatcatgcctgtgctgatcatcaccgtgtgctacggcctgatgatcctgcggctgaagtctgtgaggatgctgagcggcagcaaggagaaggacaggaacctgcggcgcatcaccaggatggtgctggtggtggtggccgtgttcatcgtgtgctggacccccatccacatctacgtgatcatcaaggccctggtgaccatccctgagaccaccttccagacagtgtcctggcacttctgcatcgccctgggctacaccaacagctgcctgaaccctgtgctgtatgccttcctggatgagaacttcaagcgctgcttccgggagttctgcatccccaccagcagcaacatcgagcagcagaacagcacccgcatccggcagaacacccgggaccaccccagcacagccaacacagtggacaggaccaaccaccagctggagaacctggaggccgagacagcccccctgccctag

SEQ ID NO: 57542 - DNA, 960 bp, Artificial Sequence
  derived and/or modified sequence
atgatgcgggccaagagcatcagcaccaaggccggcaagcccagccgctacacaaaaatgaagactgccacaaacatctacatttttaaccttgcgctcgccgatgctctagcaacctcgactttaccctttcaaagcgttaattacttgatgggaacctggccatttgggaccatactgtgcaagatcgttatatcgattgactattataatatgttcacatccatttttaccctgtgcaccatgagtgttgacaggtacatcgctgtgtgccatcctgtgaaggcattggattttagaacacctcggaatgcaaaaattatcaacgtatgcaactggattctctcatctgccataggtctgccagtcatgtttatggcgaccacaaaatataggcaaggttcgatcgattgtacgctgaccttcagccatccaacgtggtattgggagaacctactcaagatctgtgtgtttatcttcgcttttattatgccggtgctcattatcacagtgtgttacggactgatgatcctgaggcttaagtcggtgaggatgctctcaggaagcaaggaaaaggatagaaacctgcgacgtatcacacgaatggtactggttgtagttgccgtcttcatcgtgtgttggaccccaatccatatttatgtgattatcaaggccctggtaactattcctgagaccacttttcagacagtgagctggcacttttgcattgccctgggatataccaacagttgccttaaccctgtactgtacgcctttctggacgagaatttcaagagatgtttccgagagttttgtattccgacttcatcaaacattgaacagcagaatagcacaagaatccgccagaacacccgtgatcaccccagtacagctaatacagtggaccgaacaaatcaccagctagagaacctagaggctgagacagcccccctgccctag

SEQ ID NO: 57543 - DNA, 1060 bp, Artificial Sequence
  derived and/or modified sequence
cctgtaaagaaaatgatgagggctaaatccatcagcaccaaagctgggaagccctccagatacaccaagatgaagactgccaccaacatctacattttcaaccttgctctggcagatgccttagccaccagtaccctgcccttccagagtgtgaattacctaatgggaacatggccatttggaaccatcctttgcaagatagtgatctccatagattactataacatgttcaccagcatattcaccctctgcaccatgagtgttgatcgatacattgcagtctgccaccctgtcaaggccttagatttccgtactccccgaaatgccaaaattatcaatgtctgcaactggatcctctcttcagccattggtcttcctgtaatgttcatggctacaacaaaatacaggcaaggttccatagattgtacactaacattctctcatccaacctggtactgggaaaacctgctgaagatctgtgttttcatcttcgccttcattatgccagtgctcatcattaccgtgtgctatggactgatgatcttgcgcctcaagagtgtccgcatgctctctggctccaaagaaaaggacaggaatcttcgaaggatcaccaggatggtgctggtggtggtggctgtgttcatcgtctgctggactcccattcacatttacgtcatcattaaagccttggttacaatcccagaaactacgttccagactgtttcttggcacttctgcattgctctaggttacacaaacagctgcctcaacccagtcctttatgcatttctggatgaaaacttcaaacgatgcttcagagagttctgtatcccaacctcttccaacattgagcaacaaaactccactcgaattcgtcagaacactagagaccacccctccacggccaatacagtggatagaactaatcatcagctagaaaatctggaagcagaaactgctccgttgccctaacagggtctcatgccattccgaccttcaccaagcttagaagccaccatgtatgtggaagcaggttgcttcaagaatgtgtaggaggctc

SEQ ID NO: 57544 - DNA, 1519 bp, Artificial Sequence
  derived and/or modified sequence
cctgtaaagaaaatgatgagggctaaatccatcagcaccaaagctgggaagccctccaggttcatttggaagaaaatactcctctgagctcaaaggaagtgtgatctgtcacaatattgtatgcctgcactaagtttgcatcctgaaaactcactggaagataggaaagcaagcatgaaaaagcagccgggtcagacaggcttctggattcagtgtgtggacatgactttgcctgcatgaattgcccctttctcctacaaacaagagaattcggtcaagtggatgtggcagaactgggctgctctgagatgatagaaaagggctcctgcttttcctgtaattgcagccccttgttcttgtggttgctacatgcaataaatgtaattctatgagaaggaccagcccttacatcccatcaaaatgtttcctggaaacctggagcacagaactctgatatcctctcacactgtggcaggagaagcagcacaaggcacaatgctgaaatagcatggtccaggatacaccaagatgaagactgccaccaacatctacattttcaaccttgctctggcagatgccttagccaccagtaccctgcccttccagagtgtgaattacctaatgggaacatggccatttggaaccatcctttgcaagatagtgatctccatagattactataacatgttcaccagcatattcaccctctgcaccatgagtgttgatcgatacattgcagtctgccaccctgtcaaggccttagatttccgtactccccgaaatgccaaaattatcaatgtctgcaactggatcctctcttcagccattggtcttcctgtaatgttcatggctacaacaaaatacaggcaaggttccatagattgtacactaacattctctcatccaacctggtactgggaaaacctgctgaagatctgtgttttcatcttcgccttcattatgccagtgctcatcattaccgtgtgctatggactgatgatcttgcgcctcaagagtgtccgcatgctctctggctccaaagaaaaggacaggaatcttcgaaggatcaccaggatggtgctggtggtggtggctgtgttcatcgtctgctggactcccattcacatttacgtcatcattaaagccttggttacaatcccagaaactacgttccagactgtttcttggcacttctgcattgctctaggttacacaaacagctgcctcaacccagtcctttatgcatttctggatgaaaacttcaaacgatgcttcagagagttctgtatcccaacctcttccaacattgagcaacaaaactccactcgaattcgtcagaacactagagaccacccctccacggccaatacagtggatagaactaatcatcagctagaaaatctggaagcagaaactgctccgttgccctaacagggtctcatgccattccgaccttcaccaagcttagaagccaccatgtatgtggaagcaggttgcttcaagaatgtgtaggaggctc

SEQ ID NO: 57545 - DNA, 2459 bp, Artificial Sequence
  derived and/or modified sequence
ggctagcatgctaattaactatgcataaccacgtttcctttcaccatgttgaaccctgacataatttttttttccacaaacacctcactctggagaaggaaatgattttttttaattaaaataaacatacattggaaatacttagtgctaaaataagcctgaaggaaaggttggaagtatgatgagtcagaaaactgactgtaaagaaaccaattacttaacataaaacaccattaaagataagccacgaaatgtaaggtctgctgggtaggaaagtggcaaatgcaatgaagcatgtctttagatcatgcaggtctataaccaacggtgaatctagcaaaagttattttctcttttggggagaaacttcttcttattaaaaaaataaaaaatgtttcaacttcttgagcaccaaggtcaattattctaaatcttaaaaccacagttttaattttgcttttttgttggtttttgtactttggagtatttgtctacattatcctttttatatttgccatatttaaagtccaaactaaaagcaaattattttctctcctcaagttaaatggctctatctttttctttaaaatccattaagaaagtgaaactcccaaagtaagtccaaaaaaaagcccccaagtctgaaaatgtggagcttttctggcagtaatgcagcttctgcaagtattgcagaccagatcaggtatcagaattttaaagcttcagtaacaaagctgtcctattgaccctgaggagatttatgaaatcactttcctgatgttattgaaaccaaaacactttcctggacactgaattcagtcctaaacaaagggcctccaaccaacagctgtcttgggctgaatgagttagactcaacctcgtgtgacggaaaaacagtaaacacaagctaacatttaaaaggaattgatggcaccgtgtaaatcagaagcccaaggagggcctggcttcaggtgtggggttctctctcacgctctcaaatccacatcctccggattaggtccattttcagacaagctcctccagcaactacataccatgcgtcttctcaggtgtgggtcctgcaggaaaactaatacactctttgtccataagtctcaaaataaactctcactggctctggttggaacatgagagcatccttgccattcaccatggccccggtcactaaacgtcttcacgccctggactggtaatacagcctatcccaaagcacctggactgagaacgggaaatgagtggttcccagagtgaaactgaggtactattactaaattaagatacaccaagatgaagactgccaccaacatctacattttcaaccttgctctggcagatgccttagccaccagtaccctgcccttccagagtgtgaattacctaatgggaacatggccatttggaaccatcctttgcaagatagtgatctccatagattactataacatgttcaccagcatattcaccctctgcaccatgagtgttgatcgatacattgcagtctgccaccctgtcaaggccttagatttccgtactccccgaaatgccaaaattatcaatgtctgcaactggatcctctcttcagccattggtcttcctgtaatgttcatggctacaacaaaatacaggcaaggttccatagattgtacactaacattctctcatccaacctggtactgggaaaacctgctgaagatctgtgttttcatcttcgccttcattatgccagtgctcatcattaccgtgtgctatggactgatgatcttgcgcctcaagagtgtccgcatgctctctggctccaaagaaaaggacaggaatcttcgaaggatcaccaggatggtgctggtggtggtggctgtgttcatcgtctgctggactcccattcacatttacgtcatcattaaagccttggttacaatcccagaaactacgttccagactgtttcttggcacttctgcattgctctaggttacacaaacagctgcctcaacccagtcctttatgcatttctggatgaaaacttcaaacgatgcttcagagagttctgtatcccaacctcttccaacattgagcaacaaaactccactcgaattcgtcagaacactagagaccacccctccacggccaatacagtggatagaactaatcatcagctagaaaatctggaagcagaaactgctccgttgccctaacagggtctcatgccattccgaccttcaccaagcttagaagccaccatgtatgtggaagcaggttgcttcaagaatgtgtaggaggctctaattctctaggaaagtgcctgcttttaggtcatccaacctctttcctctctggccactctgctctgcacattagagggacagccaaaagtaagtggagcatttggaaggaaaggaatataccacaccgaggagtccagtttgtgcaagacacccagtgg

SEQ ID NO: 57546 - DNA, 2440 bp, Artificial Sequence
  derived and/or modified sequence
ggctagcatgctaattaactatgcataaccacgtttcctttcaccatgttgaaccctgacataatttttttttccacaaacacctcactctggagaaggaaatgattttttttaattaaaataaacatacattggaaatacttagtgctaaaataagcctgaaggaaaggttggaagtatgatgagtcagaaaactgactgtaaagaaaccaattacttaacataaaacaccattaaagataagccacgaaatgtaaggtctgctgggtaggaaagtggcaaatgcaatgaagcatgtctttagatcatgcaggtctataaccaacggtgaatctagcaaaagttattttctcttttggggagaaacttcttcttattaaaaaaataaaaaatgtttcaacttcttgagcaccaaggtcaattattctaaatcttaaaaccacagttttaattttgcttttttgttggtttttgtactttggagtatttgtctacattatcctttttatatttgccatatttaaagtccaaactaaaagcaaattattttctctcctcaagttaaatggctctatctttttctttaaaatccattaagaaagtgaaactcccaaagtaagtccaaaaaaaagcccccaagtctgaaaatgtggagcttttctggcagtaatgcagcttctgcaagtattgcagaccagatcaggtatcagaattttaaagcttcagtaacaaagctgtcctattgaccctgaggagatttatgaaatcactttcctgatgttattgaaaccaaaacactttcctggacactgaattcagtcctaaacaaagggcctccaaccaacagctgtcttgggctgaatgagttagactcaacctcgtgtgacggaaaaacagtaaacacaagctaacatttaaaaggaattgatggcaccgtgtaaatcagaagcccaaggagggcctggcttcaggtgtggggttctctctcacgctctcaaatccacatcctccggattaggtccattttcagacaagctcctccagcaactacataccatgcgtcttctcaggtgtgggtcctgcaggaaaactaatacactctttgtccataagtctcaaaataaactctcactggctctggttggaacatgagagcatccttgccattcaccatggccccggtcactaaacgtcttcacgccctggactggtaatacagcctatcccaaagcacctggactgagaacgggaaatgagtggttcccagagtgaaactgagatacaccaagatgaagactgccaccaacatctacattttcaaccttgctctggcagatgccttagccaccagtaccctgcccttccagagtgtgaattacctaatgggaacatggccatttggaaccatcctttgcaagatagtgatctccatagattactataacatgttcaccagcatattcaccctctgcaccatgagtgttgatcgatacattgcagtctgccaccctgtcaaggccttagatttccgtactccccgaaatgccaaaattatcaatgtctgcaactggatcctctcttcagccattggtcttcctgtaatgttcatggctacaacaaaatacaggcaaggttccatagattgtacactaacattctctcatccaacctggtactgggaaaacctgctgaagatctgtgttttcatcttcgccttcattatgccagtgctcatcattaccgtgtgctatggactgatgatcttgcgcctcaagagtgtccgcatgctctctggctccaaagaaaaggacaggaatcttcgaaggatcaccaggatggtgctggtggtggtggctgtgttcatcgtctgctggactcccattcacatttacgtcatcattaaagccttggttacaatcccagaaactacgttccagactgtttcttggcacttctgcattgctctaggttacacaaacagctgcctcaacccagtcctttatgcatttctggatgaaaacttcaaacgatgcttcagagagttctgtatcccaacctcttccaacattgagcaacaaaactccactcgaattcgtcagaacactagagaccacccctccacggccaatacagtggatagaactaatcatcagctagaaaatctggaagcagaaactgctccgttgccctaacagggtctcatgccattccgaccttcaccaagcttagaagccaccatgtatgtggaagcaggttgcttcaagaatgtgtaggaggctctaattctctaggaaagtgcctgcttttaggtcatccaacctctttcctctctggccactctgctctgcacattagagggacagccaaaagtaagtggagcatttggaaggaaaggaatataccacaccgaggagtccagtttgtgcaagacacccagtgg

SEQ ID NO: 57547 - DNA, 960 bp, Artificial Sequence
  derived and/or modified sequence
atgatgcgggctaaaagcatttccaccaaggccggaaaacccagcaggtacacgaagatgaagacggctacaaatatttacatttttaatttagcgctggctgatgcgctggctacttccacactgccattccagagcgtcaactatctgatgggaacctggccgtttgggactatactctgcaagatagtgataagcatcgactattataacatgttcacctccatcttcactctgtgcactatgtctgtcgaccggtacatagccgtgtgccacccagtaaaggctcttgacttccgcacccctaggaacgctaaaataatcaacgtgtgtaactggattctgtcaagtgcgatcggtctccctgtcatgtttatggcaaccacgaaatatagacagggatctattgattgtaccctgacatttagtcatcctacatggtactgggaaaatcttctgaagatatgcgtgttcattttcgccttcatcatgcccgttcttatcatcactgtgtgctatggtttgatgattctgcgcctgaaaagtgtacggatgttatccggcagcaaagaaaaggacagaaacttacgacggatcacacgcatggtgctcgtggtagtggccgtttttattgtgtgttggacaccaatacacatctatgtcattattaaggctcttgtgacaattcctgaaactaccttccagacagttagttggcacttttgtattgccctcggttataccaactcctgcctgaaccctgtactttatgcattcctcgatgagaacttcaagaggtgtttccgtgaattttgtatcccaacctcgtctaatatcgagcaacagaactccacacgtattcgccagaacactagagatcatccgtcaacagccaatactgtggatcgcacaaaccaccagttagagaacctggaggccgagacagctcctctaccttag

SEQ ID NO: 57548 - DNA, 960 bp, Artificial Sequence
  derived and/or modified sequence
atgatgagagccaagagcatcagcaccaaggccggcaagcccagcagatacaccaagatgaagaccgccaccaacatctacatcttcaacctggccctggccgacgccctggccaccagcaccctgcccttccagagcgtgaactacctgatgggcacctggcccttcggcaccatcctgtgcaagatcgtgatcagcatcgactactacaacatgttcaccagcatcttcaccctgtgcaccatgagcgtggacagatacatcgccgtgtgccaccccgtgaaggccctggacttcagaacccccagaaacgccaagatcatcaacgtgtgcaactggatcctgagcagcgccatcggcctgcccgtgatgttcatggccaccaccaagtacagacagggcagcatcgactgcaccctgaccttcagccaccccacctggtactgggagaacctgctgaagatctgcgtgttcatcttcgccttcatcatgcccgtgctgatcatcaccgtgtgctacggcctgatgatcctgagactgaagagcgtgagaatgctgagcggcagcaaggagaaggacagaaacctgagaagaatcaccagaatggtgctggtggtggtggccgtgttcatcgtgtgctggacccccatccacatctacgtgatcatcaaggccctggtgaccatccccgagaccaccttccagaccgtgagctggcacttctgcatcgccctgggctacaccaacagctgcctgaaccccgtgctgtacgccttcctggacgagaacttcaagagatgcttcagagagttctgcatccccaccagcagcaacatcgagcagcagaacagcaccagaatcagacagaacaccagagaccaccccagcaccgccaacaccgtggacagaaccaaccaccagctggagaacctggaggccgagaccgcccccctgccctag

SEQ ID NO: 57549 - protein, 406 aa, Artificial Sequence
  derived and/or modified sequence
MDSSAAPTNASNCTDALAYSSCSPAPSPGSWVNLSHLDGNLSDPCGPNRTDLGGRDSLCPPTGSPSMITAITIMALYSIVCVVGLFGNFLVMYVIVRYTKMKTATNIYIFNLALADALATSTLPFQSVNYLMGTWPFGTILCKIVISIDYYNMFTSIFTLCTMSVDRYIAVCHPVKALDFRTPRNAKIINVCNWILSSAIGLPVMFMATTKYRQGSIDCTLTFSHPTWYWENLLKICVFIFAFIMPVLIITVCYGLMILRLKSVRMLSGSKEKDRNLRRITRMVLVVVAVFIVCWTPIHIYVIIKALVTIPETTFQTVSWHFCIALGYTNSCLNPVLYAFLDENFKRCFREFCIPTSSNIEQQNSTRIRQNTRDHPSTANTVDRTNHQKIDLFQKSSLLNCEHTKG

SEQ ID NO: 57550 - DNA, 1221 bp, Artificial Sequence
  derived and/or modified sequence
atggactccagtgcagctcctactaacgcttccaattgcaccgatgctctggcttactcaagctgctccccagcaccgtctcctggtagctgggtcaacctctcacacctagacggtaatctgagcgacccatgtggcccaaatagaacggacttaggcgggcgggattccctgtgtcccccaacaggatcaccatcaatgattacggctattacaataatggctctatatagcatcgtgtgtgtcgtagggctctttggcaacttcctcgtgatgtacgtaatcgtgcgttacacaaagatgaaaacagcaacaaacatttacatcttcaatctcgctctggccgatgctcttgcgacaagcacacttccattccaatccgtaaactacctaatggggacatggcccttcggcaccatcttgtgtaaaattgtgatttctatcgactattacaacatgtttacgagtatcttcactctttgtacaatgtctgtcgaccgatacatcgccgtgtgccatccggtgaaagccctcgacttccgcactcctcgcaacgctaaaatcatcaacgtgtgtaattggattcttagcagcgcaatcggtctgcctgtgatgtttatggccacaaccaagtatagacagggaagcatcgattgcacactcactttttctcaccctacatggtactgggaaaatctgttgaaaatctgcgttttcatcttcgccttcatcatgcccgtattgatcatcacagtctgctacggtcttatgattttgcgacttaaatccgtccggatgctttctggctcaaaagagaaggaccgcaacttaagacggattaccaggatggttcttgtggtggtagccgtgttcattgtgtgctggacacccattcacatctacgtcatcattaaagcattggtgaccattcctgagacgaccttccaaactgttagctggcacttttgtattgctctcggttacactaattcctgtctgaacccagtgctgtacgcattcctcgatgagaactttaaacgatgtttccgggaattttgtattcctactagcagcaacattgaacagcagaactctactagaatccggcagaatacaagagaccacccctcaactgccaataccgtcgatagaaccaatcaccaaaagattgatctctttcagaaatcaagcctactgaactgtgagcacaccaaggggtag

SEQ ID NO: 57551 - DNA, 1221 bp, Artificial Sequence
  derived and/or modified sequence
atggacagcagcgctgcccccaccaatgccagcaactgcacagatgccctggcctacagcagctgcagccctgcccccagccctggctcctgggtgaacctgagccacctggatggcaacctgagtgacccctgtggccccaacagaacagacctgggcggccgggacagcctgtgcccccccaccggcagccccagcatgatcacagccatcaccatcatggccctgtacagcatcgtgtgtgtggtgggcctgtttggaaacttcctggtgatgtatgtgattgtgcgctacaccaagatgaagacagccaccaacatctacatcttcaacctggccctggctgatgccctggccaccagcaccctgcccttccagagcgtgaactacctgatgggcacctggcccttcggcaccatcctgtgcaagatcgtcatcagcattgactactacaacatgttcaccagcatcttcaccctgtgcaccatgtctgtggaccgctacatcgctgtgtgccaccctgtgaaggccctggacttccgcaccccaagaaatgccaagatcatcaacgtgtgcaactggatcctgagcagcgccatcggcctgcctgtgatgttcatggccaccaccaagtaccggcagggcagcattgactgcaccctgaccttcagccaccccacctggtactgggagaacctgctgaagatctgtgtgttcatctttgccttcatcatgcctgtgctgatcatcaccgtgtgctacggcctgatgatcctgcggctgaagtctgtgaggatgctgagcggcagcaaggagaaggacaggaacctgcggcgcatcaccaggatggtgctggtggtggtggccgtgttcatcgtgtgctggacccccatccacatctacgtgatcatcaaggccctggtgaccatccctgagaccaccttccagacagtgtcctggcacttctgcatcgccctgggctacaccaacagctgcctgaaccctgtgctgtatgccttcctggatgagaacttcaagcgctgcttccgggagttctgcatccccaccagcagcaacatcgagcagcagaacagcacccgcatccggcagaacacccgggaccaccccagcacagccaacacagtggacaggaccaaccaccagaagattgacctcttccagaagagcagcctgctgaactgtgagcacaccaagggctag

SEQ ID NO: 57552 - DNA, 1221 bp, Artificial Sequence
  derived and/or modified sequence
atggacagcagcgccgcccccaccaacgccagcaactgcaccgacgctctcgcttatagttcatgctctcctgctcctagccctggctcttgggtgaacttatcacacctggatggaaacctgagcgacccgtgtgggcccaaccgcactgatctaggtggacgtgattcgctgtgtcctcctaccggctctccctccatgattacagctatcaccattatggctctctattctattgtctgcgtggtgggcctgttcggaaattttttggtgatgtacgtcatcgtgcgttacaccaaaatgaagactgcaacaaacatttatatttttaacctggcgcttgctgatgcactggccacttctaccctgcctttccaatccgtcaattatctaatggggacttggcctttcggtaccattttatgcaaaatcgtgatctcaatcgattattataatatgtttactagcatctttacattatgtactatgtccgtcgatcggtacatcgctgtatgtcaccccgtgaaggcgctggatttccggactccaagaaatgcgaagattatcaatgtatgtaactggatcctgtcctctgcaatcggcctgcccgttatgttcatggctacaactaagtacagacagggcagtatcgactgcacacttactttttcccatccgacatggtattgggagaaccttctgaaaatttgcgtctttatttttgccttcataatgcctgtcctaatcatcacagtctgttacggcctcatgattttacgtctcaaaagtgtgagaatgctgtccggcagcaaggagaaagacagaaatttaaggcggatcacaagaatggtcttggtggttgtggccgtgttcatcgtgtgttggacccctatacacatctatgtcatcatcaaggctcttgtcaccatccctgagactacttttcaaactgtgtcttggcatttttgtattgcattgggatacacgaattcttgcctgaatcccgtcctctacgcatttctcgacgaaaatttcaaacgttgcttccgagagttctgcataccgacctctagtaatattgagcagcagaatagtactagaatcagacagaatacccgagatcaccctagcactgcaaacacagtcgatcggacgaatcaccagaaaattgacctgtttcagaagtcttcccttttgaactgcgagcacacaaaaggatag

SEQ ID NO: 57553 - DNA, 1221 bp, Artificial Sequence
  derived and/or modified sequence
atggattcctccgccgcacccactaacgcctctaattgtacggacgctttggcttattcctcttgctctccagcaccctcccccggtagttgggtcaatctcagccaccttgatggtaacctgtcagatccctgcggtcccaataggacagacctcggcggtcgggattccttgtgcccccctaccggtagtcctagtatgatcactgccatcacaataatggctctgtactcaatcgtctgtgtggtggggctgttcgggaattttctcgttatgtacgtaattgttcgctatacaaagatgaagacagccaccaatatatatatattcaatctggccctcgccgacgcactggctacatcaacgctgccatttcaatcagtgaattacctgatgggaacttggcccttcggcacaatactgtgcaagatcgtaatctcaattgattattacaacatgtttacctcaatatttacgctgtgcactatgtctgttgatcggtatatagcagtttgccatccagtaaaagcccttgactttcggacccccagaaatgccaaaatcataaacgtttgcaattggattctgagttcggcaattggtcttccagttatgttcatggccaccaccaagtatcgccaggggtccatagattgcaccctcactttttcccaccccacctggtactgggagaatctgctgaagatttgcgtattcatctttgcattcatcatgcctgtgctgatcattaccgtttgttacggtctgatgatccttagattgaaatcagtgcgaatgctgtcgggcagcaaagagaaagatcggaacttgagaagaattacccgaatggtcctggtggtggtggccgtgtttattgtctgctggacccctatccatatatatgttatcattaaggctctggtgactattccagagacaacgtttcaaactgtgagctggcacttctgcatagcgctggggtacacaaatagctgtctcaatcctgtgctgtacgcatttttagacgagaatttcaaacgttgtttccgcgagttctgcattccaacgagttcaaatattgagcagcaaaattcaacaagaattagacagaacaccagagatcacccctccaccgcaaatacagtagatcgtacaaaccatcaaaaaatagatctctttcagaaaagcagcttattgaactgcgaacacacaaaaggttag

SEQ ID NO: 57554 - DNA, 1221 bp, Artificial Sequence
  derived and/or modified sequence
atggacagcagcgccgcccccaccaacgccagcaactgcaccgacgccctggcctacagcagctgcagccccgcccccagccccggcagctgggtgaacctgagccacctggacggcaacctgagcgacccctgcggccccaacagaaccgacctgggcggcagagacagcctgtgcccccccaccggcagccccagcatgatcaccgccatcaccatcatggccctgtacagcatcgtgtgcgtggtgggcctgttcggcaacttcctggtgatgtacgtgatcgtgagatacaccaagatgaagaccgccaccaacatctacatcttcaacctggccctggccgacgccctggccaccagcaccctgcccttccagagcgtgaactacctgatgggcacctggcccttcggcaccatcctgtgcaagatcgtgatcagcatcgactactacaacatgttcaccagcatcttcaccctgtgcaccatgagcgtggacagatacatcgccgtgtgccaccccgtgaaggccctggacttcagaacccccagaaacgccaagatcatcaacgtgtgcaactggatcctgagcagcgccatcggcctgcccgtgatgttcatggccaccaccaagtacagacagggcagcatcgactgcaccctgaccttcagccaccccacctggtactgggagaacctgctgaagatctgcgtgttcatcttcgccttcatcatgcccgtgctgatcatcaccgtgtgctacggcctgatgatcctgagactgaagagcgtgagaatgctgagcggcagcaaggagaaggacagaaacctgagaagaatcaccagaatggtgctggtggtggtggccgtgttcatcgtgtgctggacccccatccacatctacgtgatcatcaaggccctggtgaccatccccgagaccaccttccagaccgtgagctggcacttctgcatcgccctgggctacaccaacagctgcctgaaccccgtgctgtacgccttcctggacgagaacttcaagagatgcttcagagagttctgcatccccaccagcagcaacatcgagcagcagaacagcaccagaatcagacagaacaccagagaccaccccagcaccgccaacaccgtggacagaaccaaccaccagaagatcgacctgttccagaagagcagcctgctgaactgcgagcacaccaagggctag

SEQ ID NO: 57555 - protein, 397 aa, Artificial Sequence
  derived and/or modified sequence
MDSSAAPTNASNCTDALAYSSCSPAPSPGSWVNLSHLDGNLSDPCGPNRTDLGGRDSLCPPTGSPSMITAITIMALYSIVCVVGLFGNFLVMYVIVRYTKMKTATNIYIFNLALADALATSTLPFQSVNYLMGTWPFGTILCKIVISIDYYNMFTSIFTLCTMSVDRYIAVCHPVKALDFRTPRNAKIINVCNWILSSAIGLPVMFMATTKYRQGSIDCTLTFSHPTWYWENLLKICVFIFAFIMPVLIITVCYGLMILRLKSVRMLSGSKEKDRNLRRITRMVLVVVAVFIVCWTPIHIYVIIKALVTIPETTFQTVSWHFCIALGYTNSCLNPVLYAFLDENFKRCFREFCIPTSSNIEQQNSTRIRQNTRDHPSTANTVDRTNHQRERRQKSDW

SEQ ID NO: 57556 - DNA, 1194 bp, Artificial Sequence
  derived and/or modified sequence
atggattccagtgcagctccaactaatgcatcgaattgtactgatgcgcttgcctactcctcttgcagccctgcacctagccccggcagttgggttaatctgagccacctggatggcaatctgtctgacccgtgcggtccaaatagaactgacctgggtggaagagattcgctttgtccaccaaccggctcccccagtatgatcactgctatcaccattatggctctctattctatcgtttgtgtagtaggcctcttcggtaactttctggtgatgtacgtgatagtacggtataccaagatgaagaccgccacaaatatctatattttcaatctggctctcgctgacgctctggccaccagcacactgcctttccagtctgtgaattacctgatgggcacatggccatttggtacaattctttgtaagatagtaatttctatcgactattacaatatgtttacaagtatcttcactctgtgcactatgtcagtggaccgctatattgcagtctgccatcccgtgaaggcacttgactttagaacaccaaggaatgcgaaaattatcaacgtgtgcaattggatactgtcctcagcgatcggtctgcccgtgatgtttatggctaccaccaaataccgacaagggagcatcgactgcacattgaccttcagtcatcccacttggtactgggaaaacctcctgaagatatgtgtgttcattttcgccttcatcatgccagtcctcatcattacagtgtgttacgggcttatgatcctccgtctgaaatccgttcgaatgctttccggctctaaggagaaggatcgcaatctgcgacgcatcacccgaatggttctcgtcgtggtggcggtcttcattgtgtgctggacccccatccatatttatgttattattaaggctctggttacaattcccgagacaacatttcagacagtctcctggcacttctgcattgcgctgggctacaccaacagctgcctcaatcccgtcctctatgcgtttcttgatgaaaacttcaagcggtgcttcagggagttttgcattccaacttcttccaatattgaacagcagaattctaccagaattcgacagaataccagagaccacccctccactgctaataccgttgacaggacaaaccaccagagagaaaggagacagaaatccgactggtag

SEQ ID NO: 57557 - DNA, 1194 bp, Artificial Sequence
  derived and/or modified sequence
atggacagcagcgctgcccccaccaatgccagcaactgcacagatgccctggcctacagcagctgcagccctgcccccagccctggctcctgggtgaacctgagccacctggatggcaacctgagtgacccctgtggccccaacagaacagacctgggcggccgggacagcctgtgcccccccaccggcagccccagcatgatcacagccatcaccatcatggccctgtacagcatcgtgtgtgtggtgggcctgtttggaaacttcctggtgatgtatgtgattgtgcgctacaccaagatgaagacagccaccaacatctacatcttcaacctggccctggctgatgccctggccaccagcaccctgcccttccagagcgtgaactacctgatgggcacctggcccttcggcaccatcctgtgcaagatcgtcatcagcattgactactacaacatgttcaccagcatcttcaccctgtgcaccatgtctgtggaccgctacatcgctgtgtgccaccctgtgaaggccctggacttccgcaccccaagaaatgccaagatcatcaacgtgtgcaactggatcctgagcagcgccatcggcctgcctgtgatgttcatggccaccaccaagtaccggcagggcagcattgactgcaccctgaccttcagccaccccacctggtactgggagaacctgctgaagatctgtgtgttcatctttgccttcatcatgcctgtgctgatcatcaccgtgtgctacggcctgatgatcctgcggctgaagtctgtgaggatgctgagcggcagcaaggagaaggacaggaacctgcggcgcatcaccaggatggtgctggtggtggtggccgtgttcatcgtgtgctggacccccatccacatctacgtgatcatcaaggccctggtgaccatccctgagaccaccttccagacagtgtcctggcacttctgcatcgccctgggctacaccaacagctgcctgaaccctgtgctgtatgccttcctggatgagaacttcaagcgctgcttccgggagttctgcatccccaccagcagcaacatcgagcagcagaacagcacccgcatccggcagaacacccgggaccaccccagcacagccaacacagtggacaggaccaaccaccagcgggagcggcggcagaagagtgactggtag

SEQ ID NO: 57558 - DNA, 1194 bp, Artificial Sequence
  derived and/or modified sequence
atggacagcagcgccgcccccaccaacgccagcaactgcaccgacgctcttgcatactcttcttgcagcccagcaccctctcctggtagttgggtcaatctgagtcaccttgatggtaacctctccgatccgtgtgggccgaaccgcaccgacctcggcggcagggattccctgtgtccccctacaggatcaccaagcatgattactgcaatcaccattatggccttgtattctatcgtctgcgtggtgggcctgttcggaaactttctggttatgtatgtaatcgtacgctacacaaagatgaaaacagccactaacatctacatctttaacctggctctggcagacgctttagccacatccacactgcctttccagtcggtcaattacctaatgggtacctggccctttgggactatactatgtaagatagtgatttcaattgactactacaacatgtttacaagcatatttacgttgtgtactatgtcagtagaccgatacatcgccgtgtgccaccccgtcaaggctctggacttccggacaccccgcaatgccaaaattataaacgtttgcaattggattctgtcatctgctatcggcctcccagtaatgtttatggcaaccaccaagtatcgccaaggaagtattgactgtactctgaccttctcgcacccgacttggtattgggagaacctgttaaagatctgcgtgtttatcttcgcattcattatgcccgttcttatcatcaccgtttgctatggcctgatgatcctgcggttaaagtctgtgcgcatgctgtctggctctaaggagaaggatcgaaatctcagaaggatcactcgtatggtgctcgttgtggtggcagtgttcattgtctgttggacccccattcacatttatgttataattaaggcactggtcacgattcctgaaaccacctttcagaccgtgagctggcatttttgtatcgcgcttggctacactaactcctgtctgaaccccgtactttacgccttcttagacgagaacttcaaacgatgtttcagggagttctgcatccccaccagctccaacattgagcagcaaaacagtacaaggatccggcagaatacgagagatcatccctccacggcaaacactgtcgacaggacgaaccaccagcgtgagcgccgacagaaatctgattggtag

SEQ ID NO: 57559 - DNA, 1194 bp, Artificial Sequence
  derived and/or modified sequence
atggattcatccgcggctccaaccaatgcatcaaactgcacggacgcactcgcatattcttcgtgttccccagccccttcccccggaagttgggtaaacctctcacatttggacggtaatctcagcgacccttgtggacctaaccggacagatttaggcggacgtgattctctgtgcccccctaccggctctccatctatgatcactgctattactataatggcactgtacagcattgtctgcgtggtcggcttgttcggaaactttctggtgatgtacgtgatcgtacgatacactaagatgaagactgcaacaaatatctacatcttcaatctcgccttagctgacgctttggctacgtctactcttccctttcagagtgttaactacttaatggggacgtggccgtttggaaccatactctgcaaaatcgtgatcagcattgattattacaacatgttcacgagtatcttcacactatgtacgatgagcgttgatcgttatattgccgtatgtcatcctgtgaaggctttagattttcggactccacgaaacgccaaaatcatcaacgtgtgcaactggatcctcagcagtgctatagggctccctgttatgttcatggctacaacaaaatacagacaagggtcaatcgactgtacactcacttttagccaccccacctggtactgggaaaatctgctgaagatctgcgtcttcattttcgcctttatcatgcccgtcctgataatcaccgtttgttacggactaatgatcctgaggctaaaaagcgtcagaatgctgtctgggtctaaggagaaggacagaaacctgagaaggatcactaggatggttctggtggtggttgcggtgttcatcgtgtgctggacccccatccatatctatgtgatcataaaggcactggtcactattcccgaaactacttttcagaccgtgtcttggcacttctgcatcgccctgggctatacgaattcatgcctgaacccagttctttacgccttcctggatgagaattttaagcgctgcttccgagagttctgtataccaacctcctcgaatattgaacagcagaacagtacacggattcggcagaacacgagggatcatccatccaccgccaacacagttgatcggactaaccaccaaagggagcggcgacagaaatcagattggtag

SEQ ID NO: 57560 - DNA, 1194 bp, Artificial Sequence
  derived and/or modified sequence
atggacagcagcgccgcccccaccaacgccagcaactgcaccgacgccctggcctacagcagctgcagccccgcccccagccccggcagctgggtgaacctgagccacctggacggcaacctgagcgacccctgcggccccaacagaaccgacctgggcggcagagacagcctgtgcccccccaccggcagccccagcatgatcaccgccatcaccatcatggccctgtacagcatcgtgtgcgtggtgggcctgttcggcaacttcctggtgatgtacgtgatcgtgagatacaccaagatgaagaccgccaccaacatctacatcttcaacctggccctggccgacgccctggccaccagcaccctgcccttccagagcgtgaactacctgatgggcacctggcccttcggcaccatcctgtgcaagatcgtgatcagcatcgactactacaacatgttcaccagcatcttcaccctgtgcaccatgagcgtggacagatacatcgccgtgtgccaccccgtgaaggccctggacttcagaacccccagaaacgccaagatcatcaacgtgtgcaactggatcctgagcagcgccatcggcctgcccgtgatgttcatggccaccaccaagtacagacagggcagcatcgactgcaccctgaccttcagccaccccacctggtactgggagaacctgctgaagatctgcgtgttcatcttcgccttcatcatgcccgtgctgatcatcaccgtgtgctacggcctgatgatcctgagactgaagagcgtgagaatgctgagcggcagcaaggagaaggacagaaacctgagaagaatcaccagaatggtgctggtggtggtggccgtgttcatcgtgtgctggacccccatccacatctacgtgatcatcaaggccctggtgaccatccccgagaccaccttccagaccgtgagctggcacttctgcatcgccctgggctacaccaacagctgcctgaaccccgtgctgtacgccttcctggacgagaacttcaagagatgcttcagagagttctgcatccccaccagcagcaacatcgagcagcagaacagcaccagaatcagacagaacaccagagaccaccccagcaccgccaacaccgtggacagaaccaaccaccagagagagagaagacagaagagcgactggtag

SEQ ID NO: 57561 - protein, 403 aa, Artificial Sequence
  derived and/or modified sequence
MDSSAAPTNASNCTDALAYSSCSPAPSPGSWVNLSHLDGNLSDPCGPNRTDLGGRDSLCPPTGSPSMITAITIMALYSIVCVVGLFGNFLVMYVIVRYTKMKTATNIYIFNLALADALATSTLPFQSVNYLMGTWPFGTILCKIVISIDYYNMFTSIFTLCTMSVDRYIAVCHPVKALDFRTPRNAKIINVCNWILSSAIGLPVMFMATTKYRQGSIDCTLTFSHPTWYWENLLKICVFIFAFIMPVLIITVCYGLMILRLKSVRMLSGSKEKDRNLRRITRMVLVVVAVFIVCWTPIHIYVIIKALVTIPETTFQTVSWHFCIALGYTNSCLNPVLYAFLDENFKRCFREFCIPTSSNIEQQNSTRIRQNTRDHPSTANTVDRTNHQGPPAKFVADQLAGSS

SEQ ID NO: 57562 - DNA, 1212 bp, Artificial Sequence
  derived and/or modified sequence
atggattctagcgctgcacccactaacgctagtaactgtacggacgctctcgcctacagctcttgctcccccgccccttccccaggctcctgggtaaaccttagtcatcttgacggcaacttgtcagacccctgtggtcccaatcgaacagatttgggagggagggattcgctatgcccacccacgggatcccctagcatgatcacagccattacgatcatggccctctacagtattgtgtgcgtggtgggacttttcggaaatttcttggtgatgtacgtgatagtacgatataccaagatgaagacggccactaacatctacatctttaatctggctctggccgacgctctggcaacctctaccctgcctttccagagtgttaactacttgatgggaacttggccattcggcaccattctttgcaagatcgtaatctccatcgactactataatatgttcacgtccatctttactctctgcactatgagcgtcgataggtatattgcagtgtgccaccctgttaaagcactggactttcggacccctcgaaacgcgaagatcatcaatgtctgtaattggatcctgtcatccgcaattggcctccctgtgatgttcatggctactaccaaataccgccagggctcaatcgactgtaccctgaccttttcccaccccacctggtactgggagaacctgttgaaaatctgcgtcttcatctttgctttcattatgccggtgctgattattacagtttgttacggcttgatgatcctacggcttaagtctgtgagaatgctgtctggaagcaaggaaaaagaccgtaatctccggcggataacgcggatggtgctcgtcgttgtggccgtgtttattgtgtgctggacaccgattcatatatacgttatcattaaagctctggtgaccataccggaaactacctttcagacagtaagctggcatttttgcattgcgcttggctacaccaattcttgtttgaatcccgtactctatgcttttctcgacgagaacttcaagagatgtttccgcgaattctgcattccaacttcatccaacattgagcaacagaactctacccgaataaggcaaaacacccgagatcatccctctaccgccaataccgtggataggacaaaccatcagggtccgccagccaagtttgtcgccgatcagttggcgggaagttcctag

SEQ ID NO: 57563 - DNA, 1212 bp, Artificial Sequence
  derived and/or modified sequence
atggacagcagcgctgcccccaccaatgccagcaactgcacagatgccctggcctacagcagctgcagccctgcccccagccctggctcctgggtgaacctgagccacctggatggcaacctgagtgacccctgtggccccaacagaacagacctgggcggccgggacagcctgtgcccccccaccggcagccccagcatgatcacagccatcaccatcatggccctgtacagcatcgtgtgtgtggtgggcctgtttggaaacttcctggtgatgtatgtgattgtgcgctacaccaagatgaagacagccaccaacatctacatcttcaacctggccctggctgatgccctggccaccagcaccctgcccttccagagcgtgaactacctgatgggcacctggcccttcggcaccatcctgtgcaagatcgtcatcagcattgactactacaacatgttcaccagcatcttcaccctgtgcaccatgtctgtggaccgctacatcgctgtgtgccaccctgtgaaggccctggacttccgcaccccaagaaatgccaagatcatcaacgtgtgcaactggatcctgagcagcgccatcggcctgcctgtgatgttcatggccaccaccaagtaccggcagggcagcattgactgcaccctgaccttcagccaccccacctggtactgggagaacctgctgaagatctgtgtgttcatctttgccttcatcatgcctgtgctgatcatcaccgtgtgctacggcctgatgatcctgcggctgaagtctgtgaggatgctgagcggcagcaaggagaaggacaggaacctgcggcgcatcaccaggatggtgctggtggtggtggccgtgttcatcgtgtgctggacccccatccacatctacgtgatcatcaaggccctggtgaccatccctgagaccaccttccagacagtgtcctggcacttctgcatcgccctgggctacaccaacagctgcctgaaccctgtgctgtatgccttcctggatgagaacttcaagcgctgcttccgggagttctgcatccccaccagcagcaacatcgagcagcagaacagcacccgcatccggcagaacacccgggaccaccccagcacagccaacacagtggacaggaccaaccaccagggccccccagccaagtttgtggccgaccagctggccggcagcagctag

SEQ ID NO: 57564 - DNA, 1212 bp, Artificial Sequence
  derived and/or modified sequence
atggacagcagcgccgcccccaccaacgccagcaactgcaccgacgccctggcctacagtagctgctctcctgccccctctcccggaagttgggtgaatctgagccacctggacgggaatttatctgatccatgcgggccgaatcgaaccgacttgggcgggagagatagcctgtgcccgcccactggaagtccctccatgatcaccgcaatcaccattatggccctttatagcatcgtctgcgtggtgggacttttcgggaacttcctggtcatgtatgtcattgtcagatacactaagatgaaaactgcaaccaacatctacatttttaatctcgcactagctgatgccctggctaccagtactctgccttttcaatctgtcaattatctgatgggaacatggccattcgggaccattctgtgtaaaatcgtcatctcgattgattactacaacatgttcacaagcatcttcactctctgtacaatgagcgtggatcgttatatcgctgtgtgtcaccccgtgaaggcacttgatttccgcaccccaaggaatgcaaaaatcataaatgtctgtaactggatcctgtcaagcgcaattggcttacccgtgatgttcatggccaccaccaagtaccgccaaggttccatagattgtacactgaccttttctcatccaacgtggtactgggagaacttattgaaaatctgcgtgtttatcttcgcatttataatgccggttctcattatcacagtgtgctacggactgatgatcttgcgcctcaaatcagttcgcatgctgtccggcagcaaagagaaggataggaacctgcgacggataacccgaatggttctagtggtggttgccgtctttattgtgtgctggacacctatccatatctacgtgataataaaggctctcgtgacaattcctgagacaacattccagactgtcagttggcacttttgtatagccctcgggtacaccaatagctgtttgaacccggtcctctacgccttcctcgacgaaaactttaagaggtgttttagagaattctgtatccctacctcctctaatatcgaacaacagaattccactaggattaggcagaacacaagggaccatcccagcaccgcaaacaccgtggatcgtacaaatcatcaagggcctcctgcgaaattcgtagccgaccaattagcaggctcatcctag

SEQ ID NO: 57565 - DNA, 2485 bp, Artificial Sequence
  derived and/or modified sequence
cggtgctcctggctacctcgcacagcggtgcccgcccggccgtcagtaccatggacagcagcgctgcccccacgaacgccagcaattgcactgatgccttggcgtactcaagttgctccccagcacccagccccggttcctgggtcaacttgtcccacttagatggcaacctgtccgacccatgcggtccgaaccgcaccgacctgggcgggagagacagcctgtgccctccgaccggcagtccctccatgatcacggccatcacgatcatggccctctactccatcgtgtgcgtggtggggctcttcggaaacttcctggtcatgtatgtgattgtcagatacaccaagatgaagactgccaccaacatctacattttcaaccttgctctggcagatgccttagccaccagtaccctgcccttccagagtgtgaattacctaatgggaacatggccatttggaaccatcctttgcaagatagtgatctccatagattactataacatgttcaccagcatattcaccctctgcaccatgagtgttgatcgatacattgcagtctgccaccctgtcaaggccttagatttccgtactccccgaaatgccaaaattatcaatgtctgcaactggatcctctcttcagccattggtcttcctgtaatgttcatggctacaacaaaatacaggcaaggttccatagattgtacactaacattctctcatccaacctggtactgggaaaacctgctgaagatctgtgttttcatcttcgccttcattatgccagtgctcatcattaccgtgtgctatggactgatgatcttgcgcctcaagagtgtccgcatgctctctggctccaaagaaaaggacaggaatcttcgaaggatcaccaggatggtgctggtggtggtggctgtgttcatcgtctgctggactcccattcacatttacgtcatcattaaagccttggttacaatcccagaaactacgttccagactgtttcttggcacttctgcattgctctaggttacacaaacagctgcctcaacccagtcctttatgcatttctggatgaaaacttcaaacgatgcttcagagagttctgtatcccaacctcttccaacattgagcaacaaaactccactcgaattcgtcagaacactagagaccacccctccacggccaatacagtggatagaactaatcatcagggacctccagccaagtttgttgctgaccaacttgccgggtcgtcttgaaaagggggcttacaggtgttccaagcccgtgttttatcctgaagtatccctcaacacagaaaaacgacctcataacacaaaatacaccagcttaaaaatagcctttgaattatttttcacattaatcaaaactttacagaggagataaacactgatttttttattttattttattttattttattttattttattgccattcattcaaccgtttgcacagagagaaagaagacagaaatctgactggtaagaaattgttacccttttgccagcatgccaggcttctgggttccctttccctgagcggccctagtgatccggcttgcggcaccatcgcctacgggccaagctgcatcataaaggaaatttttttttttcattctggccagagcaaaacacatgtgataaaacataggcattagctactctgcttagcaccaaatatcagactagcttaaatttgcccccagatgggttccatcatctttaatccgacctctgacttgcagtttcaacacgtgctctctgggcaaaacagttgccctgagtaacagaaaagataggaaaggaaaaggagagagagaaaaacgtgccagtggaagggtggggaaggtgaaatgatcaaggaggccagagaaagactcacctattgcagcaacactgtagaagttcaggcagctgcttctcggtagcaaaaggatcttttccagcaatcctattagctctcaagtttccccttttagggaggaaaaagctccccatgtcccgcgatcctgtacatgtccaaccctgccatccacagccatcagcaaagagtgcaagacagattaatccaaagagaatagcaattaatatcccatagcatcaaagctgttcttagccaagagggactttaacgagaggggtctctaacaccctaaatcttagaagagactctaaccatcctaagtagggcctctaaccccgctttataaacttttaattgactcccatcttaacagttgcaatccatggaggaatgcttgataacctcggtgataagataaaaaaccaagcatactagaagtgttctctaaaattaaaaatacagtagttactagagaaaaattttagtccaaaaatccaactatagaaacatagaatgtgagaggtagcacataagaaataagtcatggggattttatttcatggaccagcaatatgatgataaaagccatctaacc

SEQ ID NO: 57566 - DNA, 1212 bp, Artificial Sequence
  derived and/or modified sequence
atggattcttcagctgcacctactaatgcctcgaactgtactgatgcactggcttatagctcctgctcaccagcacctagtcctggcagctgggtaaacttgtctcacctcgacggcaacctttccgacccttgcggccctaaccgtactgacctaggcggtcgggatagtctctgcccccctaccggatcacctagtatgatcaccgcaatcactattatggctctctatagcatagtgtgcgtcgtgggactgtttggtaattttctggtgatgtacgtcatcgtgcgctatactaaaatgaagacagctacaaatatttacattttcaacttggctctcgccgatgccttggccacatcaactctgccgtttcagagcgtcaactatttaatgggaacttggccattcggaaccatcctgtgcaagattgtcatcagtattgactattataatatgttcactagcatctttactctttgcacaatgagcgtggacaggtacattgctgtttgccaccccgtgaaggccctggattttcggacaccgaggaacgcaaagatcattaatgtatgtaactggatcctgagcagtgcaatcggcctgccagttatgttcatggcaaccacaaagtaccgtcagggttctatcgactgcaccttaacctttagtcaccccacatggtactgggagaacttgctcaagatatgtgtgttcatcttcgctttcattatgcctgtcctcattatcaccgtgtgttacggactgatgattctgaggctgaaaagcgttcgcatgctgagcggatccaaggaaaaggatagaaatctgagacgcattactcgtatggtgctcgtagtcgtcgctgtattcattgtgtgctggactcccatccatatctacgttattattaaagcgttggtgacaattccggaaaccaccttccagactgtgtcttggcacttctgcatcgctttgggttatacaaactcatgcttaaatcccgtcctgtacgcttttcttgacgagaacttcaaacggtgcttccgggagttctgtattcccacttcctcaaacattgaacagcagaatagcacacgcatcaggcagaataccagagaccatcctagcaccgcgaatacggtggatcggaccaatcatcagggccctcccgctaagttcgtggccgatcagctggctgggtcaagctag

SEQ ID NO: 57567 - DNA, 1212 bp, Artificial Sequence
  derived and/or modified sequence
atggacagcagcgccgcccccaccaacgccagcaactgcaccgacgccctggcctacagcagctgcagccccgcccccagccccggcagctgggtgaacctgagccacctggacggcaacctgagcgacccctgcggccccaacagaaccgacctgggcggcagagacagcctgtgcccccccaccggcagccccagcatgatcaccgccatcaccatcatggccctgtacagcatcgtgtgcgtggtgggcctgttcggcaacttcctggtgatgtacgtgatcgtgagatacaccaagatgaagaccgccaccaacatctacatcttcaacctggccctggccgacgccctggccaccagcaccctgcccttccagagcgtgaactacctgatgggcacctggcccttcggcaccatcctgtgcaagatcgtgatcagcatcgactactacaacatgttcaccagcatcttcaccctgtgcaccatgagcgtggacagatacatcgccgtgtgccaccccgtgaaggccctggacttcagaacccccagaaacgccaagatcatcaacgtgtgcaactggatcctgagcagcgccatcggcctgcccgtgatgttcatggccaccaccaagtacagacagggcagcatcgactgcaccctgaccttcagccaccccacctggtactgggagaacctgctgaagatctgcgtgttcatcttcgccttcatcatgcccgtgctgatcatcaccgtgtgctacggcctgatgatcctgagactgaagagcgtgagaatgctgagcggcagcaaggagaaggacagaaacctgagaagaatcaccagaatggtgctggtggtggtggccgtgttcatcgtgtgctggacccccatccacatctacgtgatcatcaaggccctggtgaccatccccgagaccaccttccagaccgtgagctggcacttctgcatcgccctgggctacaccaacagctgcctgaaccccgtgctgtacgccttcctggacgagaacttcaagagatgcttcagagagttctgcatccccaccagcagcaacatcgagcagcagaacagcaccagaatcagacagaacaccagagaccaccccagcaccgccaacaccgtggacagaaccaaccaccagggcccccccgccaagttcgtggccgaccagctggccggcagcagctag

SEQ ID NO: 57568 - DNA, 1170 bp, Artificial Sequence
  derived and/or modified sequence
atggactcttcggctgctcccactaacgcgagtaactgtacagacgccttagcatactcttcttgtagcccggctccttccccggggtcctgggtaaatctgtcccatttggacgggaacttaagcgacccttgcggacctaatcgcacagatctggggggacgcgatagtctgtgccccccaaccggaagtcctagtatgattaccgccatcactatcatggcactgtactcaatagtctgtgtggtcgggctgtttgggaactttcttgtgatgtatgtaattgttagatacaccaagatgaaaacagcaaccaacatctatatttttaacttggcactggccgacgcgcttgctaccagcacactcccttttcagtccgtcaactatcttatggggacctggccttttggcaccatattatgtaagattgtgattagtatcgattattataatatgtttaccagtatattcactctgtgtaccatgtcagtcgacaggtatatcgcagtgtgccatccagtaaaggccctggacttccggacaccccgtaacgcaaagatcattaatgtttgcaattggatcttgagcagtgctattgggttgcccgtcatgttcatggctactaccaaatacaggcagggaagcattgattgcactcttactttcagccatccaacctggtactgggagaatctgcttaaaatctgcgtgttcatcttcgccttcatcatgcccgtgctaattattaccgtgtgttatggtcttatgatcctccggcttaaaagcgttcggatgctgtccgggagcaaggagaaggaccggaatcttcgtaggatcactaggatggtcctggtggtagtcgcggtgtttattgtctgttggaccccaatccacatctacgtgattattaaagccctggttacgattcccgagactacattccagacagtgtcttggcatttttgtattgcacttggttatacaaacagctgcctcaaccccgtgctctacgcattcctagacgaaaattttaaacgttgttttagggagttttgtatacccacttcaagcaatattgagcagcaaaatagcacaaggattcgccagaacacccgggatcatcccagcactgcgaacacagtcgataggaccaatcatcagtcctag

SEQ ID NO: 57569 - DNA, 1170 bp, Artificial Sequence
  derived and/or modified sequence
atggacagcagcgctgcccccaccaatgccagcaactgcacagatgccctggcctacagcagctgcagccctgcccccagccctggctcctgggtgaacctgagccacctggatggcaacctgagtgacccctgtggccccaacagaacagacctgggcggccgggacagcctgtgcccccccaccggcagccccagcatgatcacagccatcaccatcatggccctgtacagcatcgtgtgtgtggtgggcctgtttggaaacttcctggtgatgtatgtgattgtgcgctacaccaagatgaagacagccaccaacatctacatcttcaacctggccctggctgatgccctggccaccagcaccctgcccttccagagcgtgaactacctgatgggcacctggcccttcggcaccatcctgtgcaagatcgtcatcagcattgactactacaacatgttcaccagcatcttcaccctgtgcaccatgtctgtggaccgctacatcgctgtgtgccaccctgtgaaggccctggacttccgcaccccaagaaatgccaagatcatcaacgtgtgcaactggatcctgagcagcgccatcggcctgcctgtgatgttcatggccaccaccaagtaccggcagggcagcattgactgcaccctgaccttcagccaccccacctggtactgggagaacctgctgaagatctgtgtgttcatctttgccttcatcatgcctgtgctgatcatcaccgtgtgctacggcctgatgatcctgcggctgaagtctgtgaggatgctgagcggcagcaaggagaaggacaggaacctgcggcgcatcaccaggatggtgctggtggtggtggccgtgttcatcgtgtgctggacccccatccacatctacgtgatcatcaaggccctggtgaccatccctgagaccaccttccagacagtgtcctggcacttctgcatcgccctgggctacaccaacagctgcctgaaccctgtgctgtatgccttcctggatgagaacttcaagcgctgcttccgggagttctgcatccccaccagcagcaacatcgagcagcagaacagcacccgcatccggcagaacacccgggaccaccccagcacagccaacacagtggacaggaccaaccaccagagctag

SEQ ID NO: 57570 - DNA, 1170 bp, Artificial Sequence
  derived and/or modified sequence
atggacagcagcgccgcccccaccaacgccagcaactgcaccgacgcgcttgcctacagttcctgcagccccgccccctcacccggctcctgggtgaacctttctcatcttgatgggaacctgagtgatccttgtgggccaaatcggaccgatctgggaggccgcgattctttgtgtcctcctacaggttccccatctatgatcacggccattacgattatggccctgtactctatcgtttgtgtcgtggggttattcggtaactttctcgtgatgtatgttatcgttcgatataccaaaatgaagaccgctacaaatatctacatttttaacctggccttagctgacgcgctcgccacatctaccctgccattccagagcgtaaactatctgatggggacatggccttttggaaccattttatgcaagatcgtaatttctattgactattataatatgtttacatctattttcaccctttgcaccatgtcagtggaccggtacattgcagtgtgtcacccggtaaaagcccttgatttcagaacgccccggaatgcgaaaatcatcaatgtgtgtaactggatacttagcagtgccatcggcttacctgtcatgtttatggcaacaaccaaatacaggcagggatctattgattgcacgctcactttcagtcaccccacttggtactgggagaatctgctgaaaatctgcgtgttcatttttgccttcattatgcccgttcttatcattactgtttgttatggccttatgattctccgcctcaagtcggtccggatgctctccggcagcaaagagaaagacaggaacctgcgaagaatcactcggatggtgctcgtggtcgttgctgtgttcatcgtctgttggaccccgatacatatctacgtcatcattaaggcactggtcactattcccgagacaacatttcagaccgtgtcgtggcatttttgcatcgccctgggctacactaacagttgtctcaacccagttctgtacgcctttctggatgaaaattttaagagatgtttcagagaattttgtattcccaccagctctaacatcgagcagcagaacagcactcggattcggcagaacaccagagaccatccaagcaccgccaacacagtggataggactaaccaccaaagctag

SEQ ID NO: 57571 - DNA, 1170 bp, Artificial Sequence
  derived and/or modified sequence
atggactcatccgcagccccaacgaatgcatcaaattgcactgacgcgctggcatatagcagctgctccccggcaccctcccctgggtcatgggtgaatctctcccacttagacggaaacctcagtgatccatgcgggcctaaccgcactgatctgggcggaagggattccctctgtccacctacaggctctccatcgatgataacagccatcaccatcatggccctgtatagcatcgtatgcgtggtgggactcttcggcaactttctggtgatgtatgttatcgtgcgatacacaaaaatgaaaaccgccacaaatatctatatctttaatctcgctctggctgacgccctggccacttccactctgccattccaaagtgtcaactacctgatgggcacctggccattcggcaccatcctctgtaaaatcgtcatttccatagactactataatatgtttacttcaatctttactctatgtacaatgtctgtggatcggtatatcgccgtctgccaccctgtcaaagccctggactttcggactccgaggaatgcgaagatcatcaacgtctgtaactggattctctcatccgctatagggctccccgtgatgtttatggccacaaccaagtaccggcaaggtagtatcgactgcaccttgacttttagccaccctacctggtattgggaaaacctgttgaagatctgcgtgtttatctttgcgtttattatgcctgttctgatcataactgtgtgctacggcctgatgattcttcggctcaaaagtgttcggatgctgagtggatctaaagaaaaagaccgcaacctcaggcggattacacggatggtgctcgtggtcgtggcagtcttcatagtgtgttggacacctattcatatttacgtcatcattaaagcacttgttacgatcccagagacaacctttcagactgtgagctggcatttttgcatcgcgttaggctatactaactcatgcctcaaccccgtgttgtatgcattcctggatgaaaactttaaacggtgctttagggagttctgtatccccacctcctccaatatcgagcagcagaatagcactcgaatccgtcagaatactcgggatcacccgtcgaccgccaatacagtcgatcgcactaaccatcaaagctag

SEQ ID NO: 57572 - DNA, 1170 bp, Artificial Sequence
  derived and/or modified sequence
atggacagcagcgccgcccccaccaacgccagcaactgcaccgacgccctggcctacagcagctgcagccccgcccccagccccggcagctgggtgaacctgagccacctggacggcaacctgagcgacccctgcggccccaacagaaccgacctgggcggcagagacagcctgtgcccccccaccggcagccccagcatgatcaccgccatcaccatcatggccctgtacagcatcgtgtgcgtggtgggcctgttcggcaacttcctggtgatgtacgtgatcgtgagatacaccaagatgaagaccgccaccaacatctacatcttcaacctggccctggccgacgccctggccaccagcaccctgcccttccagagcgtgaactacctgatgggcacctggcccttcggcaccatcctgtgcaagatcgtgatcagcatcgactactacaacatgttcaccagcatcttcaccctgtgcaccatgagcgtggacagatacatcgccgtgtgccaccccgtgaaggccctggacttcagaacccccagaaacgccaagatcatcaacgtgtgcaactggatcctgagcagcgccatcggcctgcccgtgatgttcatggccaccaccaagtacagacagggcagcatcgactgcaccctgaccttcagccaccccacctggtactgggagaacctgctgaagatctgcgtgttcatcttcgccttcatcatgcccgtgctgatcatcaccgtgtgctacggcctgatgatcctgagactgaagagcgtgagaatgctgagcggcagcaaggagaaggacagaaacctgagaagaatcaccagaatggtgctggtggtggtggccgtgttcatcgtgtgctggacccccatccacatctacgtgatcatcaaggccctggtgaccatccccgagaccaccttccagaccgtgagctggcacttctgcatcgccctgggctacaccaacagctgcctgaaccccgtgctgtacgccttcctggacgagaacttcaagagatgcttcagagagttctgcatccccaccagcagcaacatcgagcagcagaacagcaccagaatcagacagaacaccagagaccaccccagcaccgccaacaccgtggacagaaccaaccaccagagctag

SEQ ID NO: 57573 - protein, 420 aa, Artificial Sequence
  derived and/or modified sequence
MDSSAAPTNASNCTDALAYSSCSPAPSPGSWVNLSHLDGNLSDPCGPNRTDLGGRDSLCPPTGSPSMITAITIMALYSIVCVVGLFGNFLVMYVIVRYTKMKTATNIYIFNLALADALATSTLPFQSVNYLMGTWPFGTILCKIVISIDYYNMFTSIFTLCTMSVDRYIAVCHPVKALDFRTPRNAKIINVCNWILSSAIGLPVMFMATTKYRQGSIDCTLTFSHPTWYWENLLKICVFIFAFIMPVLIITVCYGLMILRLKSVRMLSGSKEKDRNLRRITRMVLVVVAVFIVCWTPIHIYVIIKALVTIPETTFQTVSWHFCIALGYTNSCLNPVLYAFLDENFKRCFREFCIPTSSNIEQQNSTRIRQNTRDHPSTANTVDRTNHQVELNLDCHCENAKPWPLSYNAGQSPFPFPGRV

SEQ ID NO: 57574 - DNA, 1263 bp, Artificial Sequence
  derived and/or modified sequence
atggatagtagcgctgcacccaccaatgcatctaattgcactgatgccttggcctactcatcatgcagcccagccccatcaccaggctcctgggtaaacttatcacacctggatggcaatctcagcgatccttgcgggcctaaccgaactgacctgggcggccgtgactctttgtgtcccccaaccgggagcccctccatgattacagctatcaccataatggctctgtactcgatcgtttgtgttgtcggtctgttcgggaactttctcgtcatgtacgttatcgtgagatacacaaaaatgaagaccgccaccaatatttatatctttaatctggcccttgccgatgccctggctactagcaccttgcctttccagagcgtcaattatctcatggggacctggccttttggtaccatcctgtgtaagattgttatctctatagactactacaacatgtttacttctatttttacactgtgtacgatgtccgtggataggtacattgcagtgtgccacccagtaaaggcgcttgattttcggacacctagaaatgcgaagatcatcaatgtctgtaattggatcctgagctcagccatcggactgcccgtgatgttcatggccacaacgaaatataggcaagggtctattgattgtacattaaccttcagccatcctacctggtactgggaaaacctgctgaagatatgcgtattcatattcgccttcatcatgcctgtactgatcatcaccgtgtgctatgggctgatgatacttcgcctgaagtcagtacggatgttgtctggatccaaagaaaaggaccgcaatctcaggcggattacaaggatggttctcgtggttgtggcagtgttcatcgtgtgttggactcctatccatatttacgttattatcaaggcccttgtgaccatacctgaaaccacattccagaccgtctcgtggcacttttgtatagctcttggatatacaaactcttgtctcaatcctgtcttatatgccttcctcgatgaaaattttaagagatgctttcgggaattctgcatccctacatcctccaacatcgagcagcagaattccacccggatccgccagaataccagggatcatccaagcacggctaatacagtagacaggacaaaccatcaggtggaattgaacttggattgccattgcgaaaatgcaaagccctggccgctgagttacaacgctggccagagtcctttcccttttcccggccgggtctag

SEQ ID NO: 57575 - DNA, 1263 bp, Artificial Sequence
  derived and/or modified sequence
atggacagcagcgctgcccccaccaatgccagcaactgcacagatgccctggcctacagcagctgcagccctgcccccagccctggctcctgggtgaacctgagccacctggatggcaacctgagtgacccctgtggccccaacagaacagacctgggcggccgggacagcctgtgcccccccaccggcagccccagcatgatcacagccatcaccatcatggccctgtacagcatcgtgtgtgtggtgggcctgtttggaaacttcctggtgatgtatgtgattgtgcgctacaccaagatgaagacagccaccaacatctacatcttcaacctggccctggctgatgccctggccaccagcaccctgcccttccagagcgtgaactacctgatgggcacctggcccttcggcaccatcctgtgcaagatcgtcatcagcattgactactacaacatgttcaccagcatcttcaccctgtgcaccatgtctgtggaccgctacatcgctgtgtgccaccctgtgaaggccctggacttccgcaccccaagaaatgccaagatcatcaacgtgtgcaactggatcctgagcagcgccatcggcctgcctgtgatgttcatggccaccaccaagtaccggcagggcagcattgactgcaccctgaccttcagccaccccacctggtactgggagaacctgctgaagatctgtgtgttcatctttgccttcatcatgcctgtgctgatcatcaccgtgtgctacggcctgatgatcctgcggctgaagtctgtgaggatgctgagcggcagcaaggagaaggacaggaacctgcggcgcatcaccaggatggtgctggtggtggtggccgtgttcatcgtgtgctggacccccatccacatctacgtgatcatcaaggccctggtgaccatccctgagaccaccttccagacagtgtcctggcacttctgcatcgccctgggctacaccaacagctgcctgaaccctgtgctgtatgccttcctggatgagaacttcaagcgctgcttccgggagttctgcatccccaccagcagcaacatcgagcagcagaacagcacccgcatccggcagaacacccgggaccaccccagcacagccaacacagtggacaggaccaaccaccaggtggagctgaacctggactgccactgtgaaaatgccaagccctggcccctgagctacaatgccggccagagccccttccccttccctggccgggtgtag

SEQ ID NO: 57576 - DNA, 1263 bp, Artificial Sequence
  derived and/or modified sequence
atggacagcagcgccgcccccaccaacgccagcaactgcaccgacgccctggcctattctagttgcagcccagccccgtcacccggttcctgggttaatttgagccacctggatggaaatcttagtgatccatgcggcccaaataggactgacttgggcggcagagacagcctctgcccgcctactggaagcccgtctatgatcaccgcgataacaatcatggccctttacagcattgtctgtgtggttggtctttttggtaacttcttagtcatgtacgtcatcgtacgttacactaaaatgaaaacagctacgaacatttatatttttaacctggccctggcagacgctctggccacatctactctgcctttccaaagcgtcaactaccttatgggaacctggcctttcggcactatactctgcaaaatcgtcatttcaatcgactactacaatatgttcacatctatttttaccctgtgcacaatgtcagttgaccgatatatcgcagtttgccatcctgtgaaagctttagacttccgaactccacggaatgcgaaaatcatcaacgtctgcaattggattctctcttccgctatcggccttcctgttatgtttatggctacaactaagtaccgccaagggagtatagattgtacacttaccttttcccatccaacctggtattgggagaacctgcttaagatatgcgtgtttatattcgccttcatcatgccagtgcttatcattacggtctgttacggacttatgatcctgaggttgaaatcagtgcggatgctgtctggctccaaggagaaggataggaacctgaggagaatcacccggatggttcttgtcgtggtggccgtgttcattgtctgttggaccccgattcatatatatgtaataatcaaggctttggtgacaatacctgagaccacctttcaaacagtttcttggcacttttgcatcgcactggggtatactaattcctgcctgaaccctgtactttatgccttccttgacgaaaatttcaaacgctgctttcgagagttctgcatcccaacttcttctaacattgaacagcagaattcaacacgtattagacaaaatactcgagaccatccaagcaccgccaacactgtcgatagaacaaatcaccaggtggagttgaatcttgactgtcactgcgagaacgcaaagccatggcctctgtcatacaacgctggacagtctccctttccttttccagggcgagtatag

SEQ ID NO: 57577 - DNA, 1402 bp, Artificial Sequence
  derived and/or modified sequence
cggtgctcctggctacctcgcacagcggtgcccgcccggccgtcagtaccatggacagcagcgctgcccccacgaacgccagcaattgcactgatgccttggcgtactcaagttgctccccagcacccagccccggttcctgggtcaacttgtcccacttagatggcaacctgtccgacccatgcggtccgaaccgcaccgacctgggcgggagagacagcctgtgccctccgaccggcagtccctccatgatcacggccatcacgatcatggccctctactccatcgtgtgcgtggtggggctcttcggaaacttcctggtcatgtatgtgattgtcagatacaccaagatgaagactgccaccaacatctacattttcaaccttgctctggcagatgccttagccaccagtaccctgcccttccagagtgtgaattacctaatgggaacatggccatttggaaccatcctttgcaagatagtgatctccatagattactataacatgttcaccagcatattcaccctctgcaccatgagtgttgatcgatacattgcagtctgccaccctgtcaaggccttagatttccgtactccccgaaatgccaaaattatcaatgtctgcaactggatcctctcttcagccattggtcttcctgtaatgttcatggctacaacaaaatacaggcaaggttccatagattgtacactaacattctctcatccaacctggtactgggaaaacctgctgaagatctgtgttttcatcttcgccttcattatgccagtgctcatcattaccgtgtgctatggactgatgatcttgcgcctcaagagtgtccgcatgctctctggctccaaagaaaaggacaggaatcttcgaaggatcaccaggatggtgctggtggtggtggctgtgttcatcgtctgctggactcccattcacatttacgtcatcattaaagccttggttacaatcccagaaactacgttccagactgtttcttggcacttctgcattgctctaggttacacaaacagctgcctcaacccagtcctttatgcatttctggatgaaaacttcaaacgatgcttcagagagttctgtatcccaacctcttccaacattgagcaacaaaactccactcgaattcgtcagaacactagagaccacccctccacggccaatacagtggatagaactaatcatcaggtggaattgaacctggactgtcactgtgaaaatgcaaagccttggccactgagctacaatgcagggcagtctccatttcccttcccaggaagagtctagagcattaattttgagtttgcaaaggcttgtaactatttcatatgatttttagagctgactatgacatgaaccctaaaattcctgttccc

SEQ ID NO: 57578 - DNA, 1263 bp, Artificial Sequence
  derived and/or modified sequence
atggatagcagcgcagcgcctacaaatgcctctaactgtaccgatgctttggcatattcatcctgttcacctgccccaagtccaggtagctgggtcaacctatcacatctggacgggaatctctcagatccttgcggacccaatagaacggacctgggaggacgggacagcctgtgcccacccaccggctctccctccatgataactgcaattacaattatggcactctattctatagtgtgcgtggtaggtctgttcggcaatttcctcgtcatgtatgtgatcgtgcgatacacaaagatgaagaccgccaccaacatctacatattcaatctggctttggctgacgctctcgctacatccactctgccgtttcaaagcgtcaattacctcatgggtacatggcctttcgggactatactttgtaagatcgtgatttctatcgattactacaacatgtttaccagtatctttaccctatgtaccatgagcgtggaccgatacatagctgtatgtcaccccgtgaaagctcttgacttccgaacccctagaaacgcaaaaatcatcaacgtctgtaactggatccttagcagcgcaatcggattacccgtcatgtttatggctacgactaagtatagacagggctctatcgactgtactcttacattcagccaccccacctggtactgggaaaatctgctgaaaatctgcgtgttcatcttcgcattcataatgcctgtcctcattatcacggtgtgctatggtctgatgatcctgcgcttgaagtcggtgaggatgctgagcggctctaaagaaaaagaccgtaatcttaggcgcatcacgagaatggtcttagtggttgtggccgtgtttattgtctgttggacaccgattcatatatacgttattataaaggcactggtcaccataccagaaactacgtttcagacagtcagctggcacttctgcatcgcactgggttatacgaacagctgtctgaatccagtgctttatgctttcctcgacgagaatttcaagagatgtttccgagaattctgtatccctacatcttctaacattgagcaacaaaacagcactcgaatcagacagaatacaagggatcacccgtctactgctaacacggtggatcggacaaaccaccaggtcgagttaaatctggactgtcactgtgagaatgcaaaaccatggccattatcatacaacgctggacaatcacccttcccttttcccggtcgggtgtag

SEQ ID NO: 57579 - DNA, 1263 bp, Artificial Sequence
  derived and/or modified sequence
atggacagcagcgccgcccccaccaacgccagcaactgcaccgacgccctggcctacagcagctgcagccccgcccccagccccggcagctgggtgaacctgagccacctggacggcaacctgagcgacccctgcggccccaacagaaccgacctgggcggcagagacagcctgtgcccccccaccggcagccccagcatgatcaccgccatcaccatcatggccctgtacagcatcgtgtgcgtggtgggcctgttcggcaacttcctggtgatgtacgtgatcgtgagatacaccaagatgaagaccgccaccaacatctacatcttcaacctggccctggccgacgccctggccaccagcaccctgcccttccagagcgtgaactacctgatgggcacctggcccttcggcaccatcctgtgcaagatcgtgatcagcatcgactactacaacatgttcaccagcatcttcaccctgtgcaccatgagcgtggacagatacatcgccgtgtgccaccccgtgaaggccctggacttcagaacccccagaaacgccaagatcatcaacgtgtgcaactggatcctgagcagcgccatcggcctgcccgtgatgttcatggccaccaccaagtacagacagggcagcatcgactgcaccctgaccttcagccaccccacctggtactgggagaacctgctgaagatctgcgtgttcatcttcgccttcatcatgcccgtgctgatcatcaccgtgtgctacggcctgatgatcctgagactgaagagcgtgagaatgctgagcggcagcaaggagaaggacagaaacctgagaagaatcaccagaatggtgctggtggtggtggccgtgttcatcgtgtgctggacccccatccacatctacgtgatcatcaaggccctggtgaccatccccgagaccaccttccagaccgtgagctggcacttctgcatcgccctgggctacaccaacagctgcctgaaccccgtgctgtacgccttcctggacgagaacttcaagagatgcttcagagagttctgcatccccaccagcagcaacatcgagcagcagaacagcaccagaatcagacagaacaccagagaccaccccagcaccgccaacaccgtggacagaaccaaccaccaggtggagctgaacctggactgccactgcgagaacgccaagccctggcccctgagctacaacgccggccagagccccttccccttccccggcagagtgtag

SEQ ID NO: 57580 - protein, 539 aa, Artificial Sequence
  derived and/or modified sequence
MPFKAFDTFKEKILKPGKEGVKNAVGDSLGILQRKIDGTTEEEDNIELNEEGRPVQTSRPSPPLCDCHCCGLPKRYIIAIMSGLGFCISFGIRCNLGVAIVEMVNNSTVYVDGKPEIQTAQFNWDPETVGLIHGSFFWGYIMTQIPGGFISNKFAANRVFGAAIFLTSTLNMFIPSAARVHYGCVMCVRILQGLVEGVTYPACHGMWSKWAPPLERSRLATTSFCGSYAGAVVAMPLAGVLVQYIGWSSVFYIYGMFGIIWYMFWLLQAYECPAAHPTISNEEKTYIETSIGEGANVVSLSVGLLSAVPHMVMTIVVPIGGQLADYLRSRQILTTTAVRKIMNCGGFGMEATLLLVVGFSHTKGVAISFLVLAVGFSGFAISGFNVNHLDIAPRYASILMGISNGVGTLSGMVCPLIVGAMTRHKTREEWQNVFLIAALVHYSGVIFYGVFASGEKQEWADPENLSEEKCGIIDQDELAEEIELNHESFASPKKKMSYGATSQNCEVQKKEWKGQRGATLDEEELTSYQNEERNFSTIS

SEQ ID NO: 57581 - DNA, 165 bp, Artificial Sequence
  derived and/or modified sequence
atgatgaaaccacaggccgagaccggcgaggcagctagagatccatctcttcggccagcccgaacagtgttggtgggctccctttcttggctcaggaagcaacttcagcccacacattgcaagtatgaaggccctcgcaaggcgcgaagactgtggttcgcatag

SEQ ID NO: 57582 - DNA, 1620 bp, Artificial Sequence
  derived and/or modified sequence
atgccatttaaagctttcgacacattcaaggaaaaaatccttaagcccgggaaggaaggggtgaagaatgccgtcggcgatagcctcgggatattacagaggaagatagacggtacgactgaagaagaggataatatcgagctgaacgaagagggccgcccggtgcagacgtcacggccctcacctcctctgtgtgactgccattgttgcgggctgccgaagcggtacatcattgcgataatgtcaggtctggggttttgcatctcatttggaatacggtgcaatctcggcgtggctatcgtagagatggtgaacaactctaccgtgtacgtcgacgggaaacctgaaattcagactgcacagttcaattgggacccagaaacagtgggccttatccacggcagttttttttgggggtacattatgacacagattccaggcggattcatatctaacaagtttgccgcaaatagagtttttggcgccgcaatctttcttacctcaactctgaacatgttcattccgagtgccgcaagggtccattacggttgcgtaatgtgtgtgcggattctgcagggtctggtcgaaggagttacttatccggcctgtcatggaatgtggtctaaatgggcccctcctctggaaagatctagactggccacaaccagcttttgcgggtcctacgcaggtgcagtggtggcaatgcctctcgcaggagtactggtccagtatattggatggtcaagtgtattttatatctacggtatgtttggaattatctggtatatgttttggctcctgcaggcgtacgagtgtcctgccgcacaccctaccatttctaacgaagagaaaacttatattgaaacgtctatcggagagggcgccaacgttgttagtttaagcgtgggcttactgtccgctgtgccccatatggtcatgactatcgtggtgcctattggcggacagctcgcagactatctgaggagtcgccaaattctcactacaactgcggtcagaaaaattatgaattgcggcggctttggtatggaagccacgcttcttttggtggtcggcttcagccacacgaaaggcgttgctattagcttcctcgttctcgccgtgggctttagcggcttcgctatcagcggctttaacgtgaaccatctggacattgcccctaggtacgcgtcaatcctcatgggtatttccaatggggtgggcacgctcagtgggatggtgtgccccctcatagtgggcgccatgacgaggcacaagacgagggaagagtggcaaaatgtctttttaatagccgcactggttcactactcgggtgtaattttctacggagtcttcgcctccggtgaaaaacaggagtgggctgaccctgagaatctgagtgaagaaaaatgtggcatcattgatcaagacgaattggctgaagagatagaacttaaccacgaaagctttgcttctcccaagaaaaagatgtcctatggtgctacatcccagaactgtgaggttcaaaagaaagagtggaagggccagaggggagcgactctagatgaagaagagttgacaagttatcagaatgaagagcgtaatttctctactatctcctag

SEQ ID NO: 57583 - DNA, 1620 bp, Artificial Sequence
  derived and/or modified sequence
atgcccttcaaggcctttgacaccttcaaggagaagatcctgaagccaggcaaggagggcgtgaagaatgctgtgggggacagcctgggcatcctgcagaggaagattgatggcaccacagaggaggaggacaacatcgagctgaatgaggagggccggcctgtgcagaccagccggcccagcccccccctgtgtgactgccactgctgcggcctgcccaagcgctacatcatcgccatcatgagcggcctgggcttctgcatcagctttggcatccgctgcaacctgggcgtggccatcgtggagatggtgaacaacagcacagtgtatgtggatggcaagccagagatccagacagcccagttcaactgggaccctgagaccgtgggcctcatccacggcagcttcttctggggctacatcatgacccagatccctgggggcttcatcagcaacaagtttgctgccaacagagtgtttggagctgccatcttcctgaccagcaccctgaacatgttcatccccagcgctgcccgggtgcactacggctgtgtgatgtgtgtgcgcatcctgcagggcctggtggagggcgtgacctacccagcctgccacggcatgtggagcaagtgggccccacccctggagaggagccggctggccaccaccagcttctgtggcagctatgctggagctgtggtggccatgcccctggccggcgtgctggtgcagtacatcggctggagctctgtgttctacatctacggcatgtttggcatcatctggtacatgttctggctgctgcaggcctatgaatgtcctgctgcccaccccaccatcagcaatgaggagaagacctacatcgagaccagcattggagagggcgccaacgtggtgtccctgtctgtgggcctgctgtctgctgtgccccacatggtgatgaccatcgtggtgcccatcggcggccagctggccgactacctgcggagccggcagatcctgaccaccacagctgtgaggaagatcatgaactgtggcggcttcggcatggaggccaccctgctgctggtggtgggcttcagccacaccaagggcgtggccatctccttcctggtgctggccgtgggcttcagcggctttgccatcagcggcttcaacgtgaaccacctggacatcgcccccaggtatgccagcatcctgatgggcatcagcaatggagtgggcaccctgagcggcatggtgtgccccctgattgtgggcgccatgaccaggcacaagacccgggaggagtggcagaatgtgttcctgattgctgccctggtgcactacagcggggtcatcttctacggcgtgtttgccagcggggagaagcaggagtgggccgaccctgagaacctgtctgaggagaagtgtggcatcatcgaccaggatgagctggccgaggagattgagctgaaccacgagagctttgccagccccaagaagaagatgtcctatggagccaccagccagaactgtgaggtgcagaagaaggagtggaagggccagagaggagccaccctggatgaggaggagctgaccagctaccagaatgaggagaggaacttcagcaccatctcctag

SEQ ID NO: 57584 - DNA, 1620 bp, Artificial Sequence
  derived and/or modified sequence
atgcccttcaaggccttcgacaccttcaaggagaagatcctgaagccgggaaaggagggcgtcaagaatgcagtgggcgattcactcggcattcttcagcgtaagattgacgggactacagaggaagaagataacattgagctgaatgaagagggacggccagtccagacttcacggccttctcctcccttgtgtgactgccattgctgcgggcttccaaagaggtatatcatcgccattatgagcggcctagggttttgcataagtttcggaatccgctgtaatttgggagtcgcaattgtggaaatggtcaacaactccactgtgtatgtggacgggaaacccgagattcagaccgcccagtttaactgggacccagaaacagtggggctcattcatggcagcttcttttgggggtacatcatgacgcagatcccgggcggttttatctccaacaagttcgccgcgaacagagtatttggggcggccatctttttaacaagtaccttaaacatgttcatcccctcagccgcacgagttcactacgggtgtgtgatgtgtgtacgcatactgcagggactggtggagggggttacttacccagcctgccatggaatgtggtccaaatgggcacctcccttggaacgttcaagactggccacaacttccttttgcggtagttatgccggcgctgtggtggctatgccgttggccggagtgctggtccagtatataggttggtcctccgtgttttacatttacggaatgttcggaataatctggtatatgttctggctcttgcaggcctacgagtgcccagccgcgcatccaaccattagcaatgaggaaaaaacttatattgaaacatctattggcgagggagctaatgtcgtttctctatcagtgggactcttatctgccgtgccacatatggttatgacaatcgtggtgccaatcggcggacagctggccgactacctgcgcagccggcaaatactgactactactgccgtcagaaagatcatgaactgtggtggtttcggaatggaggccacgcttctactggtagttgggttttcgcacacaaaaggagtggcgatcagcttccttgtactggcagttggtttttcaggctttgccatatccggctttaatgtaaatcatctcgacatagctcccagatacgcatcaatactcatgggaatttccaatggggtgggcactctgtcgggcatggtctgcccactgatcgtaggagccatgaccaggcacaagacaagagaagagtggcagaatgttttcttgattgccgcactggtccactatagcggcgtgatcttctatggggtgtttgcttcaggggagaaacaagagtgggccgaccccgaaaacctgtccgaggagaagtgtggaatcattgatcaggacgaattagctgaggagattgagctgaatcatgaatctttcgcttcacctaaaaaaaagatgagctatggtgcgacctctcagaattgtgaagtgcagaagaaagagtggaaggggcagagaggggccaccttggatgaagaagaattaaccagctaccagaatgaggaaagaaatttctcaaccatctcctag

SEQ ID NO: 57585 - DNA, 1620 bp, Artificial Sequence
  derived and/or modified sequence
atgccatttaaagcattcgataccttcaaagagaagatcctgaagccaggcaaggagggagtaaagaacgcggtgggagactccctgggaattctccagaggaagattgatggaactaccgaggaagaagataatattgagctgaacgaagaaggtaggcctgtgcagacatcaaggccaagtccccctctctgcgattgccattgttgtggtctccctaaacggtacataatagccataatgtcgggtctgggattttgcattagcttcgggatcagatgtaaccttggggtcgccatagttgagatggtgaacaacagtaccgtgtacgttgatgggaagccagagatacagacagcccaattcaactgggacccagagacagtcgggttaattcacgggtcttttttctggggttatattatgacacagattcccggtggcttcatctccaacaagtttgccgcaaatcgcgtctttggagctgccatcttcctaacctcaactctgaatatgttcatacctagcgctgctagagtgcattacggttgcgtcatgtgcgttcggatcttgcagggtcttgttgagggcgtgacttaccctgcttgtcacggcatgtggtccaagtgggccccaccgctcgaacggtccaggctcgctacaacttccttctgtggaagttatgcaggggctgtcgtggctatgcccctggcgggtgtgctagtgcagtacatcggatggtcttctgtgttttatatctatggtatgttcggcatcatttggtacatgttctggctgctgcaggcttatgagtgccctgcagcacaccctactattagcaacgaagaaaagacatatatcgagaccagtattggagagggcgctaatgtcgtgagcctctcggtgggcctgctgtccgctgtaccacatatggtgatgactatcgtggtccccatcgggggacagctggctgactatttgcggtcacggcaaatcctgaccaccacagccgttcgcaaaatcatgaattgcggtgggtttggaatggaagctactttgctcctggtggttggcttctctcacactaaaggagttgctatctcatttctggtgctggcagtgggcttttcagggtttgccatcagcggtttcaatgtgaatcatttggatattgcaccgagatacgcatccattctgatgggtatctcaaacggcgtggggacattatctggaatggtgtgtcctttaatcgtaggggcaatgacccgacacaagacacgagaggagtggcaaaacgtctttttgatagccgcactggttcactactcaggagttattttctatggggtgttcgcctccggtgagaaacaagagtgggccgatcccgagaacctaagcgaggaaaagtgtggtattatcgatcaggacgagctggcggaggagattgagctgaatcatgagagcttcgctagcccgaaaaaaaaaatgagctatggcgcaacctcacagaattgtgaagtgcagaaaaaggagtggaaaggtcaacgaggagccacccttgacgaagaggagctgacctcctatcagaatgaagaaagaaatttctcaaccatctcttag

SEQ ID NO: 57586 - DNA, 1737 bp, Artificial Sequence
  derived and/or modified sequence
gctcagaggtgcccctcattcaaaatgccttttaaagcatttgataccttcaaagaaaaaattctgaaacctgggaaggaaggagtgaagaacgccgtgggagattctttgggaattttacaaagaaaaatcgatgggacaactgaggaagaagataacattgagctgaatgaagaaggaaggccggtgcagacgtccaggccaagccccccactctgcgactgccactgctgcggcctccccaagcgttacatcattgctatcatgagtgggctgggattctgcatttcctttgggatccggtgcaatcttggagttgccattgtggaaatggtcaacaatagcaccgtatatgttgatggaaaaccggaaattcagacagcacagtttaactgggatccagaaacagtgggccttatccatggatcttttttctggggctatattatgacacaaattccaggtggtttcatttcaaacaagtttgctgctaacagggtctttggagctgccatcttcttaacatcgactctgaacatgtttattccctctgcagccagagtgcattacggatgcgtcatgtgtgtcagaattctgcaaggtttagtggagggtgtgacctacccagcctgccatgggatgtggagtaagtgggcaccacctttggagagaagccgactggccacaacctctttttgtggttcctatgcaggggcagtggttgccatgcccctggctggggtgttggtgcagtacattggatggtcctctgtcttttatatttatggcatgtttgggattatttggtacatgttttggctgttgcaggcctatgagtgcccagcagctcatccaacaatatccaatgaggagaagacctatatagagacaagcataggagagggggccaacgtggttagtctaagtgtgggtctcttgtcagcagtcccacacatggttatgacaatcgttgtacctattggaggacaattggctgattatttaagaagcagacaaattttaaccacaactgctgtcagaaaaatcatgaactgtggaggttttggcatggaggcaaccttactcctggtggttggcttttcgcataccaaaggggtggctatctcctttctggtacttgctgtaggatttagtggcttcgctatttcaggttttaatgtcaaccacctggacattgccccacgctatgccagcattctcatggggatctcaaacggagtgggaaccctctctggaatggtctgtcccctcattgtcggtgcaatgaccaggcacaagacccgtgaagaatggcagaatgtgttcctcatagctgccctggtgcattacagtggtgtgatcttctatggggtctttgcttctggggagaaacaggagtgggctgacccagagaatctctctgaggagaaatgtggaatcattgaccaggacgaattagctgaggagatagaactcaaccatgagagttttgcgagtcccaaaaagaagatgtcttatggagccacctcccagaattgtgaagtccagaagaaggaatggaaaggacagagaggagcgacccttgatgaggaagagctgacatcctaccagaatgaagagagaaacttctcaactatatcctaatgtctgagaggcacttctgtcttctccttactttagaaacagaaagtatccatacctattgcctttcttgtagcccagcttgccagaggtcca

SEQ ID NO: 57587 - DNA, 1620 bp, Artificial Sequence
  derived and/or modified sequence
atgcccttcaaggccttcgacaccttcaaggagaagatcctgaagcccggcaaggagggcgtgaagaacgccgtgggcgacagcctgggcatcctgcagagaaagatcgacggcaccaccgaggaggaggacaacatcgagctgaacgaggagggcagacccgtgcagaccagcagacccagcccccccctgtgcgactgccactgctgcggcctgcccaagagatacatcatcgccatcatgagcggcctgggcttctgcatcagcttcggcatcagatgcaacctgggcgtggccatcgtggagatggtgaacaacagcaccgtgtacgtggacggcaagcccgagatccagaccgcccagttcaactgggaccccgagaccgtgggcctgatccacggcagcttcttctggggctacatcatgacccagatccccggcggcttcatcagcaacaagttcgccgccaacagagtgttcggcgccgccatcttcctgaccagcaccctgaacatgttcatccccagcgccgccagagtgcactacggctgcgtgatgtgcgtgagaatcctgcagggcctggtggagggcgtgacctaccccgcctgccacggcatgtggagcaagtgggccccccccctggagagaagcagactggccaccaccagcttctgcggcagctacgccggcgccgtggtggccatgcccctggccggcgtgctggtgcagtacatcggctggagcagcgtgttctacatctacggcatgttcggcatcatctggtacatgttctggctgctgcaggcctacgagtgccccgccgcccaccccaccatcagcaacgaggagaagacctacatcgagaccagcatcggcgagggcgccaacgtggtgagcctgagcgtgggcctgctgagcgccgtgccccacatggtgatgaccatcgtggtgcccatcggcggccagctggccgactacctgagaagcagacagatcctgaccaccaccgccgtgagaaagatcatgaactgcggcggcttcggcatggaggccaccctgctgctggtggtgggcttcagccacaccaagggcgtggccatcagcttcctggtgctggccgtgggcttcagcggcttcgccatcagcggcttcaacgtgaaccacctggacatcgcccccagatacgccagcatcctgatgggcatcagcaacggcgtgggcaccctgagcggcatggtgtgccccctgatcgtgggcgccatgaccagacacaagaccagagaggagtggcagaacgtgttcctgatcgccgccctggtgcactacagcggcgtgatcttctacggcgtgttcgccagcggcgagaagcaggagtgggccgaccccgagaacctgagcgaggagaagtgcggcatcatcgaccaggacgagctggccgaggagatcgagctgaaccacgagagcttcgccagccccaagaagaagatgagctacggcgccaccagccagaactgcgaggtgcagaagaaggagtggaagggccagagaggcgccaccctggacgaggaggagctgaccagctaccagaacgaggagagaaacttcagcaccatcagctag

SEQ ID NO: 57588 - protein, 501 aa, Artificial Sequence
  derived and/or modified sequence
MRSSLAPGVWFFRAFSRDSWFRGLILLLTFLIYACYHMSRKPISIVKSRLHQNCSEQIKPINDTHSLNDTMWCSWAPFDKDNYKELLGGVDNAFLIAYAIGMFISGVFGERLPLRYYLSAGMLLSGLFTSLFGLGYFWNIHELWYFVVIQVCNGLVQTTGWPSVVTCVGNWFGKGKRGFIMGIWNSHTSVGNILGSLIAGIWVNGQWGLSFIVPGIITAVMGVITFLFLIEHPEDVDCAPPQHHGEPAENQDNPEDPGNSPCSIRESGLETVAKCSKGPCEEPAAISFFGALRIPGVVEFSLCLLFAKLVSYTFLYWLPLYIANVAHFSAKEAGDLSTLFDVGGIIGGIVAGLVSDYTNGRATTCCVMLILAAPMMFLYNYIGQDGIASSIVMLIICGGLVNGPYALITTAVSADLGTHKSLKGNAKALSTVTAIIDGTGSIGAALGPLLAGLISPTGWNNVFYMLISADVLACLLLCRLVYKEILAWKVSLSRGSGYKEI

SEQ ID NO: 57589 - DNA, 1506 bp, Artificial Sequence
  derived and/or modified sequence
atgagaagcagcctggcccccggcgtgtggttcttcagagccttcagcagagacagctggttcagaggcctgatcctgctgctgaccttcctgatctacgcctgctaccacatgagcagaaagcccatcagcatcgtgaagagcagactgcaccagaactgcagcgagcagatcaagcccatcaacgacacccacagcctgaacgacaccatgtggtgcagctgggcccccttcgacaaggacaactacaaggagctgctgggcggcgtggacaacgccttcctgatcgcctacgccatcggcatgttcatcagcggcgtgttcggcgagagactgcccctgagatactacctgagcgccggcatgctgctgagcggcctgttcaccagcctgttcggcctgggctacttctggaacatccacgagctgtggtacttcgtggtgatccaggtgtgcaacggcctggtgcagaccaccggctggcccagcgtggtgacctgcgtgggcaactggttcggcaagggcaagagaggcttcatcatgggcatctggaacagccacaccagcgtgggcaacatcctgggcagcctgatcgccggcatctgggtgaacggccagtggggcctgagcttcatcgtgcccggcatcatcaccgccgtgatgggcgtgatcaccttcctgttcctgatcgagcaccccgaggacgtggactgcgcccccccccagcaccacggcgagcccgccgagaaccaggacaaccccgaggaccccggcaacagcccctgcagcatcagagagagcggcctggagaccgtggccaagtgcagcaagggcccctgcgaggagcccgccgccatcagcttcttcggcgccctgagaatccccggcgtggtggagttcagcctgtgcctgctgttcgccaagctggtgagctacaccttcctgtactggctgcccctgtacatcgccaacgtggcccacttcagcgccaaggaggccggcgacctgagcaccctgttcgacgtgggcggcatcatcggcggcatcgtggccggcctggtgagcgactacaccaacggcagagccaccacctgctgcgtgatgctgatcctggccgcccccatgatgttcctgtacaactacatcggccaggacggcatcgccagcagcatcgtgatgctgatcatctgcggcggcctggtgaacggcccctacgccctgatcaccaccgccgtgagcgccgacctgggcacccacaagagcctgaagggcaacgccaaggccctgagcaccgtgaccgccatcatcgacggcaccggcagcatcggcgccgccctgggccccctgctggccggcctgatcagccccaccggctggaacaacgtgttctacatgctgatcagcgccgacgtgctggcctgcctgctgctgtgcagactggtgtacaaggagatcctggcctggaaggtgagcctgagcagaggcagcggctacaaggagatctag

SEQ ID NO: 57590 - DNA, 1506 bp, Artificial Sequence
  derived and/or modified sequence
atgcgttcgtcactagccccaggagtgtggttcttccgcgccttcagtcgagacagctggttccgaggattgattctcctgttgacatttctcatctacgcctgctatcatatgagccgcaagcctatctcaattgtgaagtccaggctgcaccagaactgcagtgaacagattaaacctataaatgatacacacagtttgaacgatacaatgtggtgttcctgggccccatttgacaaggataactacaaggagctacttggtggggttgacaacgcatttctgattgcttatgccattggcatgtttatttccggcgtcttcggagagcgcttgccactccgctactacttatccgccgggatgttgctgagcgggctgttcacatcactgtttggcctcggctacttttggaacatccacgagctgtggtatttcgtcgtgattcaagtctgcaacggacttgtccagacgacagggtggcccagcgtggttacatgtgttggcaattggtttggcaaaggtaaaagaggatttataatggggatctggaattcccacacatccgtgggcaacatcctggggtcccttatcgctggtatctgggtaaacggccagtgggggctgagcttcatcgttccgggcattattactgctgtgatgggcgtcatcacatttctcttcctgatcgaacaccccgaggatgtcgattgtgcacctccacagcaccatggggagccagctgaaaatcaggataatccggaggaccccggtaattcaccgtgcagtattagagaatccgggctggagaccgttgcaaaatgtagtaaagggccctgcgaggaaccagccgcaattagtttctttggggccctgaggataccaggggttgtggaattctctctctgtctgttgttcgctaagcttgtgtcctatacatttctctattggcttccactatatatagccaacgttgctcacttctcggctaaggaggccggggacttgagcacattattcgatgttggtgggatcattggcgggatcgtcgccggcctggtgtcggattacaccaatggccgcgctaccacatgctgcgtgatgctgattttagccgccccaatgatgttcctctacaattacataggccaggatgggattgcttcgagcattgttatgctcatcatttgtggaggccttgttaacgggccgtacgctttgataaccacagcagtgagtgccgatctgggcactcacaaatccctgaaaggaaacgctaaggcgctgagcaccgtgacggcaatcattgatgggacaggatcgatcggggctgctctaggcccactgctcgcagggctgatttcacctacggggtggaacaacgtgttctacatgttaatttctgccgatgttctggcttgtcttctgctttgccgactggtgtataaggaaattctggcatggaaggtgtccctgagccgaggttcaggatataaggaaatctag

SEQ ID NO: 57591 - DNA, 1506 bp, Artificial Sequence
  derived and/or modified sequence
atgaggagcagcctggcccctggggtgtggttcttccgggccttcagccgggacagctggttccggggcctcatcctgctgctgaccttcctgatctatgcctgctaccacatgagcaggaagcccatcagcatcgtgaagagccggctgcaccagaactgcagcgagcagatcaagcccatcaatgacacccacagcctgaatgacaccatgtggtgctcctgggccccctttgacaaggacaactacaaggagctgctgggcggcgtggacaatgccttcctgattgcctatgccatcggcatgttcatctctggagtgtttggagagcggctgcccctgcgctactacctgtctgctggcatgctgctgagcggcctcttcaccagcctgtttggcctgggctacttctggaacatccacgagctgtggtactttgtggtgatccaggtgtgcaatggcctggtgcagaccaccggctggcccagcgtggtgacctgtgtgggcaactggtttgggaagggcaagaggggcttcatcatgggcatctggaacagccacacctctgtgggcaacatcctgggcagcctgattgctggcatctgggtgaatggccagtggggcctgtccttcatcgtgcccggcatcatcacagctgtgatgggcgtcatcaccttcctgttcctgattgagcacccagaagatgtggactgtgccccaccccagcaccacggggagcctgctgagaaccaggacaacccagaagatcctggcaacagcccctgcagcatccgggagagcggcctggagaccgtggccaagtgcagcaagggcccctgtgaggagcctgctgccatctccttctttggagccctgcgcatccctggggtggtggagttcagcctgtgcctgctgtttgccaagctggtgtcctacaccttcctgtactggctgcccctgtacatcgccaacgtggcccacttcagcgccaaggaggccggggacctgagcaccctgtttgatgtgggcggcatcatcggcggcatcgtggccggcctggtgtctgactacaccaacggccgggccaccacctgctgcgtgatgctgatcctggccgcccccatgatgttcctgtacaactacatcggccaggacggcatcgccagcagcatcgtgatgctgatcatctgtggcggcctggtgaatggcccctatgccctgatcaccacagctgtgtctgctgacctgggcacccacaagagcctgaagggaaatgccaaggccctgagcacagtgacagccatcattgatggcaccggcagcatcggggccgccctgggccccctgctggccggcctcatcagccccaccggctggaacaacgtgttctacatgctgatctctgcagatgtgctggcctgcctgctgctgtgccgcctggtgtacaaggagatcctggcctggaaggtgtccctgagccggggcagcggctacaaggagatctag

SEQ ID NO: 57592 - DNA, 1506 bp, Artificial Sequence
  derived and/or modified sequence
atgcggagcagcctggcccccggcgtgtggttcttccgggccttctcaagagacagttggtttagaggcctgatccttctattgacgtttttgatttatgcctgttatcacatgtcccggaaaccgatttccattgtgaaatccaggcttcaccagaactgttcagagcaaattaaaccaataaacgatacgcactcacttaatgataccatgtggtgtagttgggccccattcgataaagacaactataaggagctccttggcggtgtcgacaatgctttccttatagcctatgccatcgggatgtttatctctggagttttcggggagcgtctgccccttagatactacctctctgctgggatgctactcagcggtctgtttacaagcctcttcgggctgggctacttctggaacatccacgaactgtggtattttgtcgtcatccaggtgtgtaacggcctcgttcagacaacaggctggccctcagtcgtcacatgcgtaggcaactggtttgggaaagggaagcggggattcatcatgggaatctggaactcacacaccagcgtgggcaacattctagggtcactgattgctggcatctgggtaaacggacagtgggggctgagcttcatcgtgcccgggattatcaccgccgtgatgggagtgatcacttttcttttcctcatcgagcaccccgaggacgttgactgtgccccaccacagcaccacggggaaccggccgagaatcaagacaaccccgaggatccagggaactccccctgttctattcgggagtccggcctcgaaacagtcgcaaaatgctcgaagggcccatgtgaagagccagccgccatcagcttcttcggcgctctccggatcccaggtgtcgtggagttctccctgtgtcttctctttgctaaattggtgtcctacactttcctgtattggttgcctctttacattgctaatgtggcccacttcagcgccaaagaagcgggtgatctgtccaccctgttcgacgtaggcggcattatcggaggcattgttgccggacttgtgtcagactacacgaacgggcgcgctactacttgctgtgttatgctcatactggccgcaccgatgatgtttctttacaattacataggccaagacggaattgccagcagcatagtcatgctgatcatctgtggcggacttgtaaacgggccttatgcactcattaccacagctgtcagcgccgatctggggacacacaaatcactgaaggggaatgccaaggcactttccactgtgactgccattattgatggcacaggcagtatcggggccgccctcggtcctttgctagcaggcctcatctcacccaccggatggaataatgtgttttacatgctaatctccgctgatgtgctggcctgtttgctgctgtgtagactcgtgtacaaggaaatccttgcatggaaggtctcgcttagccgggggtctggttataaggaaatttag

SEQ ID NO: 57593 - DNA, 1506 bp, Artificial Sequence
  derived and/or modified sequence
atgagatcttccctagcgccaggtgtgtggttcttcagagctttttctcgcgactcctggttccggggactgatactgctactcactttcctcatctatgcttgctatcacatgtcccgcaagccaatctctattgtcaagtcgcgccttcatcagaactgttctgaacagattaaacccattaatgacactcactcactcaacgatacaatgtggtgttcctgggcccctttcgacaaggacaactataaagagcttctggggggagtggacaacgcattcctgatcgcatatgctataggtatgttcatctccggggtgttcggcgagcggctgccactaaggtactacctgagtgcaggcatgttactgagcgggttgttcacttcactgtttggcttgggctacttctggaatatccacgaactttggtactttgtagtaatccaggtgtgcaatggcctcgtgcaaactacaggctggcctagcgttgtgacctgcgtcggcaactggttcggcaagggcaaaagggggtttattatgggaatttggaattcacataccagcgtcggaaatatcctcggctcattgatcgctgggatatgggtcaacggacaatggggtctcagcttcattgttccagggattatcaccgcagtgatgggagtaataacttttctgttcctcatcgagcatccggaggacgtcgactgtgccccaccccagcaccacggagagccggcagagaatcaggacaaccccgaggaccctgggaacagtccgtgtagcataagggagtctggtttagaaacagtggccaagtgttccaaggggccatgtgaggagcctgcagccataagttttttcggggcactccgtattccgggagtcgtggagttcagcctttgcttactgtttgctaaattggtcagctatactttcctctactggctccctttgtatattgctaacgtcgcacatttttcagcaaaggaggctggtgatctgtccactctctttgacgtcggcggtatcatcggcggaattgtggccggactagtgtctgattatacaaatggaagagccaccacatgttgtgtcatgctgatactagcagcacctatgatgtttctctacaattatattggtcaagacgggattgcttcatctatagtgatgctgattatctgtgggggactcgtcaacgggccatacgccctcattaccaccgcggtgtcagccgacctcgggacccataagtctcttaaaggaaatgctaaagccctctcaaccgttactgctatcatcgatggcactggctcaatcggtgcggcactcgggccactgctcgctggcctgatcagcccaacggggtggaacaatgttttctatatgctgatcagtgccgatgtgcttgcctgcctgctgctctgtagactcgtctacaaggagatactcgcgtggaaagtgtcgctgtcgaggggatctggctacaaggaaatttag

SEQ ID NO: 57594 - DNA, 2908 bp, Artificial Sequence
  derived and/or modified sequence
agaaagtgcagggcggaatgaggagccccagcacctcagagctgtcgggcagtggcggggaagcaaagcacaggagcgctgtggtgccagcggccgggctagggacgactggcgggtttgcgctggacccgaccccgagggcgggcgcaagggggcgggcgctgccgtactcaggccgcggggccagggcgggccggccggcggggcatttaaaccccgctgacagccagtccagcccgggacacgcgcccagctctgtagcctcctccgtcgactcagccttaggtaccggtcaggcaaaatgcggtcctccctggctccgggagtctggttcttccgggccttctccagggacagctggttccgaggcctcatcctgctgctgaccttcctaatttacgcctgctatcacatgtccaggaagcctatcagtatcgtcaagagccgtctgcaccagaactgctcggagcagatcaaacccatcaatgatactcacagtctcaatgacaccatgtggtgcagctgggccccatttgacaaggacaactataaggagttactagggggcgtggacaacgccttcctcatcgcctatgccatcggcatgttcatcagtggggtttttggggagcggcttccgctccgttactacctctcagctggaatgctgctcagtggccttttcacctcgctctttggcctgggatatttctggaacatccacgagctctggtactttgtggtcatccaggtctgtaatggactcgtccagaccacaggctggccctctgtggtgacctgtgttggcaactggttcgggaaggggaagcgggggttcatcatgggcatctggaattcccacacatctgtgggcaacatcctgggctccctgatcgccggcatctgggtgaacgggcagtggggcctgtcgttcatcgtgcctggcatcattactgccgtcatgggcgtcatcaccttcctcttcctcatcgaacacccagaagatgtggactgcgcccctcctcagcaccacggtgagccagctgagaaccaggacaaccctgaggaccctgggaacagtccctgctctatcagggagagcggccttgagactgtggccaaatgctccaaggggccatgcgaagagcctgctgccatcagcttctttggggcgctccggatcccaggcgtggtcgagttctctctgtgtctgctgtttgccaagctggtcagttacaccttcctctactggctgcccctctacatcgccaatgtggctcactttagtgccaaggaggctggggacctgtctacactcttcgatgttggtggcatcataggcggcatcgtggcagggctcgtctctgactacaccaatggcagggccaccacttgctgtgtcatgctcatcttggctgcccccatgatgttcctgtacaactacattggccaggacgggattgccagctccatagtgatgctgatcatctgtgggggcctggtcaatggcccatacgcgctcatcaccactgctgtctctgctgatctggggactcacaagagcctgaagggcaacgccaaagccctgtccacggtcacggccatcattgacggcaccggctccataggtgcggctctggggcctctgctggctgggctcatctcccccacgggctggaacaatgtcttctacatgctcatctctgccgacgtcctagcctgcttgctcctttgccggttagtatacaaagagatcttggcctggaaggtgtccctgagcagaggcagcgggtataaagaaatatgaggccccaattggaacagcagcatggagggtcccagttgggtccccaacgtgctccccatgggcaagacaatggaaacttccacaagcagggaaggcaaaccctctttattgaacattagccagcccagcccagaccccagggctgcctaaggacacagagattctccatgggaaggggactgccaagcatgaggaaatagaagattcaggggcctgagctctggaagctgcaagcaaaagggatgggactagggctgagttgtgtctccattttgataaggaaaggatatgctcagactcttgcttgttcagattccaagacagaaggcttcacaaggccaacgcctggaaaatgggcatctctccttcccatgttaagctttaacctctgtaatctgcctgtatctataggtgggcatctcactccaccaaaggagcccagcctctctttgtccctctatccatgcaacagtcttctctgtgcatttccccaagctgggccctcttctactctccatttaggcctgttgataactccattacccgcccatcactgctgttcctccagggccagcactcgggcgaggcaggggagctgccttcggtacataatttgaaggggcactccctcttgggcacatgccggccctgagtgcctcccttgcctcactctgatcctggccccataatgtcctcagtggaaggtgatgggggccggtgctgtggggagagtagaaagaggggttggcatgactaaaaataccagtatgtgtattaagtattttgagaatgaaatgccaaggagtgcctactatatgccagctctaggaatggagtagacagtggacacaagaaggacttacgccctgagcacaggtgccaatggtgacaagactggcaagacgtgagggcatgaatggttcattcaggcagctgctgcagatgtggtcacctggtgccatctgctgctcccttttccacttttctatgtcctccttccaccccaagtcccggatcactcgctgttttctggctagctcttggcatctccatctgagcctaaagttgcccactggcaccaatagattctgtttgacctgc

SEQ ID NO: 57595 - protein, 853 aa, Artificial Sequence
  derived and/or modified sequence
MSLSEEQARSFLDQNPDFARQYFGKKLSPENVAAACEDGCPPDCDSLRDLCQVEESTALLELVQDMQESINMERVVFKVLRRLCTLLQADRCSLFMYRQRNGVAELATRLFSVQPDSVLEDCLVPPDSEIVFPLDIGVVGHVAQTKKMVNVEDVAECPHFSSFADELTDYKTKNMLATPIMNGKDVVAVIMAVNKLNGPFFTSEDEDVFLKYLNFATLYLKIYHLSYLHNCETRRGQVLLWSANKVFEELTDIERQFHKAFYTVRAYLNCERYSVGLLDMTKEKEFFDVWSVLMGESQPYSGPRTPDGREIVFYKVIDYVLHGKEEIKVIPTPSADHWALASGLPSYVAESGFICNIMNASADEMFKFQEGALDDSGWLIKNVLSMPIVNKKEEIVGVATFYNRKDGKPFDEQDEVLMESLTQFLGWSVMNTDTYDKMNKLENRKDIAQDMVLYHVKCDRDEIQLILPTRARLGKEPADCDEDELGEILKEELPGPTTFDIYEFHFSDLECTELDLVKCGIQMYYELGVVRKFQIPQEVLVRFLFSISKGYRRITYHNWRHGFNVAQTMFTLLMTGKLKSYYTDLEAFAMVTAGLCHDIDHRGTNNLYQMKSQNPLAKLHGSSILERHHLEFGKFLLSEETLNIYQNLNRRQHEHVIHLMDIAIIATDLALYFKKRAMFQKIVDESKNYQDKKSWVEYLSLETTRKEIVMAMMMTACDLSAITKPWEVQSKVALLVAAEFWEQGDLERTVLDQQPIPMMDRNKAAELPKLQVGFIDFVCTFVYKEFSRFHEEILPMFDRLQNNRKEWKALADEYEAKVKALEEKEEEERVAAKKGTEICNGGPAPKSSTCCIL

SEQ ID NO: 57596 - DNA, 2562 bp, Artificial Sequence
  derived and/or modified sequence
atgagtctctccgaggagcaggcccggagctttctggatcagaatcccgactttgcacgtcagtattttggaaagaaactatctccggagaatgtcgcggccgcatgcgaggacggctgcccccccgattgtgactcccttcgcgacctctgtcaagtcgaggagtcgaccgccctgctcgagttagtccaggacatgcaagagtccatcaatatggaacgcgtcgtctttaaggtattgaggagactctgcacactgctgcaggctgatcgatgcagcctgtttatgtacaggcagagaaacggagttgccgagctcgctacacgtttgttttctgtgcagcctgactcggtccttgaggactgcctcgtcccacctgactctgagatcgtatttcctctggatatcggtgtggtcggtcacgtggctcagaccaaaaagatggtgaacgtggaagatgtggccgagtgcccacactttagcagcttcgcggatgagctgaccgattataagacaaaaaatatgcttgccacccctattatgaacggcaaagatgtcgtcgccgtgattatggccgtgaacaaacttaacggaccttttttcacctctgaagatgaggacgtgttcctgaaataccttaatttcgcgacgctttacctcaaaatataccacctgtcctacctgcataattgtgaaactcggcggggccaggtgctgctgtggagcgccaacaaggtgtttgaagaactgactgacattgagcggcagttccacaaggcgttttatacggtgagagcgtacctcaattgcgaacgatattctgtcggcctcttggacatgactaaagagaaagagttctttgacgtgtggagcgtcctgatgggtgagtcccagccatattccgggcctagaacaccggacggacgcgaaatcgttttttataaggtgattgactatgtgctacatggcaaagaggaaataaaggtcatccccaccccgtctgccgaccactgggccttggcatcagggctgccctcctacgtagcagaatctgggttcatttgcaatattatgaacgcttcggcggatgagatgtttaagttccaggaaggagccctagatgatagtggctggcttatcaagaatgtgctatctatgcccatcgtgaacaagaaggaggaaattgtaggtgtggccaccttttataatagaaaggatggcaagccctttgacgaacaagacgaggtgctcatggagtccctaacacagtttctcggctggtccgtcatgaatacagacacctacgataaaatgaataaactggagaataggaaggacatagcacaggacatggtactgtaccatgttaaatgtgacagagatgaaatacagctgattttgcccacacgggctcggctaggcaaggaacctgcagactgtgacgaggatgagctgggcgaaattcttaaggaggagctgcctggacctacaacgttcgatatctacgaattccacttttccgatctggagtgcaccgagctggacctggtgaagtgtggcatccagatgtattacgagttgggcgttgtacggaaatttcagataccccaggaggtgttagtgagatttctcttttcaatctcaaaagggtataggagaatcacatatcacaactggagacatgggtttaacgtggcccaaactatgtttacgcttttgatgaccggaaaacttaaatcatattacacagatctggaagcgtttgctatggtgacggcaggcctatgtcatgatattgaccaccgaggcacaaacaacttgtatcagatgaagtcacagaatcccctagctaagttgcatgggagttctattctcgaacggcatcacctggaattcggaaagtttctactcagcgaagagactctcaatatttatcagaatctaaatcgacgccaacatgaacacgtcatacacctgatggacattgcaatcatcgccaccgacctagcactttacttcaagaaaagagcgatgttccaaaagatcgtggacgaatcaaagaattaccaagacaagaagagttgggtcgaatacctgtcacttgaaaccacacggaaagagattgtcatggcaatgatgatgacagcctgtgacctcagcgctattacaaaaccatgggaagtacagtccaaggtggcattgcttgtagcagccgagttctgggagcagggcgatctggagcggacggtgctggatcagcagcccattcctatgatggatcgcaacaaagccgcagagttacccaagttgcaggtgggctttatcgacttcgtgtgcacatttgtgtataaggaattctcccgttttcacgaggaaattctgccgatgtttgatcggctgcaaaacaaccgtaaagagtggaaagcattggctgacgaatatgaggccaaagtcaaagccctggaggagaaggaagaagaggagcgggttgctgcgaagaagggcaccgaaatatgcaatggagggcccgcgccaaaatcttccacgtgttgcatcctgtag

SEQ ID NO: 57597 - DNA, 2562 bp, Artificial Sequence
  derived and/or modified sequence
atgagcctgtctgaggagcaggcccggagcttcctggaccagaacccagactttgcccggcagtactttgggaagaagctgagcccagaaaatgtggccgccgcctgtgaagatggctgccccccagactgtgacagcctgcgggacctgtgccaggtggaggagagcacagccctgctggagctggtgcaggacatgcaggagagcatcaacatggagcgggtggtgttcaaggtgctgcggcggctgtgcaccctgctgcaggccgaccgctgcagcctcttcatgtaccggcagagaaatggagtggccgagctggccaccaggctcttctctgtgcagccagattctgtgctggaggactgcctggtgcccccagacagcgagatcgtgttccccctggacatcggcgtggtgggccacgtggcccagaccaagaagatggtgaatgtggaggatgtggccgagtgcccccacttcagcagctttgctgatgagctgacagactacaagaccaagaacatgctggccacccccatcatgaatggcaaggatgtggtggccgtcatcatggctgtgaacaagctgaatggccccttcttcaccagtgaagatgaagatgtgttcctgaagtacctgaactttgccaccctgtacctgaagatctaccacctgagctacctgcacaactgtgagacccggcggggccaggtgctgctgtggagcgccaacaaggtgtttgaggagctgacagacatcgagcggcagttccacaaggccttctacacagtgcgggcctacctgaactgtgagcgctacagcgtgggcctgctggacatgaccaaggagaaggagttctttgatgtgtggagcgtgctgatgggagagagccagccctacagcggccccaggaccccagatggccgggagatcgtgttctacaaggtgattgattatgtgctgcacggcaaggaggagatcaaggtgatccccacccccagcgctgaccactgggccctggccagcggcctgcccagctatgtggccgagagcggcttcatctgcaacatcatgaatgccagcgcagatgagatgttcaagttccaggagggcgccctggatgacagcggctggctgatcaagaatgtgctgtccatgcccatcgtgaacaagaaggaggagatcgtgggcgtggccaccttctacaacaggaaggatggcaagccctttgatgagcaggatgaggtgctgatggagagcctgacccagttcctgggctggagcgtgatgaacacagacacctatgacaagatgaacaagctggagaacaggaaggacatcgcccaggacatggtgctgtaccacgtgaagtgtgacagagatgagatccagctgatcctgcccacccgggcccggctgggcaaggagcctgctgactgtgatgaagatgagctgggggagatcctgaaggaggagctgcccggccccaccacctttgacatctatgagttccacttcagtgacctggagtgcacagagctggacctggtgaagtgtggcatccagatgtactatgagctgggcgtggtgaggaagttccagatcccccaggaggtgctggtgcgcttcctgttcagcatcagcaagggctaccgccgcatcacctaccacaactggaggcatggcttcaacgtggcccagaccatgttcaccctgctgatgaccgggaagctgaagagctactacacagacctggaggcctttgccatggtgacagctggcctgtgccacgacatcgaccaccggggcaccaacaacctgtaccagatgaagagccagaaccccctggccaagctgcacggcagcagcatcctggagcggcaccacctggagtttgggaagttcctgctgtctgaggagaccctgaacatctaccagaacctgaacagacggcagcatgaacatgtgatccacctgatggacatcgccatcatcgccacagacctggccctgtacttcaagaagagggccatgttccagaagatcgtggatgagagcaagaactaccaggacaagaagtcctgggtggagtacctgagcctggagaccaccaggaaggagatcgtgatggccatgatgatgacagcctgtgacctgagcgccatcaccaagccctgggaggtgcagagcaaggtggccctgctggtggccgctgagttctgggagcagggcgacctggagaggacagtgctggaccagcagcccatccccatgatggacaggaacaaggctgctgagctgcccaagctgcaggtgggcttcatcgactttgtgtgcacctttgtgtacaaggagttcagccgcttccacgaggagatcctgcccatgtttgaccggctgcagaacaacaggaaggagtggaaggccctggctgatgaatatgaggccaaggtgaaggccctggaggagaaggaggaggaggagcgggtggccgccaagaagggcacagagatctgcaatggaggccctgcccccaagagcagcacctgctgcatcctgtag

SEQ ID NO: 57598 - DNA, 2562 bp, Artificial Sequence
  derived and/or modified sequence
atgagcctgagcgaggagcaggcccggagcttcctggaccagaaccctgatttcgccagacagtacttcggaaagaagctttctcctgagaatgtagcagcggcctgcgaggatgggtgtcctcctgactgtgattcccttcgagatttatgccaggtggaagagtcaactgctctcttggaactcgtgcaggacatgcaggagtctattaacatggaacgtgttgtgtttaaggtgcttaggcgactttgcaccctacttcaggcagatcgatgcagcctgtttatgtacagacagcgtaatggcgtggccgagctggccacacgcctctttagcgtgcagccagattccgtcttggaagactgtttggtgcccccagactctgagatcgtgttccctttggacatcggggtggttggccatgtggctcagacaaagaagatggtgaatgtggaagatgttgcggagtgcccacactttagctccttcgccgacgaactgactgactacaagacaaagaatatgttggctacccccatcatgaacggtaaagacgtggtcgccgtgattatggctgtgaacaagctgaacggccccttctttacaagtgaagatgaggatgtgtttctcaagtatctcaatttcgctaccctttacttgaagatctatcacctgagctatctccacaactgcgaaacccggcgcggccaggtattgctgtggagtgctaataaagtctttgaagaactgactgacattgagcggcagttccacaaggcattctacactgtgcgtgcatatttgaactgtgagagatattcagtgggcctgttggacatgaccaaagagaaggagttcttcgacgtgtggtcggttctaatgggtgagagtcagccttattccggcccccgtactccagatggacgtgagatcgttttctataaagtgatcgactatgtgctccacggcaaggaggagataaaagtgatccctacaccatctgccgatcactgggcactggccagcggactcccttcctacgtggccgagtccggttttatttgcaacatcatgaatgcatcagcagatgaaatgtttaagtttcaggagggagctctggatgacagcggatggctgattaaaaatgtcctctccatgccaattgtcaacaaaaaagaggagatcgtcggagttgctactttctacaaccggaaggatggtaagcctttcgacgagcaggatgaggttctgatggaatccctcacccagttcttgggttggtctgtgatgaataccgacacctatgacaaaatgaataagttggaaaatcggaaagacattgctcaggacatggttttgtatcacgtgaaatgcgatcgcgatgaaatccagctgatcctgcccactcgagcacggctcggcaaagagcctgcagattgcgatgaggacgaacttggggagatcttgaaggaggagctccccggccctactacatttgatatttatgaattccactttagcgatttggagtgtacagagctcgatttagtgaagtgcggcatccagatgtactatgaattgggtgtggtgcgtaaattccagatcccccaagaggtgctagtaaggttcctgttttcgatttccaagggctacaggaggatcacgtatcacaattggcgccacggcttcaatgttgctcaaactatgttcactctgcttatgacagggaagctgaagtcatactataccgatctggaagcctttgcaatggtgacagcgggcctctgtcatgacattgatcaccgaggaacaaacaatctataccagatgaaaagtcaaaaccctcttgcaaagctacacgggtccagcattctagagcgccaccatctggagttcggaaagttcttactcagcgaagagactctgaatatataccagaatttaaatagaagacagcatgagcacgtgattcatttaatggatatcgcaatcatcgctaccgacctcgccctttacttcaagaaacgcgcgatgtttcaaaagatagttgatgagtccaagaactatcaggataaaaaatcatgggtcgagtacttatctctggagacgacacgaaaggagattgttatggccatgatgatgaccgcttgcgatctatcggctatcaccaaaccttgggaagtccagtctaaggtggctttacttgtggctgctgaattctgggagcagggggacctcgaacgtactgtgctggatcagcagccaatccctatgatggaccggaacaaggctgcagagctgcccaaactgcaagtcggctttatcgattttgtatgcacattcgtgtataaggaattcagccgattccatgaggagatcctgcctatgttcgatcgattacaaaataacagaaaagaatggaaggccctggccgatgagtacgaagcaaaagtgaaagctctagaagagaaagaagaagaagagagagtggcggcgaaaaaaggaaccgaaatctgcaatggcggtcctgcaccaaagagttctacttgctgtatcctttag

SEQ ID NO: 57599 - DNA, 2562 bp, Artificial Sequence
  derived and/or modified sequence
atgagtctctcagaagaacaggcccgatcatttctcgaccagaatcccgattttgctagacagtactttggcaaaaaattgtcaccagagaacgtggccgcagcatgcgaagacggctgcccaccagactgtgatagtttgcgcgacttgtgccaagttgaggaatccaccgcactgcttgaactggtccaggacatgcaggaatccataaacatggagagggtcgtgtttaaagtgctgcggcgactttgtacattattgcaagctgacagatgcagcctgttcatgtatcgccagcgtaacggggtggccgagctggcaacccgtctgttttccgtccagcctgatagtgttcttgaggattgcttagtgccccctgacagcgaaattgtgttccccctggatatcggggtagtggggcatgtcgcacagaccaagaagatggtgaatgtggaagacgtggcagagtgcccacatttctccagttttgcagacgagctcacggactataaaaccaaaaatatgctggctaccccgataatgaacggaaaagatgttgttgctgtcatcatggctgttaataaactgaacgggcctttctttacatccgaagacgaggatgtcttcctcaaataccttaatttcgccactctttatttaaaaatataccacctgtcgtatctgcataattgtgaaactcggcgaggccaggttctgctttggtcagcaaacaaagtgttcgaagagctgaccgacatagagagacaattccataaggcgttttataccgttcgggcttatctcaactgcgaaagatacagcgtagggctactggacatgaccaaggagaaggaattttttgatgtttggtccgtgctgatgggcgaatctcaaccatactccggaccacggacccccgacggtagagaaatcgtattttacaaggtcatcgactatgtgctacatggtaaggaagagattaaggtcatccctacaccatccgccgaccactgggccctggcatcaggactgccctcctacgtggcagagagtggcttcatttgtaatatcatgaacgcgtccgcagacgagatgttcaaattccaagaaggagccctggacgattcggggtggctgataaagaacgtgctgtcgatgccaatagtgaataagaaggaggagatagtcggagttgcgaccttctacaatcgaaaggatggaaaacctttcgacgaacaagatgaggttttaatggagagtctcacccagttcctaggctggtccgttatgaacacagatacatacgataaaatgaacaaacttgaaaatcgtaaagatatcgcacaggatatggtgctctaccacgttaaatgcgatcgggacgaaattcagctgatccttcctacccgggctagactggggaaggagccggctgactgtgacgaagacgagctgggagagatcttgaaggaagaactgccaggcccaaccactttcgatatctatgagttccatttctctgacctggaatgcaccgaacttgaccttgtgaaatgtggtatacaaatgtactacgagctgggcgtggtgcgtaaattccaaattccacaggaagtgttggttcgctttctattttccatttccaaagggtaccgaagaataacctaccacaactggcgacacgggttcaacgtggcccagacgatgttcacccttttgatgaccggaaagctgaaatcatactataccgacctggaggcgtttgccatggtcactgccggactgtgccatgacattgatcacaggggtacgaataatctctaccaaatgaaaagccagaacccattggccaagttacacgggtccagtatcctggaaaggcaccatcttgagttcggtaaatttctcctgtctgaggaaacattaaacatctaccagaaccttaatcgtcgtcagcacgagcacgtgatccatctaatggatattgccattattgccactgatctagcgttatacttcaagaaacgggctatgttccaaaagatcgttgacgaatcgaaaaattatcaggacaagaaaagctgggttgagtatttgtccttagagacaactaggaaggaaattgtgatggccatgatgatgaccgcctgcgatctatctgcaatcacaaagccatgggaagtgcagtccaaggttgccctcctggttgccgcagagttttgggagcagggcgacttggagagaacagtccttgatcagcagccaatcccaatgatggaccggaacaaagcagctgagttacccaaactgcaggtaggattcatcgatttcgtgtgcacctttgtatacaaagaattctcacgcttccatgaggaaattctgccgatgttcgatcgtcttcagaacaacaggaaggagtggaaagccttggcggacgaatacgaggctaaagtgaaagcattggaagaaaaggaggaagaagaacgggttgccgctaaaaaaggaaccgaaatttgcaatggcggacctgctcccaagtcttctacttgttgcatcctgtag

SEQ ID NO: 57600 - DNA, 2562 bp, Artificial Sequence
  derived and/or modified sequence
atgagcctgagcgaggagcaggccagaagcttcctggaccagaaccccgacttcgccagacagtacttcggcaagaagctgagccccgagaacgtggccgccgcctgcgaggacggctgcccccccgactgcgacagcctgagagacctgtgccaggtggaggagagcaccgccctgctggagctggtgcaggacatgcaggagagcatcaacatggagagagtggtgttcaaggtgctgagaagactgtgcaccctgctgcaggccgacagatgcagcctgttcatgtacagacagagaaacggcgtggccgagctggccaccagactgttcagcgtgcagcccgacagcgtgctggaggactgcctggtgccccccgacagcgagatcgtgttccccctggacatcggcgtggtgggccacgtggcccagaccaagaagatggtgaacgtggaggacgtggccgagtgcccccacttcagcagcttcgccgacgagctgaccgactacaagaccaagaacatgctggccacccccatcatgaacggcaaggacgtggtggccgtgatcatggccgtgaacaagctgaacggccccttcttcaccagcgaggacgaggacgtgttcctgaagtacctgaacttcgccaccctgtacctgaagatctaccacctgagctacctgcacaactgcgagaccagaagaggccaggtgctgctgtggagcgccaacaaggtgttcgaggagctgaccgacatcgagagacagttccacaaggccttctacaccgtgagagcctacctgaactgcgagagatacagcgtgggcctgctggacatgaccaaggagaaggagttcttcgacgtgtggagcgtgctgatgggcgagagccagccctacagcggccccagaacccccgacggcagagagatcgtgttctacaaggtgatcgactacgtgctgcacggcaaggaggagatcaaggtgatccccacccccagcgccgaccactgggccctggccagcggcctgcccagctacgtggccgagagcggcttcatctgcaacatcatgaacgccagcgccgacgagatgttcaagttccaggagggcgccctggacgacagcggctggctgatcaagaacgtgctgagcatgcccatcgtgaacaagaaggaggagatcgtgggcgtggccaccttctacaacagaaaggacggcaagcccttcgacgagcaggacgaggtgctgatggagagcctgacccagttcctgggctggagcgtgatgaacaccgacacctacgacaagatgaacaagctggagaacagaaaggacatcgcccaggacatggtgctgtaccacgtgaagtgcgacagagacgagatccagctgatcctgcccaccagagccagactgggcaaggagcccgccgactgcgacgaggacgagctgggcgagatcctgaaggaggagctgcccggccccaccaccttcgacatctacgagttccacttcagcgacctggagtgcaccgagctggacctggtgaagtgcggcatccagatgtactacgagctgggcgtggtgagaaagttccagatcccccaggaggtgctggtgagattcctgttcagcatcagcaagggctacagaagaatcacctaccacaactggagacacggcttcaacgtggcccagaccatgttcaccctgctgatgaccggcaagctgaagagctactacaccgacctggaggccttcgccatggtgaccgccggcctgtgccacgacatcgaccacagaggcaccaacaacctgtaccagatgaagagccagaaccccctggccaagctgcacggcagcagcatcctggagagacaccacctggagttcggcaagttcctgctgagcgaggagaccctgaacatctaccagaacctgaacagaagacagcacgagcacgtgatccacctgatggacatcgccatcatcgccaccgacctggccctgtacttcaagaagagagccatgttccagaagatcgtggacgagagcaagaactaccaggacaagaagagctgggtggagtacctgagcctggagaccaccagaaaggagatcgtgatggccatgatgatgaccgcctgcgacctgagcgccatcaccaagccctgggaggtgcagagcaaggtggccctgctggtggccgccgagttctgggagcagggcgacctggagagaaccgtgctggaccagcagcccatccccatgatggacagaaacaaggccgccgagctgcccaagctgcaggtgggcttcatcgacttcgtgtgcaccttcgtgtacaaggagttcagcagattccacgaggagatcctgcccatgttcgacagactgcagaacaacagaaaggagtggaaggccctggccgacgagtacgaggccaaggtgaaggccctggaggagaaggaggaggaggagagagtggccgccaagaagggcaccgagatctgcaacggcggccccgcccccaagagcagcacctgctgcatcctgtag

SEQ ID NO: 57601 - protein, 240 aa, Artificial Sequence
  derived and/or modified sequence
  misc_feature (1)..(1): Xaa can be any naturally occurring amino acid
XSGSASPAVAELCQNTPETFLEASKLLLTYADNILRNPNDEKYRSIRIGNTAFSTRLLPVRGAVECLFEMGFEEGETHLIFPKKASVEQLQKIRDLIAIERSSRLDGSNKSHKVKSSQQPAASTQLPTTPSSNPSGLNQHTRNRQGQSSDPPSASTVAADSAILEVLQSNIQHVLVYENPALQEKALACIPVQELKRKSQEKLSRARKLDKDIITLRNFWKQDVDGVASGPIVLHCAAEL

SEQ ID NO: 57602 - protein, 633 aa, Artificial Sequence
  derived and/or modified sequence
AALGSSSGSASPAVAELCQNTPETFLEASKLLLTYADNILRNPNDEKYRSIRIGNTAFSTRLLPVRGAVECLFEMGFEEGETHLIFPKKASVEQLQKIRDLIAIERSSRLDGSNKSHKVKSSQQPAASTQLPTTPSSNPSGLNQHTRNRQGQSSDPPSASTVAADSAILEVLQSNIQHVLVYENPALQEKALACIPVQELKRKSQEKLSRARKLDKGINISDEDFLLLELLHWFKEEFFHWVNNVLCSKCGGQTRSRDRSLLPSDDELKWGAKEVEDHYCDACQFSNRFPRYNNPEKLLETRCGRCGEWANCFTLCCRAVGFEARYVWDYTELQRTLSLKLTTLKEIGKTFLRISKRQKLIQVVDVTWRYSCKHEEVIARRTKVKEALLRDTINGLNKQRQLFLSENRRKELLQRIIVELVEFISPKTPKPGELGGRISGSVAWRVARGEMGLQRKETLFIPCENEKISKQLHLCYNIVKDRYVRVSNNNQTISGWENGVWKMESIFRKVETDWHMVYLARKEGSSFAYISWKFECGSVGLKVDSISIRTSSQTFQTGTVEWKLRSDTAQVELTGDNSLHSYADFSGATEVILEAELSRGDGDVAWQHTQLFRQSLNDHEENCLEIIIKFSDL

SEQ ID NO: 57603 - protein, 636 aa, Artificial Sequence
  derived and/or modified sequence
MAAAALGSSSGSASPAVAELCQNTPETFLEASKLLLTYADNILRNPNDEKYRSIRIGNTAFSTRLLPVRGAVECLFEMGFEEGETHLIFPKKASVEQLQKIRDLIAIERSSRLDGSNKSHKVKSSQQPAASTQLPTTPSSNPSGLNQHTRNRQGQSSDPPSASTVAADSAILEVLQSNIQHVLVYENPALQEKALACIPVQELKRKSQEKLSRARKLDKGINISDEDFLLLELLHWFKEEFFHWVNNVLCSKCGGQTRSRDRSLLPSDDELKWGAKEVEDHYCDACQFSNRFPRYNNPEKLLETRCGRCGEWANCFTLCCRAVGFEARYVWDYTELQRTLSLKLTTLKEIGKTFLRISKRQKLIQVVDVTWRYSCKHEEVIARRTKVKEALLRDTINGLNKQRQLFLSENRRKELLQRIIVELVEFISPKTPKPGELGGRISGSVAWRVARGEMGLQRKETLFIPCENEKISKQLHLCYNIVKDRYVRVSNNNQTISGWENGVWKMESIFRKVETDWHMVYLARKEGSSFAYISWKFECGSVGLKVDSISIRTSSQTFQTGTVEWKLRSDTAQVELTGDNSLHSYADFSGATEVILEAELSRGDGDVAWQHTQLFRQSLNDHEENCLEIIIKFSDL

SEQ ID NO: 57604 - DNA, 1902 bp, Artificial Sequence
  derived and/or modified sequence
gctgccttgggttcctcatctggttccgcctcgcctgccgtagccgaactttgtcaaaatacacccgagacatttctggaggctagtaaactcctgctcacatacgccgataatattttaaggaatcctaacgacgaaaagtataggtccattagaatcgggaacactgccttcagcacaaggctcctgccggtgaggggtgccgtggagtgtctctttgaaatgggcttcgaggagggcgaaactcatctaatattcccaaagaaggcctcggtggaacagctgcaaaaaattcgagatcttatcgccattgagcgttcctccagactggacggctccaacaagagccacaaggtcaaaagcagtcaacaaccggccgcgtcgacccagctaccgacgaccccaagctctaatccctccggcctgaatcagcacacaaggaatagacagggccagtcttctgatcccccatccgcctccacggttgccgccgattctgctatactggaggtactgcaaagcaacatccagcacgtcctggtctatgagaatcctgccctgcaagagaaagctctagcctgtatccccgtgcaggaactgaagcgaaaatcccaggaaaagctgagccgagcaaggaaactggataaaggcatcaatataagcgatgaggacttcctgttgctggagcttctacattggttcaaggaagaattcttccattgggtgaataacgtcttgtgttcgaaatgcggcggacaaacccggtcgcgcgataggtcccttctcccttctgatgacgaactgaaatggggggcaaaagaggtggaggatcattactgcgacgcttgccagttcagcaaccggttcccacggtacaacaatcccgagaagctattggagacgaggtgcggaaggtgcggtgagtgggcaaattgtttcactttgtgttgccgggcagtaggcttcgaggctcgctatgtgtgggactataccgagctgcagcggacattgagcctcaaactgacaactctgaaggagataggaaaaacatttctccggatctcaaagagacagaagctcatccaagtggtagacgtcacttggcgctattcgtgcaaacatgaagaagtgatcgctaggcgcactaaggtgaaggaggctctcctacgagacactataaacggcttgaacaagcagagacagcttttcctaagtgaaaataggagaaaggagctcttgcagaggattatcgtagagctggtggagttcatttctcccaagactcccaaaccaggcgagctgggtggccggatttctgggtcggttgcatggcgagttgcaaggggagagatgggactccagagaaaggagacattatttatcccatgcgagaatgagaagatttctaaacagctccatctctgctataatatagtgaaagatagatatgtgcgggtaagcaacaacaaccagacaataagtggctgggagaatggggtgtggaaaatggagtcgatttttcgcaaggtagagaccgattggcacatggtttacctggcacggaaagaggggtcttctttcgcttatatcagctggaagttcgagtgtggatcagttggcctgaaggtcgactcgatttcaatacgaacaagctcacagacattccaaacaggcaccgttgaatggaagctgcgcagtgatacagctcaggtcgagctgacaggagataatagcctccattcctatgccgatttctctggagccaccgaagtgatcttggaggccgagctgagtcggggagacggtgacgtggcctggcagcatacacagttgttcagacagagcctgaacgatcacgaggagaactgtctggagattatcatcaagttttctgatctgtag

SEQ ID NO: 57605 - DNA, 1911 bp, Artificial Sequence
  derived and/or modified sequence
atggccgcagcggctctgggctctagtagcgggtctgcttctccagcggtagctgaactctgtcagaacacacccgaaactttccttgaagcatctaaactgctcttaacctacgccgataacattcttagaaacccaaatgatgagaagtacagaagcataaggattggaaatacggcctttagtacccgattattacctgtccggggagccgttgagtgcctcttcgagatgggattcgaagagggcgagacacacctgatcttccctaaaaaggccagtgtagagcagttacagaaaattagggacctgatcgcaatcgagcgctcttcaaggttagatggttctaacaagtcccacaaggtgaagagctcacagcagcccgcagcctctacacagctgccaactacacctagtagcaatcctagcgggttgaatcagcacacccgtaaccgacagggacagagttcagacccaccaagcgccagtactgttgccgcagatagtgctatactggaagtccttcagtcaaacatacaacacgtactcgtgtatgagaaccccgccctccaggaaaaggcgctggcctgcatacctgtgcaagagctcaagcgtaaaagccaggaaaaactgtctcgggcccgaaagctggataagggaatcaacatatctgacgaagattttctgctgctagagctcctccattggtttaaggaggaattcttccactgggtgaataatgtgttatgctccaaatgtggcgggcagactagaagccgagataggtccttgctcccctccgacgacgagctgaagtggggtgccaaggaagtggaagatcattactgtgacgcttgtcagttttcaaaccggttcccccggtataacaacccggagaaactgctggaaactcggtgtggaagatgcggagagtgggctaattgttttaccctgtgttgcagagcggtggggtttgaggcacgttatgtatgggattacacggaattgcaaaggacattgagccttaaactgacaacactgaaagagattggcaaaacttttctgagaattagtaaacggcagaaactgatccaggtggtagacgtgacctggcgctatagttgcaagcatgaggaggttattgctcgccgtacaaaagtgaaggaagcattgcttagagacacaattaacggcctgaacaagcagagacagctgttcctctccgaaaaccggagaaaagaattacttcagagaataatcgtcgaactcgtggagttcatctctcccaaaactcccaaaccaggtgaactggggggtcggatcagtggatcagttgcctggcgagtggcacgcggggagatgggtttgcagagaaaggaaactctgtttatcccttgcgagaatgagaaaatctccaagcagctccacctgtgttacaatatcgttaaagacaggtacgttcgggtttctaataacaaccagacgatctctgggtgggagaacggggtgtggaagatggagagcatctttagaaaggtggaaactgattggcacatggtatatttggcaaggaaagaggggagttcctttgcctatatctcttggaaatttgaatgcggctctgtggggctgaaagtcgacagcatctcaatccgcacgtcctcacaaactttccagaccgggacagtggagtggaaacttcggagcgatactgcccaagtggaattaacgggcgataattccctgcactcttacgccgatttcagcggagcaactgaagtcattcttgaagccgaactgagtaggggtgacggggatgtcgcctggcaacacacccagttattccgccaatcactaaatgatcatgaggaaaattgcctagagatcattatcaaattttccgatctatag

SEQ ID NO: 57606 - DNA, 1902 bp, Artificial Sequence
  derived and/or modified sequence
gctgccctgggcagcagcagcggcagcgccagccctgctgtggccgagctgtgccagaacaccccagagaccttcctggaggccagcaagctgctgctgacctacgccgacaacatcctgaggaaccccaatgatgagaagtaccgcagcatcagaattggcaacacagccttcagcacccggctgctgcctgtgagaggagctgtggagtgcctgtttgagatgggctttgaggagggggagacccacctgatcttccccaagaaggcctctgtggagcagctgcagaagatccgggacctgattgccatcgagaggagcagccggctggatggcagcaacaagagccacaaggtgaagagcagccagcagcctgctgccagcacccagctgcccaccacccccagcagcaaccccagcggcctgaaccagcacaccaggaaccggcagggccagagcagtgacccccccagcgccagcacagtggccgctgacagcgccatcctggaggtgctgcagagcaacatccagcacgtgctggtgtatgaaaatcctgccctgcaggagaaggccctggcctgcatccctgtgcaggagctgaagaggaagagccaggagaagctgagccgggccaggaagctggacaagggcatcaacatcagtgatgaggacttcctgctgctggagctgctgcactggttcaaggaggagttcttccactgggtgaacaacgtgctgtgcagcaaatgtggcggccagaccaggagccgggacaggagcctgctgcccagtgatgatgagctgaagtggggcgccaaggaggtggaggaccactactgtgatgcctgccagttcagcaaccgcttcccccgctacaacaaccctgagaagctgctggagacccgctgtggccgctgtggggagtgggccaactgcttcaccctgtgctgcagagctgtgggctttgaggcccgctacgtgtgggactacacagagctgcagaggaccctgagcctgaagctgaccaccctgaaggagatcggcaagaccttcctgcgcatcagcaagaggcagaagctgatccaggtggtggatgtgacctggagatacagctgcaagcatgaggaggtgattgcccggaggaccaaggtgaaggaggccctgctgcgggacaccatcaatggcctgaacaagcagaggcagctgttcctgtctgagaacagaaggaaggagctgctgcagaggatcatcgtggagctggtggagttcatcagccccaagacccccaagccaggagagctgggcggccgcatcagcggctctgtggcctggagggtggcccggggggagatgggcctgcagaggaaggagaccctcttcatcccctgtgaaaatgagaagatcagcaagcagctgcacctgtgctacaacatcgtgaaggacagatatgtgcgggtgagcaacaacaaccagaccatcagcggctgggagaatggagtgtggaagatggagagcatcttcaggaaggtggagacagactggcacatggtgtacctggccaggaaggagggcagcagctttgcctacatctcctggaagtttgaatgtggctctgtgggcctgaaggtggacagcatcagcatccgcaccagcagccagaccttccagacaggaacagtggagtggaagctgcggagtgacacagcccaggtggagctgaccggggacaacagcctgcacagctatgctgacttcagcggggccacagaggtgatcctggaggccgagctgagcagaggagatggagatgtggcctggcagcacacccagctgttccggcagagcctgaatgaccacgaggagaactgcctggagatcatcatcaagttcagtgacctgtag

SEQ ID NO: 57607 - DNA, 1911 bp, Artificial Sequence
  derived and/or modified sequence
atggctgctgctgccctgggcagcagcagcggcagcgccagccctgctgtggccgagctgtgccagaacaccccagagaccttcctggaggccagcaagctgctgctgacctatgctgacaacatcctgaggaaccccaatgatgagaagtaccgcagcatccgcatcggcaacacagccttcagcacccggctgctgcctgtgagaggagctgtggagtgcctgtttgagatgggctttgaggagggggagacccacctgatcttccccaagaaggcctctgtggagcagctgcagaagatccgggacctgattgccatcgagaggagcagccggctggatggcagcaacaagagccacaaggtgaagagcagccagcagcctgctgccagcacccagctgcccaccacccccagcagcaaccccagcggcctgaaccagcacaccaggaaccggcagggccagagcagtgaccccccatctgccagcacagtggccgctgacagcgccatcctggaggtgctgcagagcaacatccagcacgtgctggtgtatgagaacccagccctgcaggagaaggccctggcctgcatccctgtgcaggagctgaagaggaagagccaggagaagctgagccgggccaggaagctggacaagggcatcaacatcagtgatgaggacttcctgctgctggagctgctgcactggttcaaggaggagttcttccactgggtgaacaacgtgctgtgcagcaaatgtggcggccagaccaggagccgggacaggagcctgctgcccagtgatgatgagctgaagtggggcgccaaggaggtggaggaccactactgtgatgcctgccagttcagcaaccgcttcccccgctacaacaaccctgagaagctgctggagacccgctgtggccgctgtggggagtgggccaactgcttcaccctgtgctgcagagctgtgggctttgaggcccgctacgtgtgggactacacagagctgcagaggaccctgagcctgaagctgaccaccctgaaggagatcggcaagaccttcctgcgcatcagcaagaggcagaagctgatccaggtggtggatgtgacctggagatacagctgcaagcatgaggaggtgattgcccggaggaccaaggtgaaggaggccctgctgcgggacaccatcaatggcctgaacaagcagaggcagctgttcctgtctgaaaatagaaggaaggagctgctgcagaggatcatcgtggagctggtggagttcatcagccccaagacccccaagccaggagagctgggcggccgcatcagcggctctgtggcctggagggtggcccggggggagatgggcctgcagaggaaggagaccctcttcatcccctgtgaaaatgagaagatcagcaagcagctgcacctgtgctacaacatcgtgaaggaccgctacgtgcgggtgagcaacaacaaccagaccatcagcggctgggagaatggagtgtggaagatggagagcatcttcaggaaggtggagacagactggcacatggtgtacctggccaggaaggagggcagcagctttgcctacatctcctggaagtttgaatgtggctctgtgggcctgaaggtggacagcatcagcatccgcaccagcagccagaccttccagacaggcaccgtggagtggaagctgcggagtgacacagcccaggtggagctgactggagacaacagcctgcacagctatgctgacttcagcggggccacagaggtgatcctggaggccgagctgagcagaggagatggagatgtggcctggcagcacacccagctgttccggcagagcctgaatgaccacgaggagaactgcctggagatcatcatcaagttcagtgacctgtag

SEQ ID NO: 57608 - DNA, 1902 bp, Artificial Sequence
  derived and/or modified sequence
gccgccctgggcagcagcagcggcagcgccagccccgccgtggccgagctctgccagaacacccctgagaccttcctggaagccagcaagctcttgcttacatacgcagacaatatactgagaaaccctaacgatgagaagtatcgatctatccgcatcggcaacacagccttctccacgaggctgctgcccgtcaggggcgccgttgaatgcctgttcgagatgggcttcgaagagggcgagacccatctgatcttccctaaaaaagcctcagtcgagcagctgcaaaagatccgcgatctaatcgccatcgaaaggagcagccggctggatggaagtaacaaatctcacaaggtcaagtctagccagcaacccgccgctagtacacagctgcctaccacaccttcttctaatccgagtgggttgaaccagcacacccgcaacaggcaggggcaatctagcgatccaccctccgcctccaccgtggcggcagattcagccattctcgaggttctccaatctaacatccagcatgttctggtgtacgaaaatccggccctgcaggagaaggcactggcctgtattccggtgcaggagctgaagcggaagtcgcaagagaagcttagccgcgcaaggaagttagataaaggaatcaatatttccgatgaggattttctccttttggagctcctccactggttcaaggaagagttttttcactgggtgaacaatgtactgtgtagtaagtgcggcggacagacacgtagtcgggatcggagtctgctccctagcgatgacgagctgaagtggggagccaaagaggttgaagatcattactgcgatgcgtgccagttcagcaataggtttccacgatataataatcccgaaaagctcctggagacaagatgtggtcggtgcggagagtgggccaattgcttcaccttgtgctgtcgcgctgtgggattcgaggcgagatatgtgtgggactatacggaactgcagcggactttgtcgcttaagctaaccacactgaaggagattggcaaaacatttcttaggatcagcaagcgtcagaaactgattcaggtcgtagacgtaacctggaggtactcttgtaagcatgaagaggttatagctcgtaggacaaaggtgaaggaggctcttctgcgcgataccattaacggcttgaataagcagaggcagctttttctgagcgagaatcgaaggaaagaattgctgcaacgtatcatagtggaactagtcgaattcatctcgccaaaaactcctaaacctggcgagctcggaggccggatttctgggtctgtcgcctggagagtggctagaggcgagatgggactgcagcgaaaagagactctgtttataccttgcgagaatgagaaaatttcgaagcagcttcacctatgttataacatcgtgaaggatcgctatgtgagagtgagcaacaataatcagaccattagtggctgggaaaacggggtttggaagatggagtcaatcttccgaaaagtggagaccgactggcacatggtgtatttagcaagaaaagaaggctcttccttcgcatacataagctggaagtttgaatgtggttctgttggactgaaggtggactccatctctattagaacatcatcacagactttccaaaccggcaccgtcgaatggaaactgaggagcgatactgcacaggtcgagctgacaggcgataactctctgcactcctacgccgacttctccggagctaccgaggtaatactggaagccgagttgtccagaggcgatggcgacgtagcatggcagcacacccagctgttccggcagtcgttgaacgaccacgaagagaactgccttgaaatcatcataaaatttagtgatttgtag

SEQ ID NO: 57609 - DNA, 1911 bp, Artificial Sequence
  derived and/or modified sequence
atggccgccgccgccctgggcagcagcagcggcagcgccagccccgccgtagccgaactctgccagaacacccccgaaacgtttctggaagcatctaagctccttctaacgtatgcggacaacatattgcggaatccgaatgatgagaaatacagatcgatcaggatcggcaacaccgctttctccactaggcttctccctgtccggggcgcagtagagtgcctctttgagatggggtttgaagagggcgagactcacctgatctttcccaagaaggccagtgtggaacagctccagaaaatccgcgacctgatcgcgattgagcgctcctcaagactcgacgggagcaacaaatctcacaaagtgaagagttctcaacagcctgctgcctcgacacaattgcctactacacctagctccaacccctcaggcttgaaccagcatacgcgtaatcgccaggggcagtcatctgaccccccatctgcaagcacggtcgctgcagacagcgcgattttggaagtccttcaaagtaatatccagcatgtgctcgtttatgagaatcctgccttgcaggaaaaggctctggcctgcattcccgtgcaggagttaaaacgcaaaagccaggagaagctgtccagggcgaggaagttggataagggaattaacatttctgatgaggactttctgcttttggagttactgcactggtttaaagaagagttctttcactgggtaaataatgtgctgtgctcaaaatgtggcggccagacacgaagccgcgacaggtccctcctcccgagcgatgatgaattgaaatggggtgcaaaagaagtggaagatcattactgcgacgcgtgccagttctctaaccgctttccaagatataacaatcccgaaaagctcttggagacccgatgcggccgatgtggtgagtgggctaactgttttacgctgtgttgtcgggctgtgggtttcgaagcccgctacgtgtgggactacaccgagctccaaaggacgctgtctctgaagttgaccactctcaaggagatagggaagacttttttgcggataagtaaacgacagaaactcattcaggtcgtcgacgtgacatggagatactcttgtaagcacgaggaagtgatcgcccgtcggaccaaggtaaaggaagcactgctgcgggatacaattaatggtcttaacaagcagcggcagctgttcttgagcgagaaccgcaggaaagagttgttacagagaatcattgtggaacttgtagagtttatcagcccgaaaaccccaaagccaggggaactgggcggtcgaatttccggcagcgtggcctggagagtggcaagaggagagatgggactccagcgaaaggagactttgtttatcccctgtgaaaacgaaaaaatcagtaaacagctgcatttgtgctataatattgtcaaagacagatatgtgagagtcagcaataacaatcaaaccatctctggttgggagaacggggtttggaagatggaaagtatcttccgcaaggtcgagacggattggcatatggtctacctggctcgcaaagaggggtcaagcttcgcctatatctcatggaagttcgagtgcggatccgtcggcctgaaggtcgactccatatcaataaggacctcctcgcagacctttcagacgggcactgtggaatggaagctcagatcagatactgcgcaagttgaactaacaggcgacaatagtctgcatagttacgcagatttcagtggagcaactgaagtaatccttgaagccgagctgagcagaggggatggcgatgtcgcttggcaacacacccagttgttccgtcaatccctgaacgatcacgaagaaaactgtttggaaatcataatcaagttctctgatctctag

SEQ ID NO: 57610 - DNA, 2086 bp, Artificial Sequence
  derived and/or modified sequence
gcggcattgggcagctcctcaggctcggcgtccccggccgtggctgagctctgccagaacaccccggagacctttttggaggcctccaagctgctgctcacctatgctgacaacatcctcagaaaccctaatgatgaaaaatatagatccatccggattggaaacacagccttttctactagactcttgcctgtcagaggagctgttgaatgtttatttgaaatgggctttgaagagggagaaacacatctcatctttcctaaaaaagcttcagtggagcagctgcaaaaaattcgtgacctgattgccatagagagaagtagcagactggatggctcaaataagagccacaaagtaaagtcatctcagcaacctgcagccagtacccagcttcctacaacaccatcttcaaatcccagtgggttaaaccagcacacaaggaaccgtcaagggcagtcatcagatccaccatctgcttcaacggttgctgctgactcagccattctagaagttcttcagtccaacattcagcatgtgctggtctatgaaaatcctgctcttcaggagaaagcgttggcttgtattccggtccaagaactaaaaaggaaatcacaagaaaagttatcgagagctagaaaattggataaaggtatcaatataagtgatgaggattttcttttgctggagcttttgcactggtttaaggaagaattttttcactgggtgaataacgttttgtgcagcaaatgtggtggacagactaggtctagagatagatcattactgcccagtgatgatgagctgaagtggggtgcaaaggaagtggaagatcattactgtgatgcctgccagttcagcaatcgattcccaagatataataaccctgagaaacttttggaaacaagatgtggacggtgtggcgagtgggccaattgttttacactgtgctgccgagctgtagggtttgaagctcgctatgtttgggattacacagagttacagcgcacattaagcctaaaactgaccacgttaaaggagattggaaaaacatttttaaggatttcaaagagacagaaattaatacaggtagttgatgtcacttggcgatattcctgcaaacatgaagaggtgattgccagaagaactaaggttaaagaagcattacttcgagacactattaatgggcttaataagcagaggcaactgtttttgtcagaaaacagaaggaaagaacttctccagaggataattgtggagcttgttgaatttatatctcccaaaacccctaaacctggagaacttgggggaagaatatctgggtcagtggcttggagagtagcccgaggtgaaatgggtctacagagaaaagaaaccttgtttattccctgtgaaaatgagaagatttctaaacagctccacctttgttacaatattgtgaaagatcgttatgttcgagtttcaaataacaatcaaaccatttctggatgggagaatggcgtgtggaaaatggaatctatattcagaaaagttgaaacagactggcacatggtatatttggcccgaaaggaaggatcatcttttgcttatatttcctggaagtttgagtgtgggtcagttggcctaaaagtagatagcatttctattagaacaagtagtcaaacttttcagactggaacagtagaatggaaattgcgatctgatacagcacaagtagaactgacaggcgataacagtcttcactcctatgctgatttttctggtgccactgaagttattttggaagcagaattaagcagaggagatggtgatgtcgcttggcaacacacccagctgtttagacaaagcttaaatgaccatgaagaaaattgtttggagataattataaaattcagtgacctttgagaacctgaacattatagaaaagctggcaataatcaaggacttactgaagtagtctgttggttcagtgcatgcttagttggcagttaccaccctgtgctagcatatttcttttgctagctatccatcatgtaaccctcatgaaaattatctttatacgtggactataataaaatattgaattaaa

SEQ ID NO: 57611 - DNA, 2534 bp, Artificial Sequence
  derived and/or modified sequence
ggaccccgcccctgccggtggctgcggtagctgctgcgcgctgaggcgcctgctcagtgtgggacgcggagagcgaggggcggcggcggcgcccgctggcgctcaagcatggcggcggcggcattgggcagctcctcaggctcggcgtccccggccgtggctgagctctgccagaacaccccggagacctttttggaggcctccaagctgctgctcacctatgctgacaacatcctcagaaaccctaatgatgaaaaatatagatccatccggattggaaacacagccttttctactagactcttgcctgtcagaggagctgttgaatgtttatttgaaatgggctttgaagagggagaaacacatctcatctttcctaaaaaagcttcagtggagcagctgcaaaaaattcgtgacctgattgccatagagagaagtagcagactggatggctcaaataagagccacaaagtaaagtcatctcagcaacctgcagccagtacccagcttcctacaacaccatcttcaaatcccagtgggttaaaccagcacacaaggaaccgtcaagggcagtcatcagatccaccatctgcttcaacggttgctgctgactcagccattctagaagttcttcagtccaacattcagcatgtgctggtctatgaaaatcctgctcttcaggagaaagcgttggcttgtattccggtccaagaactaaaaaggaaatcacaagaaaagttatcgagagctagaaaattggataaaggtatcaatataagtgatgaggattttcttttgctggagcttttgcactggtttaaggaagaattttttcactgggtgaataacgttttgtgcagcaaatgtggtggacagactaggtctagagatagatcattactgcccagtgatgatgagctgaagtggggtgcaaaggaagtggaagatcattactgtgatgcctgccagttcagcaatcgattcccaagatataataaccctgagaaacttttggaaacaagatgtggacggtgtggcgagtgggccaattgttttacactgtgctgccgagctgtagggtttgaagctcgctatgtttgggattacacagagttacagcgcacattaagcctaaaactgaccacgttaaaggagattggaaaaacatttttaaggatttcaaagagacagaaattaatacaggtagttgatgtcacttggcgatattcctgcaaacatgaagaggtgattgccagaagaactaaggttaaagaagcattacttcgagacactattaatgggcttaataagcagaggcaactgtttttgtcagaaaacagaaggaaagaacttctccagaggataattgtggagcttgttgaatttatatctcccaaaacccctaaacctggagaacttgggggaagaatatctgggtcagtggcttggagagtagcccgaggtgaaatgggtctacagagaaaagaaaccttgtttattccctgtgaaaatgagaagatttctaaacagctccacctttgttacaatattgtgaaagatcgttatgttcgagtttcaaataacaatcaaaccatttctggatgggagaatggcgtgtggaaaatggaatctatattcagaaaagttgaaacagactggcacatggtatatttggcccgaaaggaaggatcatcttttgcttatatttcctggaagtttgagtgtgggtcagttggcctaaaagtagatagcatttctattagaacaagtagtcaaacttttcagactggaacagtagaatggaaattgcgatctgatacagcacaagtagaactgacaggcgataacagtcttcactcctatgctgatttttctggtgccactgaagttattttggaagcagaattaagcagaggagatggtgatgtcgcttggcaacacacccagctgtttagacaaagcttaaatgaccatgaagaaaattgtttggagataattataaaattcagtgacctttgagaacctgaacattatagaaaagctggcaataatcaaggacttactgaagtagtctgttggttcagtgcatgcttagttggcagttaccaccctgtgctagcatatttcttttgctagctatccatcatgtaaccctcatgaaaattatctttatacgtggactataataaaatattgaattaaaacctttcttccatatgtgactataatttggagtaaagtcttgttgactcaatatgggattttaatctaaaactgtaagtatggttttaaaagttaaataatgatattcatgattaaatgctattcatgattatgataaaatcttgggcttatgatagtaatttgacattttctgatcagccattcatttcttcagaagtggttaaattagagtctcctaatatttttaattaatgtgaaagtacagtagctcataaattatataatgcatgaaaatttatatgattataaatattcaggcatttaagaaataaaatgaagtattttgcctt

SEQ ID NO: 57612 - DNA, 1902 bp, Artificial Sequence
  derived and/or modified sequence
gccgctcttggttcctcatccggtagtgccagccctgctgtggccgagttgtgtcagaacaccccagaaaccttcctcgaagcctctaaactgctgttgacatatgccgacaacatcctgcggaatcccaatgacgaaaagtaccgctccatccggataggtaatactgccttttctacaaggcttctgccggtccgcggtgcggtggaatgcttatttgagatggggtttgaggagggggaaacacatcttatttttcctaaaaaagcaagcgtggagcagttgcagaagattcgagacctcatcgcaatcgagaggtccagtcgactggatggcagtaacaagtcgcacaaggttaaaagcagccagcagccagccgctagtacgcaattgcctaccactccaagttctaaccctagtggcttaaatcagcatactaggaaccgacaggggcagagcagtgatccgccaagcgcaagtactgttgccgctgacagcgctattctggaggtcctgcagagcaacattcaacatgtgctggtctacgagaatccagcactacaagagaaggcgctggcctgcattcccgtgcaggaactgaagaggaaatcccaggaaaagctgtcaagagctcggaaactcgacaagggtatcaacattagcgacgaggactttttgctcctggagctgttgcactggtttaaggaggaattcttccattgggtcaacaatgtgttgtgttcaaagtgtggaggacagacccgcagcagggataggtcgctgctgccaagcgacgacgaactcaaatggggcgctaaggaggttgaagatcactattgtgacgcatgtcagttttctaaccggttcccccgttataataaccccgagaagctccttgagacacgatgcggtcgctgtggcgaatgggcgaactgcttcactctctgctgcagagcggttggcttcgaagcaaggtatgtctgggattatactgaactgcagaggaccctttctctgaagcttactacccttaaggaaatcggtaaaaccttcctgaggatctccaagcggcagaagctgatacaggtggtggacgtgacgtggcggtactcatgtaagcatgaggaagtcatcgcccgtcgcacaaaagttaaagaagctctcttgcgggacactattaacggcctaaacaagcagagacagctgttcctgtcagaaaatagacgcaaggagctactgcagaggatcattgtcgaactggtggaattcatcagcccgaaaacccctaagcctggagagctgggtggaaggatctccggcagcgtggcctggagagtggctaggggcgagatgggtctgcaacgcaaggaaacactctttatcccgtgcgagaacgaaaagatttctaagcagctgcacctatgttataatatagtcaaggatcggtatgtgcgggtgtccaataataatcagaccatttccgggtgggagaatggggtctggaagatggagagtatctttcgcaaggtagagacagactggcacatggtttaccttgcaaggaaagaggggtcttcattcgcctacatttcatggaagtttgagtgcggtagtgtagggttgaaggtagatagcatcagtatccggacgagttcccaaacgttccagacaggcaccgttgaatggaagctcaggtcagacaccgctcaggttgagctgacaggtgataattctcttcattcttatgctgatttcagtggggcaaccgaggtcattctggaggccgagctgagcaggggcgacggcgatgtcgcatggcagcatactcagctgtttcgccagtctctgaatgatcacgaagaaaactgcctggagataatcattaaattttcagacttgtag

SEQ ID NO: 57613 - DNA, 1911 bp, Artificial Sequence
  derived and/or modified sequence
atggctgcggcagctctgggctcctcaagtggaagcgcgtcacctgccgtggctgagctctgtcaaaacacccctgaaacctttctggaagcaagcaaactgctgttgacgtatgcagataatatactgaggaatccgaatgacgaaaagtatagatccatacgcatcggcaataccgctttcagcacccgcctgcttcctgtgagaggggctgtcgagtgtctcttcgaaatgggatttgaagaaggggaaacccatctcatttttccgaagaaagctagtgtcgaacagcttcagaaaattagagacctgattgcaattgagcggagttcaagactcgacgggagcaataaaagtcacaaagtgaagagcagccaacagcctgctgcaagtacacagctcccaacaaccccatcctctaatccctccggactgaatcagcataccaggaataggcagggacaatcttctgatcccccttccgcgagcactgtggcagccgactccgcaatactcgaggtcttacagagcaacattcagcacgttctggtctacgagaacccagccctgcaggagaaagctctagcctgcataccagtgcaggaattgaagaggaaaagccaggagaaactcagcagagccagaaagctggataaggggataaacatttccgatgaggattttctccttctggaactgttgcattggtttaaggaggaatttttccattgggtgaacaatgtcctatgttccaagtgtgggggacaaacccggagtcgcgacaggagcctgctgccatctgatgacgagcttaaatggggggcaaaagaggtggaggaccactactgtgacgcatgccaattcagcaataggttccccaggtacaacaatccagaaaaactactcgagacaagatgtgggagatgcggggagtgggccaattgttttactctgtgctgccgggcagttggcttcgaagccaggtatgtgtgggactatactgagctgcagagaactctgagcctcaaacttactactctcaaggagattggtaagacgttcttacgcatctccaaaaggcagaaattgatccaggtggtcgacgtgacgtggagatatagttgcaaacacgaagaggtgatcgctagaagaaccaaagtgaaagaagcgctgcttagagatacgataaatggcctgaataagcagcgccagctgtttttgagcgaaaataggagaaaggagcttctccagcgaattatagtcgagctagtcgagtttatctccccgaagacgccaaagcccggagagttgggcggtcggattagcggaagtgtagcttggcgggtggcgaggggagagatgggactgcagaggaaggaaacgcttttcatcccatgcgaaaacgagaagatcagcaagcagctgcacctgtgttacaatatcgttaaggatcggtacgtaagggtctctaacaacaaccagactatcagtggatgggaaaacggcgtctggaagatggagtcaatatttcggaaggtggagaccgattggcacatggtctatctcgccaggaaggaagggtcatccttcgcctatatcagctggaagttcgaatgtggttctgtcggactgaaagtggactcaatttccatcagaacctccagccagacctttcaaaccggcacagtggagtggaaactaagaagcgatacagcgcaggtagaacttaccggcgacaatagtctgcattcttacgctgatttctccggcgcaacagaggtcatcctggaggctgaactcagccggggtgatggagacgtggcctggcagcacacccagctcttcagacaatcattaaatgatcacgaggagaattgcttagagattataataaaattcagtgacctttag

SEQ ID NO: 57614 - DNA, 1902 bp, Artificial Sequence
  derived and/or modified sequence
gccgccctgggcagcagcagcggcagcgccagccccgccgtggccgagctgtgccagaacacccccgagaccttcctggaggccagcaagctgctgctgacctacgccgacaacatcctgagaaaccccaacgacgagaagtacagaagcatcagaatcggcaacaccgccttcagcaccagactgctgcccgtgagaggcgccgtggagtgcctgttcgagatgggcttcgaggagggcgagacccacctgatcttccccaagaaggccagcgtggagcagctgcagaagatcagagacctgatcgccatcgagagaagcagcagactggacggcagcaacaagagccacaaggtgaagagcagccagcagcccgccgccagcacccagctgcccaccacccccagcagcaaccccagcggcctgaaccagcacaccagaaacagacagggccagagcagcgacccccccagcgccagcaccgtggccgccgacagcgccatcctggaggtgctgcagagcaacatccagcacgtgctggtgtacgagaaccccgccctgcaggagaaggccctggcctgcatccccgtgcaggagctgaagagaaagagccaggagaagctgagcagagccagaaagctggacaagggcatcaacatcagcgacgaggacttcctgctgctggagctgctgcactggttcaaggaggagttcttccactgggtgaacaacgtgctgtgcagcaagtgcggcggccagaccagaagcagagacagaagcctgctgcccagcgacgacgagctgaagtggggcgccaaggaggtggaggaccactactgcgacgcctgccagttcagcaacagattccccagatacaacaaccccgagaagctgctggagaccagatgcggcagatgcggcgagtgggccaactgcttcaccctgtgctgcagagccgtgggcttcgaggccagatacgtgtgggactacaccgagctgcagagaaccctgagcctgaagctgaccaccctgaaggagatcggcaagaccttcctgagaatcagcaagagacagaagctgatccaggtggtggacgtgacctggagatacagctgcaagcacgaggaggtgatcgccagaagaaccaaggtgaaggaggccctgctgagagacaccatcaacggcctgaacaagcagagacagctgttcctgagcgagaacagaagaaaggagctgctgcagagaatcatcgtggagctggtggagttcatcagccccaagacccccaagcccggcgagctgggcggcagaatcagcggcagcgtggcctggagagtggccagaggcgagatgggcctgcagagaaaggagaccctgttcatcccctgcgagaacgagaagatcagcaagcagctgcacctgtgctacaacatcgtgaaggacagatacgtgagagtgagcaacaacaaccagaccatcagcggctgggagaacggcgtgtggaagatggagagcatcttcagaaaggtggagaccgactggcacatggtgtacctggccagaaaggagggcagcagcttcgcctacatcagctggaagttcgagtgcggcagcgtgggcctgaaggtggacagcatcagcatcagaaccagcagccagaccttccagaccggcaccgtggagtggaagctgagaagcgacaccgcccaggtggagctgaccggcgacaacagcctgcacagctacgccgacttcagcggcgccaccgaggtgatcctggaggccgagctgagcagaggcgacggcgacgtggcctggcagcacacccagctgttcagacagagcctgaacgaccacgaggagaactgcctggagatcatcatcaagttcagcgacctgtag

SEQ ID NO: 57615 - DNA, 1911 bp, Artificial Sequence
  derived and/or modified sequence
atggccgccgccgccctgggcagcagcagcggcagcgccagccccgccgtggccgagctgtgccagaacacccccgagaccttcctggaggccagcaagctgctgctgacctacgccgacaacatcctgagaaaccccaacgacgagaagtacagaagcatcagaatcggcaacaccgccttcagcaccagactgctgcccgtgagaggcgccgtggagtgcctgttcgagatgggcttcgaggagggcgagacccacctgatcttccccaagaaggccagcgtggagcagctgcagaagatcagagacctgatcgccatcgagagaagcagcagactggacggcagcaacaagagccacaaggtgaagagcagccagcagcccgccgccagcacccagctgcccaccacccccagcagcaaccccagcggcctgaaccagcacaccagaaacagacagggccagagcagcgacccccccagcgccagcaccgtggccgccgacagcgccatcctggaggtgctgcagagcaacatccagcacgtgctggtgtacgagaaccccgccctgcaggagaaggccctggcctgcatccccgtgcaggagctgaagagaaagagccaggagaagctgagcagagccagaaagctggacaagggcatcaacatcagcgacgaggacttcctgctgctggagctgctgcactggttcaaggaggagttcttccactgggtgaacaacgtgctgtgcagcaagtgcggcggccagaccagaagcagagacagaagcctgctgcccagcgacgacgagctgaagtggggcgccaaggaggtggaggaccactactgcgacgcctgccagttcagcaacagattccccagatacaacaaccccgagaagctgctggagaccagatgcggcagatgcggcgagtgggccaactgcttcaccctgtgctgcagagccgtgggcttcgaggccagatacgtgtgggactacaccgagctgcagagaaccctgagcctgaagctgaccaccctgaaggagatcggcaagaccttcctgagaatcagcaagagacagaagctgatccaggtggtggacgtgacctggagatacagctgcaagcacgaggaggtgatcgccagaagaaccaaggtgaaggaggccctgctgagagacaccatcaacggcctgaacaagcagagacagctgttcctgagcgagaacagaagaaaggagctgctgcagagaatcatcgtggagctggtggagttcatcagccccaagacccccaagcccggcgagctgggcggcagaatcagcggcagcgtggcctggagagtggccagaggcgagatgggcctgcagagaaaggagaccctgttcatcccctgcgagaacgagaagatcagcaagcagctgcacctgtgctacaacatcgtgaaggacagatacgtgagagtgagcaacaacaaccagaccatcagcggctgggagaacggcgtgtggaagatggagagcatcttcagaaaggtggagaccgactggcacatggtgtacctggccagaaaggagggcagcagcttcgcctacatcagctggaagttcgagtgcggcagcgtgggcctgaaggtggacagcatcagcatcagaaccagcagccagaccttccagaccggcaccgtggagtggaagctgagaagcgacaccgcccaggtggagctgaccggcgacaacagcctgcacagctacgccgacttcagcggcgccaccgaggtgatcctggaggccgagctgagcagaggcgacggcgacgtggcctggcagcacacccagctgttcagacagagcctgaacgaccacgaggagaactgcctggagatcatcatcaagttcagcgacctgtag

SEQ ID NO: 57616 - DNA, 1839 bp, Artificial Sequence
  derived and/or modified sequence
atgcggaaccccaacgacgagaagtataggtctatccgaataggcaatacggccttttccactcggctacttcctgtgcggggagctgtcgaatgtttattcgaaatgggctttgaggagggtgaaactcacctgatatttcctaaaaaagctagcgtcgagcaattgcagaagatccgcgatcttatcgccatcgagcgttcctcacgcctcgacggttccaataagtctcacaaggttaagtcatctcaacaaccagctgcctcaactcaactgcccaccacccctagttccaatccatctggactgaatcagcatacccgaaaccgacaggggcaaagttcagaccccccttccgcaagcaccgtggcggcggactcagcgatcctggaagtgctgcagtccaacattcagcacgtgctcgtttatgaaaacccagcacttcaggagaaggccctagcctgcattcccgttcaggagctcaagcgaaagagccaggagaagttatctagagcacgaaagctggataagggaattaacatcagcgacgaagattttctgctcctggaattgctacactggttcaaggaagaatttttccactgggtgaacaatgtgctgtgtagcaagtgcggtggtcaaacacggagtagagataggtccctcttgccttccgacgacgagttgaaatggggggctaaggaagtggaggatcattactgcgatgcgtgccagttctcgaataggttccctcgctacaacaacccagagaagctcctggaaaccagatgcggccgctgcggggagtgggccaactgtttcacgctttgctgtcgggcagtgggatttgaggccaggtacgtgtgggattacactgaccacgtgtggactgaggtgtattccccaagtcagcagcggtggctgcactgcgacgcgtgcgaagatgtctgcgataagcctctgctctacgaaattggttggggtaagaagctttcttatgtgatagccttctccaaggatgaggtcgtcgacgtaacttggcgatactcctgtaagcacgaggaggtgatcgcacggcggactaaagtcaaggaggccctgctgcgcgatactatcaacggattaaataagcagcgccagttgtttttaagcgagaaccgccgcaaggaactgttgcagagaataattgtggagctggtagagttcatctcccctaagacacctaaacccggtgagttggggggtcgcatatccggatctgtggcatggcgtgttgcgcggggagaaatggggctgcagcgcaaagaaacactgttcatcccatgcgaaaacgaaaagatcagcaaacagctgcatctctgttataatatcgtgaaagatagatatgtgagggtaagtaataataatcagacaatctccggctgggagaacggcgtgtggaaaatggagagcatatttcggaaggtcgaaacagactggcatatggtgtacctcgcacgcaaagaggggagctctttcgcatatatatcatggaagtttgaatgtggcagtgtcggacttaaggtagactccatctctattagaactagcagtcaaacgttccaaacaggtacagtggaatggaaattacgatctgacacagcgcaagtggaactcaccggcgacaactccctgcattcttacgctgatttttcaggcgcaactgaggtaatcctggaggcagagttgtccaggggggatggcgacgtggcatggcaacacactcagttgtttagacaatctctgaacgaccacgaggaaaattgtctggaaatcatcatcaagttttccgacctttag

SEQ ID NO: 57617 - DNA, 1839 bp, Artificial Sequence
  derived and/or modified sequence
atgaggaaccccaatgatgagaagtaccgcagcatccgcatcggcaacacagccttcagcacccggctgctgcctgtgagaggagctgtggagtgcctgtttgagatgggctttgaggagggggagacccacctgatcttccccaagaaggcctctgtggagcagctgcagaagatccgggacctgattgccatcgagaggagcagccggctggatggcagcaacaagagccacaaggtgaagagcagccagcagcctgctgccagcacccagctgcccaccacccccagcagcaaccccagcggcctgaaccagcacaccaggaaccggcagggccagagcagtgaccccccatctgccagcacagtggccgctgacagcgccatcctggaggtgctgcagagcaacatccagcacgtgctggtgtatgagaacccagccctgcaggagaaggccctggcctgcatccctgtgcaggagctgaagaggaagagccaggagaagctgagccgggccaggaagctggacaagggcatcaacatcagtgatgaggacttcctgctgctggagctgctgcactggttcaaggaggagttcttccactgggtgaacaacgtgctgtgcagcaaatgtggcggccagaccaggagccgggacaggagcctgctgcccagtgatgatgagctgaagtggggcgccaaggaggtggaggaccactactgtgatgcctgccagttcagcaaccgcttcccccgctacaacaaccctgagaagctgctggagacccgctgtggccgctgtggggagtgggccaactgcttcaccctgtgctgcagagctgtgggctttgaggcccgctacgtgtgggactacacagaccacgtgtggacagaggtgtacagccccagccagcagcgctggctgcactgtgatgcctgtgaagatgtgtgtgacaagcccctgctgtatgaaattggctggggcaagaagctgtcctatgtgattgccttcagcaaggatgaggtggtggatgtgacctggagatacagctgcaagcatgaggaggtgattgcccggaggaccaaggtgaaggaggccctgctgcgggacaccatcaatggcctgaacaagcagaggcagctgttcctgtctgaaaatagaaggaaggagctgctgcagaggatcatcgtggagctggtggagttcatcagccccaagacccccaagccaggagagctgggcggccgcatcagcggctctgtggcctggagggtggcccggggggagatgggcctgcagaggaaggagaccctcttcatcccctgtgaaaatgagaagatcagcaagcagctgcacctgtgctacaacatcgtgaaggaccgctacgtgcgggtgagcaacaacaaccagaccatcagcggctgggagaatggagtgtggaagatggagagcatcttcaggaaggtggagacagactggcacatggtgtacctggccaggaaggagggcagcagctttgcctacatctcctggaagtttgaatgtggctctgtgggcctgaaggtggacagcatcagcatccgcaccagcagccagaccttccagacaggcaccgtggagtggaagctgcggagtgacacagcccaggtggagctgactggagacaacagcctgcacagctatgctgacttcagcggggccacagaggtgatcctggaggccgagctgagcagaggagatggagatgtggcctggcagcacacccagctgttccggcagagcctgaatgaccacgaggagaactgcctggagatcatcatcaagttcagtgacctgtag

SEQ ID NO: 57618 - DNA, 1839 bp, Artificial Sequence
  derived and/or modified sequence
atgcggaaccccaacgacgagaagtaccggagcatccggatcggcaacacagccttctccaccaggctgcttcccgttagaggtgccgttgagtgtctctttgagatgggttttgaggaaggagagacacacctgatcttccccaaaaaagcgtccgtggagcaacttcagaagatcagggatctgatcgcaatcgagagatctagtaggctggatggaagcaacaaatctcacaaagttaagtcgagtcagcaaccagcagcatcaacacagctccccacgacaccatccagtaacccatctggactgaaccagcacactagaaacagacaaggacaatcttcggatcccccgtccgcatctactgtggcggctgactccgccatcctcgaggtgttgcagagcaatattcagcatgtcctggtgtatgagaatcccgccctacaggaaaaagcgcttgcgtgcattcccgtgcaggagttgaagcgaaaaagccaggagaaactgtcccgggcccgaaagttggacaaaggcattaacatctcagatgaagactttctgcttcttgagttgcttcactggtttaaggaggagtttttccactgggtcaataacgttctgtgctccaagtgcggcgggcagactcgaagtcgagatcggtcactattaccgtccgacgacgagcttaaatggggggcaaaagaggttgaggatcactactgtgatgcgtgtcaatttagcaaccgttttccccggtataataacccagagaaactgcttgagactaggtgcgggaggtgcggtgagtgggctaactgttttaccttatgttgtagggccgtcggtttcgaggcccgctatgtgtgggattatactgaccatgtgtggacagaggtgtacagtccaagccagcagcgttggctgcattgcgacgcttgtgaggacgtgtgtgacaagccattgctatatgaaatcggatgggggaagaaattgtcatatgtcatcgccttcagcaaagatgaagtggtggatgtgacctggaggtattcctgcaaacatgaggaggtcattgctcgacgaacaaaggtgaaggaggccctcctcagggatactattaacggactgaataagcaaaggcaactatttctgtccgaaaatcggagaaaagaactgctgcagcgcatcatcgtggaacttgttgagttcattagccccaagacacccaagcccggcgaattgggtggtcgtatctcaggctctgtggcttggcgcgtggctagaggtgaaatgggactccagagaaaggagaccctgtttatcccatgcgagaacgaaaaaatcagcaagcagctccacctttgctacaatattgtgaaggatcgttacgtgagagtgtcaaacaataatcaaacaataagcggttgggagaatggggtctggaagatggagagcatattcaggaaggtggagacggactggcatatggtgtatttggctagaaaagaaggctctagttttgcgtatatctcatggaagtttgagtgcggcagtgtaggactgaaggtggacagtatctctatccgaacctcgtctcaaacatttcagactggaaccgtcgaatggaagctcagatccgatactgcgcaggttgagctgactggggataatagtctccactcttacgcggacttttcaggagcaacagaagtgatcctcgaagctgagttgtcaaggggcgatggcgatgtggcgtggcagcatacgcagcttttccgtcagtccctgaatgatcatgaggagaattgcttggagatcattattaagttcagcgatctgtag

SEQ ID NO: 57619 - DNA, 1839 bp, Artificial Sequence
  derived and/or modified sequence
atgcggaatccaaacgacgagaagtaccgctctattcgaatcggaaatactgcgttcagtactagactgctgcccgttcgaggggctgtggaatgtctgtttgaaatgggatttgaagagggagagacacatctaatttttcccaagaaagcctcggtggaacagcttcagaagatccgtgatctgatcgcaattgagcgaagctcacgattggatggatccaacaagagccacaaggtgaagtcctcccagcagcctgcagcgtccacacaattgcctactactccttcttccaatccaagcgggctaaatcagcatacccgaaaccgtcaggggcagtcgtcagacccgccttccgcttccacagtggcagctgatagtgcaatattagaggtgctccagtctaacatccagcatgtcttggtatacgagaatccggctttgcaggagaaagctctggcctgcattccagtgcaggaacttaagcgaaaaagccaggaaaaactgtcacgtgccagaaagctggataagggaattaacatctccgacgaggactttttgttgctggagctcctccattggttcaaagaagagttttttcattgggtgaataacgtgctctgttcgaagtgcggaggacagacccggagcagagatcgcagtcttttgcctagcgatgatgagctgaaatggggagccaaagaggttgaggatcactactgtgacgcttgtcagttctccaacaggtttccccgatacaataatcctgaaaagctgctggagacgagatgcggcaggtgtggcgagtgggcaaactgctttaccctgtgctgcagggcagtcggattcgaggcacggtatgtatgggactacactgaccacgtttggacagaggtctattctccatcgcaacagcgttggttgcattgcgatgcctgcgaggatgtatgcgataagccattgctctatgagattggctggggaaagaagctgtcctacgttattgccttttctaaagatgaggtcgtggacgtgacctggcgatattcctgtaagcatgaagaagtaatcgccagacgaacgaaagtcaaagaggcacttctgagggacactattaacgggctcaataaacagcgacagctatttcttagcgagaatcgcagaaaagagctcctgcagagaatcatagtggaactggtcgagttcatctcacctaagacaccaaaacctggagagctcggaggaagaattagcgggtccgttgcctggcgtgtggcgagaggggagatgggactgcagcgaaaagagactctgtttattccttgtgagaacgaaaagatatcgaagcagctccatttatgttacaatattgtgaaggatcggtatgtgcgcgtgtccaacaataaccagaccatttccggctgggagaatggggtgtggaagatggagagcattttccgcaaagtcgaaactgattggcacatggtatacctggcacgaaaggagggaagtagcttcgcctacatctcctggaagtttgagtgtgggagtgttggactaaaggtagattccatttcaattcgcacctctagccagactttccagacaggcacagtcgagtggaaattgcgcagcgatacagcccaggttgagctgacgggggataacagcttgcactcctacgctgatttctctggggcaacagaggtgatccttgaagctgagctgagccggggtgacggagatgttgcctggcaacatacacaactattccgccaaagcctcaatgatcacgaggaaaactgcctggagattatcattaaattctcagatctctag

SEQ ID NO: 57620 - DNA, 1839 bp, Artificial Sequence
  derived and/or modified sequence
atgagaaaccccaacgacgagaagtacagaagcatcagaatcggcaacaccgccttcagcaccagactgctgcccgtgagaggcgccgtggagtgcctgttcgagatgggcttcgaggagggcgagacccacctgatcttccccaagaaggccagcgtggagcagctgcagaagatcagagacctgatcgccatcgagagaagcagcagactggacggcagcaacaagagccacaaggtgaagagcagccagcagcccgccgccagcacccagctgcccaccacccccagcagcaaccccagcggcctgaaccagcacaccagaaacagacagggccagagcagcgacccccccagcgccagcaccgtggccgccgacagcgccatcctggaggtgctgcagagcaacatccagcacgtgctggtgtacgagaaccccgccctgcaggagaaggccctggcctgcatccccgtgcaggagctgaagagaaagagccaggagaagctgagcagagccagaaagctggacaagggcatcaacatcagcgacgaggacttcctgctgctggagctgctgcactggttcaaggaggagttcttccactgggtgaacaacgtgctgtgcagcaagtgcggcggccagaccagaagcagagacagaagcctgctgcccagcgacgacgagctgaagtggggcgccaaggaggtggaggaccactactgcgacgcctgccagttcagcaacagattccccagatacaacaaccccgagaagctgctggagaccagatgcggcagatgcggcgagtgggccaactgcttcaccctgtgctgcagagccgtgggcttcgaggccagatacgtgtgggactacaccgaccacgtgtggaccgaggtgtacagccccagccagcagagatggctgcactgcgacgcctgcgaggacgtgtgcgacaagcccctgctgtacgagatcggctggggcaagaagctgagctacgtgatcgccttcagcaaggacgaggtggtggacgtgacctggagatacagctgcaagcacgaggaggtgatcgccagaagaaccaaggtgaaggaggccctgctgagagacaccatcaacggcctgaacaagcagagacagctgttcctgagcgagaacagaagaaaggagctgctgcagagaatcatcgtggagctggtggagttcatcagccccaagacccccaagcccggcgagctgggcggcagaatcagcggcagcgtggcctggagagtggccagaggcgagatgggcctgcagagaaaggagaccctgttcatcccctgcgagaacgagaagatcagcaagcagctgcacctgtgctacaacatcgtgaaggacagatacgtgagagtgagcaacaacaaccagaccatcagcggctgggagaacggcgtgtggaagatggagagcatcttcagaaaggtggagaccgactggcacatggtgtacctggccagaaaggagggcagcagcttcgcctacatcagctggaagttcgagtgcggcagcgtgggcctgaaggtggacagcatcagcatcagaaccagcagccagaccttccagaccggcaccgtggagtggaagctgagaagcgacaccgcccaggtggagctgaccggcgacaacagcctgcacagctacgccgacttcagcggcgccaccgaggtgatcctggaggccgagctgagcagaggcgacggcgacgtggcctggcagcacacccagctgttcagacagagcctgaacgaccacgaggagaactgcctggagatcatcatcaagttcagcgacctgtag

SEQ ID NO: 57621 - protein, 558 aa, Artificial Sequence
  derived and/or modified sequence
MAAAALGSSSGSASPAVAELCQNTPETFLEASKLLLTYADNILRNPNDEKYRSIRIGNTAFSTRLLPVRGAVECLFEMGFEEGETHLIFPKKASVEQLQKIRDLIAIERSSRLDGSNKSHKVKSSQQPAASTQLPTTPSSNPSGLNQHTRNRQGQSSDPPSASTVAADSAILEVLQSNIQHVLVYENPALQEKALACIPVQELKRKSQEKLSRARKLDKGINISDEDFLLLELLHWFKEEFFHWVNNVLCSKCGGQTRSRDRSLLPSDDELKWGAKEVEDHYCDACQFSNRFPRYNNPEKLLETRCGRCGEWANCFTLCCRAVGFEARYVWDYTDHVWTEVYSPSQQRWLHCDACEDVCDKPLLYEIGWGKKLSYVIAFSKDEVVDVTWRYSCKHEEVIARRTKVKEALLRDTINGLNKQRQLFLSENRRKELLQRIIVELVEFISPKTPKPGELGGRISGSVAWRVARGEMGLQRKETLFIPCENEKISKQLHLCYNIVKDRYVRVSNNNQTISGWENGVWKMESIFRKVETDWHMITVFTPMLIFLVPLKLFWKQN

SEQ ID NO: 57622 - DNA, 1677 bp, Artificial Sequence
  derived and/or modified sequence
atggccgcggctgccttggggagctccagcgggtccgcaagcccagccgtggctgagttgtgtcagaatactcccgagacattcctggaagccagcaagctcctgctgacttatgccgataacattctgagaaaccccaatgacgagaaatatcgctcaatccgtataggcaataccgccttttccactaggctgttacccgtgcgtggagctgtggagtgtctgtttgaaatgggctttgaggagggcgaaacacacctgatcttccccaagaaggcttccgttgaacagctgcagaagatccgggacctgattgctatagagcggagctcccggttggacggatcaaacaaaagccacaaagtcaagagcagccaacagcccgccgccagtacacagcttcccactacaccctcgagtaatccctcaggtttgaatcagcacacccgcaaccgccaaggacaatcaagtgatcctccaagcgcgagtactgtggctgcagactcggccattctcgaagtgcttcagtcaaacattcagcacgtattggtttatgagaacccagccctgcaggaaaaggcccttgcctgcatcccggtgcaagaactgaaaaggaagtcccaagagaagctgagccgtgctaggaaactggataagggaatcaacatcagtgatgaggatttcctgctattggagctgcttcattggtttaaggaggaatttttccactgggtgaataatgtcttatgctctaagtgcggcggccagaccagatcacgtgaccggtccctgctgccctccgacgatgaacttaaatggggagccaaagaagtggaagatcattactgcgatgcttgtcagttttcaaatagatttccgcgatacaacaatcccgaaaagctgctggaaacacgatgcgggagatgcggagagtgggctaactgtttcacattgtgctgcagagctgtgggctttgaggcacgatatgtttgggattacacagaccacgtgtggacagaagtgtatagccctagtcagcagaggtggctccattgtgacgcctgcgaagacgtttgcgacaagcctctcttatacgagattggttggggcaagaaactgtcatacgtcattgccttcagcaaggacgaagtcgtcgatgtgacttggcgatacagctgtaagcacgaagaagtcatcgccagaaggacaaaagtgaaggaggcactcttgcgcgacacaataaacggtctgaacaagcagaggcagctgttccttagcgaaaatcgtagaaaagaactcctgcagcgcataatcgtagaacttgtggaatttatcagcccaaagactcctaagccaggtgaactaggaggccgcatctcgggctccgtggcatggcgggttgctcggggtgagatggggctccagcgcaaagaaaccctgttcattccttgcgagaacgaaaaaatatccaaacagctacatctctgctacaatatcgtgaaagatagatacgtgagagtgagtaacaacaatcaaactatctcaggctgggagaatggggtgtggaaaatggagagtatttttcgtaaagtggagaccgactggcacatgattactgtttttaccccgatgttaattttcctcgtgccactgaaactcttctggaaacagaactag

SEQ ID NO: 57623 - DNA, 1677 bp, Artificial Sequence
  derived and/or modified sequence
atggctgctgctgccctgggcagcagcagcggcagcgccagccctgctgtggccgagctgtgccagaacaccccagagaccttcctggaggccagcaagctgctgctgacctatgctgacaacatcctgaggaaccccaatgatgagaagtaccgcagcatccgcatcggcaacacagccttcagcacccggctgctgcctgtgagaggagctgtggagtgcctgtttgagatgggctttgaggagggggagacccacctgatcttccccaagaaggcctctgtggagcagctgcagaagatccgggacctgattgccatcgagaggagcagccggctggatggcagcaacaagagccacaaggtgaagagcagccagcagcctgctgccagcacccagctgcccaccacccccagcagcaaccccagcggcctgaaccagcacaccaggaaccggcagggccagagcagtgaccccccatctgccagcacagtggccgctgacagcgccatcctggaggtgctgcagagcaacatccagcacgtgctggtgtatgagaacccagccctgcaggagaaggccctggcctgcatccctgtgcaggagctgaagaggaagagccaggagaagctgagccgggccaggaagctggacaagggcatcaacatcagtgatgaggacttcctgctgctggagctgctgcactggttcaaggaggagttcttccactgggtgaacaacgtgctgtgcagcaaatgtggcggccagaccaggagccgggacaggagcctgctgcccagtgatgatgagctgaagtggggcgccaaggaggtggaggaccactactgtgatgcctgccagttcagcaaccgcttcccccgctacaacaaccctgagaagctgctggagacccgctgtggccgctgtggggagtgggccaactgcttcaccctgtgctgcagagctgtgggctttgaggcccgctacgtgtgggactacacagaccacgtgtggacagaggtgtacagccccagccagcagcgctggctgcactgtgatgcctgtgaagatgtgtgtgacaagcccctgctgtatgaaattggctggggcaagaagctgtcctatgtgattgccttcagcaaggatgaggtggtggatgtgacctggagatacagctgcaagcatgaggaggtgattgcccggaggaccaaggtgaaggaggccctgctgcgggacaccatcaatggcctgaacaagcagaggcagctgttcctgtctgaaaatagaaggaaggagctgctgcagaggatcatcgtggagctggtggagttcatcagccccaagacccccaagccaggagagctgggcggccgcatcagcggctctgtggcctggagggtggcccggggggagatgggcctgcagaggaaggagaccctcttcatcccctgtgaaaatgagaagatcagcaagcagctgcacctgtgctacaacatcgtgaaggaccgctacgtgcgggtgagcaacaacaaccagaccatcagcggctgggagaatggagtgtggaagatggagagcatcttcaggaaggtggagacagactggcacatgatcaccgtcttcacccccatgctgatcttcctggtgcccctgaagctgttctggaagcagaactag

SEQ ID NO: 57624 - DNA, 1677 bp, Artificial Sequence
  derived and/or modified sequence
atggccgccgccgccctgggcagcagcagcggcagcgccagccccgcggtcgccgagctttgccagaatacaccagaaacattcctcgaggccagcaaactgctgctgacatacgctgacaacatcctgcggaatccaaatgacgagaaataccgcagcatccggatcggaaacacagcatttagtacccgcctactacctgtccgaggagcagtggaatgtctgtttgaaatggggtttgaggagggggagacacacctgatattcccaaagaaggcctcagtcgaacagctgcaaaaaattagggatctcattgccattgaacggagcagccggctggatgggagtaataagtcacacaaggtaaagtcctcacagcagcctgccgcttctacgcagttgcccacaacaccctcatcaaaccccagtggactgaaccagcacacaaggaaccggcagggtcaatcatctgatcctccctccgctagcacagtcgcggctgacagcgcgattctggaagtgctgcagtcgaacattcagcacgtgttggtgtatgagaacccggccttgcaggaaaaggccctggcttgtatccctgtgcaggagctgaagcgaaaatcgcaagaaaaacttagcagagctaggaagttggacaaggggatcaatattagcgacgaagactttctgctgctggagttgcttcattggtttaaggaagagttttttcactgggtgaacaacgtactttgctcaaaatgtggcggacagactagatccagagacaggtccttgctgccctctgatgacgagttgaaatggggcgcgaaggaggtggaggaccattattgtgatgcgtgccaattctctaaccggtttccacgttacaacaatcccgaaaagcttctggaaacccggtgcggccgctgtggtgaatgggccaactgcttcaccctgtgctgcagggccgtgggattcgaggcacggtatgtctgggattacacagatcatgtttggacagaggtgtattccccaagccagcagagatggctccactgcgacgcttgtgaggacgtatgcgacaagccactcctgtatgaaatcgggtggggcaagaagctcagctacgtgattgcattttctaaggacgaggtcgtcgatgtgacttggagatatagctgtaagcatgaagaggtcatagctcggcgaactaaagttaaagaggccctgcttagagacactattaacggtctgaataagcaaagacagcttttcttgtctgaaaataggcgaaaagagctgctgcaacgtatcatcgtggaactggtagaattcatcagccccaagactcccaaacctggggaattaggtggccggattagcgggtctgtagcatggagagtggcccggggagaaatgggcctgcaaaggaaagagaccttgtttattccatgtgaaaatgagaaaatcagtaagcagctccatctctgttataacatcgttaaagaccggtatgtgagagtgtccaacaataatcaaacaattagtgggtgggaaaacggcgtctggaagatggaatcaatcttccgtaaggtggaaactgattggcacatgattactgtgtttacgcccatgctgatcttcctggtcccactgaaactgttctggaaacagaactag

SEQ ID NO: 57625 - DNA, 2024 bp, Artificial Sequence
  derived and/or modified sequence
gggacgcggagagcgaggggcggcggcggcgcccgctggcgctcaagcatggcggcggcggcattgggcagctcctcaggctcggcgtccccggccgtggctgagctctgccagaacaccccggagacctttttggaggcctccaagctgctgctcacctatgctgacaacatcctcagaaaccctaatgatgaaaaatatagatccatccggattggaaacacagccttttctactagactcttgcctgtcagaggagctgttgaatgtttatttgaaatgggctttgaagagggagaaacacatctcatctttcctaaaaaagcttcagtggagcagctgcaaaaaattcgtgacctgattgccatagagagaagtagcagactggatggctcaaataagagccacaaagtaaagtcatctcagcaacctgcagccagtacccagcttcctacaacaccatcttcaaatcccagtgggttaaaccagcacacaaggaaccgtcaagggcagtcatcagatccaccatctgcttcaacggttgctgctgactcagccattctagaagttcttcagtccaacattcagcatgtgctggtctatgaaaatcctgctcttcaggagaaagcgttggcttgtattccggtccaagaactaaaaaggaaatcacaagaaaagttatcgagagctagaaaattggataaaggtatcaatataagtgatgaggattttcttttgctggagcttttgcactggtttaaggaagaattttttcactgggtgaataacgttttgtgcagcaaatgtggtggacagactaggtctagagatagatcattactgcccagtgatgatgagctgaagtggggtgcaaaggaagtggaagatcattactgtgatgcctgccagttcagcaatcgattcccaagatataataaccctgagaaacttttggaaacaagatgtggacggtgtggcgagtgggccaattgttttacactgtgctgccgagctgtagggtttgaagctcgctatgtttgggattacacagaccatgtctggacagaagtctattctccttctcagcagcggtggctgcactgtgatgcatgtgaagatgtctgtgacaagccactcctttatgaaataggatggggcaagaagctttcctatgtcatagcattttcaaaagatgaggtagttgatgtcacttggcgatattcctgcaaacatgaagaggtgattgccagaagaactaaggttaaagaagcattacttcgagacactattaatgggcttaataagcagaggcaactgtttttgtcagaaaacagaaggaaagaacttctccagaggataattgtggagcttgttgaatttatatctcccaaaacccctaaacctggagaacttgggggaagaatatctgggtcagtggcttggagagtagcccgaggtgaaatgggtctacagagaaaagaaaccttgtttattccctgtgaaaatgagaagatttctaaacagctccacctttgttacaatattgtgaaagatcgttatgttcgagtttcaaataacaatcaaaccatttctggatgggagaatggcgtgtggaaaatggaatctatattcagaaaagttgaaacagactggcacatgataacagtcttcactcctatgctgatttttctggtgccactgaagttattttggaagcagaattaagcagaggagatggtgatgtcgcttggcaacacacccagctgtttagacaaagcttaaatgaccatgaagaaaattgtttggagataattataaaattcagtgacctttgagaacctgaacattatagaaaagctggcaataatcaaggacttactgaagtagtctgttggttcagtgcatgcttagttggcagttaccaccctgtgctagcatatttcttttgctagctatccatcatgtaaccctcatgaaaattatctttatacgtggactataataaaatattgaattaaaacctt

SEQ ID NO: 57626 - DNA, 1677 bp, Artificial Sequence
  derived and/or modified sequence
atggcagctgctgcccttggatcctcttcaggttcagcctctccagctgtggccgaattatgtcagaatacaccggagacttttctcgaagcctctaaattgcttctgacgtacgccgataacattctgcgcaaccctaacgatgagaagtatcgaagcattcggatcgggaacaccgcatttagcaccaggctcctcccggtccggggtgccgtagagtgtcttttcgaaatgggtttcgaagagggcgagacacacctgatcttcccaaaaaaggcatccgttgaacaactgcagaaaattagagacctcatcgctattgaacgctcctcacggctggacggatctaataaatcccataaagtgaaatctagccaacagccggcagcttcaacacagttgcccacaactccctcttcaaatccgtctgggctgaaccagcacacaaggaaccgacagggccagtcatccgatcctccttccgccagcactgtcgccgctgatagcgccatcttagaggtgctgcagagtaacatccagcacgtgctggtctatgaaaatcctgctttgcaggagaaggcattagcttgcatacccgtccaggaattgaagcgcaagagtcaggaaaagctgtcaagggccaggaagctggacaaggggattaacatcagtgatgaggattttctcttgctcgaactactgcactggtttaaagaagagtttttccattgggtgaacaacgtactctgtagtaagtgtgggggtcagacgcgtagcagagatcggtcgctcctcccatcggacgacgaattgaaatggggagccaaggaggttgaggaccactactgcgacgcctgtcagttctccaatagattccctagatacaataatccagagaaacttctggagacccgatgtggcaggtgcggagagtgggccaattgctttacactgtgttgccgggcagttgggtttgaggcacgatatgtttgggattacacagaccacgtttggacagaggtgtattccccaagtcaacagagatggctgcactgtgacgcctgtgaggacgtctgtgataagccactgctgtatgagattgggtggggcaaaaagctgtcatatgtgatcgctttctccaaggatgaagtggtggatgtgacatggagatattcgtgtaaacacgaggaagtgatcgccaggcgaaccaaggtgaaggaggccctactccgagatactatcaacggattaaataagcagaggcagctttttctctcagagaatcgcagaaaagagttactacagaggataatcgttgaactcgttgagtttatttcccctaaaactccaaaaccaggggaactcgggggtcgcatctccggctctgtagcttggagagtggccaggggagagatgggccttcagaggaaggaaaccctctttatcccatgtgaaaacgaaaaaatcagcaagcagctgcatctctgttataatatcgtcaaagacaggtatgtgagagtttcaaacaacaatcagaccattagcggttgggagaatggtgtctggaaaatggaaagcatcttcagaaaggttgagacagattggcatatgattacggttttcacccccatgctaatttttctggtcccccttaaacttttctggaaacagaattag

SEQ ID NO: 57627 - DNA, 1677 bp, Artificial Sequence
  derived and/or modified sequence
atggccgccgccgccctgggcagcagcagcggcagcgccagccccgccgtggccgagctgtgccagaacacccccgagaccttcctggaggccagcaagctgctgctgacctacgccgacaacatcctgagaaaccccaacgacgagaagtacagaagcatcagaatcggcaacaccgccttcagcaccagactgctgcccgtgagaggcgccgtggagtgcctgttcgagatgggcttcgaggagggcgagacccacctgatcttccccaagaaggccagcgtggagcagctgcagaagatcagagacctgatcgccatcgagagaagcagcagactggacggcagcaacaagagccacaaggtgaagagcagccagcagcccgccgccagcacccagctgcccaccacccccagcagcaaccccagcggcctgaaccagcacaccagaaacagacagggccagagcagcgacccccccagcgccagcaccgtggccgccgacagcgccatcctggaggtgctgcagagcaacatccagcacgtgctggtgtacgagaaccccgccctgcaggagaaggccctggcctgcatccccgtgcaggagctgaagagaaagagccaggagaagctgagcagagccagaaagctggacaagggcatcaacatcagcgacgaggacttcctgctgctggagctgctgcactggttcaaggaggagttcttccactgggtgaacaacgtgctgtgcagcaagtgcggcggccagaccagaagcagagacagaagcctgctgcccagcgacgacgagctgaagtggggcgccaaggaggtggaggaccactactgcgacgcctgccagttcagcaacagattccccagatacaacaaccccgagaagctgctggagaccagatgcggcagatgcggcgagtgggccaactgcttcaccctgtgctgcagagccgtgggcttcgaggccagatacgtgtgggactacaccgaccacgtgtggaccgaggtgtacagccccagccagcagagatggctgcactgcgacgcctgcgaggacgtgtgcgacaagcccctgctgtacgagatcggctggggcaagaagctgagctacgtgatcgccttcagcaaggacgaggtggtggacgtgacctggagatacagctgcaagcacgaggaggtgatcgccagaagaaccaaggtgaaggaggccctgctgagagacaccatcaacggcctgaacaagcagagacagctgttcctgagcgagaacagaagaaaggagctgctgcagagaatcatcgtggagctggtggagttcatcagccccaagacccccaagcccggcgagctgggcggcagaatcagcggcagcgtggcctggagagtggccagaggcgagatgggcctgcagagaaaggagaccctgttcatcccctgcgagaacgagaagatcagcaagcagctgcacctgtgctacaacatcgtgaaggacagatacgtgagagtgagcaacaacaaccagaccatcagcggctgggagaacggcgtgtggaagatggagagcatcttcagaaaggtggagaccgactggcacatgatcaccgtgttcacccccatgctgatcttcctggtgcccctgaagctgttctggaagcagaactag

SEQ ID NO: 57628 - protein, 735 aa, Artificial Sequence
  derived and/or modified sequence
MIPPQEASARRREIEDKLKQEEETLSFIRDSLEKSDQLTKNMVSILSSFESRLMKLENSIIPVHKQTENLQRLQENVEKTLSCLDHVISYYHVASDTEKIIREGPTGRLEEYLGSMAKIQKAVEYFQDNSPDSPELNKVKLLFERGKEALESEFRSLMTRHSKVVSPVLILDLISGDDDLEAQEDVTLEHLPESVLQDVIRISRWLVEYGRNQDFMNVYYQIRSSQLDRSIKGLKEHFHKSSSSSGVPYSPAIPNKRKDTPTKKPVKRPGTIRKAQNLLKQYSQHGLDGKKGGSNLIPLEGLLPCTPRGGLPGPWINAACVCAADISPGHEHDFRVKHLSEALNDKHGPLAGRDDMLDVETDAYIHCVSAFVKLAQSEYQLLADIIPEHHQKKTFDSLIQDALDGLMLEGENIVSAARKAIVRHDFSTVLTVFPILRHLKQTKPEFDQVLQGTAASTKNKLPGLITSMETIGAKALEDFADNIKNDPDKEYNMPKDGTVHELTSNAILFLQQLLDFQETAGAMLASQETSSSATSYSSEFSKRLLSTYICKVLGNLQLNLLSKSKVYEDPALSAIFLHNNYNYILKSLEKSELIQLVAVTQKTAERSYREHIEQQIQTYQRSWLKVTDYIAEKNLPVFQPGVKLRDKERQIIKERFKGFNDGLEELCKIQKAWAIPDTEQRDRIRQAQKTIVKETYGAFLQKFGSVPFTKNPEKYIKYGVEQVGDMIDRLFDTSA

SEQ ID NO: 57629 - DNA, 2208 bp, Artificial Sequence
  derived and/or modified sequence
atgatccccccccaggaggccagcgccagaagaagagagatcgaggacaagctgaagcaggaggaggagaccctgagcttcatcagagacagcctggagaagagcgaccagctgaccaagaacatggtgagcatcctgagcagcttcgagagcagactgatgaagctggagaacagcatcatccccgtgcacaagcagaccgagaacctgcagagactgcaggagaacgtggagaagaccctgagctgcctggaccacgtgatcagctactaccacgtggccagcgacaccgagaagatcatcagagagggccccaccggcagactggaggagtacctgggcagcatggccaagatccagaaggccgtggagtacttccaggacaacagccccgacagccccgagctgaacaaggtgaagctgctgttcgagagaggcaaggaggccctggagagcgagttcagaagcctgatgaccagacacagcaaggtggtgagccccgtgctgatcctggacctgatcagcggcgacgacgacctggaggcccaggaggacgtgaccctggagcacctgcccgagagcgtgctgcaggacgtgatcagaatcagcagatggctggtggagtacggcagaaaccaggacttcatgaacgtgtactaccagatcagaagcagccagctggacagaagcatcaagggcctgaaggagcacttccacaagagcagcagcagcagcggcgtgccctacagccccgccatccccaacaagagaaaggacacccccaccaagaagcccgtgaagagacccggcaccatcagaaaggcccagaacctgctgaagcagtacagccagcacggcctggacggcaagaagggcggcagcaacctgatccccctggagggcctgctgccctgcacccccagaggcggcctgcccggcccctggatcaacgccgcctgcgtgtgcgccgccgacatcagccccggccacgagcacgacttcagagtgaagcacctgagcgaggccctgaacgacaagcacggccccctggccggcagagacgacatgctggacgtggagaccgacgcctacatccactgcgtgagcgccttcgtgaagctggcccagagcgagtaccagctgctggccgacatcatccccgagcaccaccagaagaagaccttcgacagcctgatccaggacgccctggacggcctgatgctggagggcgagaacatcgtgagcgccgccagaaaggccatcgtgagacacgacttcagcaccgtgctgaccgtgttccccatcctgagacacctgaagcagaccaagcccgagttcgaccaggtgctgcagggcaccgccgccagcaccaagaacaagctgcccggcctgatcaccagcatggagaccatcggcgccaaggccctggaggacttcgccgacaacatcaagaacgaccccgacaaggagtacaacatgcccaaggacggcaccgtgcacgagctgaccagcaacgccatcctgttcctgcagcagctgctggacttccaggagaccgccggcgccatgctggccagccaggagaccagcagcagcgccaccagctacagcagcgagttcagcaagagactgctgagcacctacatctgcaaggtgctgggcaacctgcagctgaacctgctgagcaagagcaaggtgtacgaggaccccgccctgagcgccatcttcctgcacaacaactacaactacatcctgaagagcctggagaagagcgagctgatccagctggtggccgtgacccagaagaccgccgagagaagctacagagagcacatcgagcagcagatccagacctaccagagaagctggctgaaggtgaccgactacatcgccgagaagaacctgcccgtgttccagcccggcgtgaagctgagagacaaggagagacagatcatcaaggagagattcaagggcttcaacgacggcctggaggagctgtgcaagatccagaaggcctgggccatccccgacaccgagcagagagacagaatcagacaggcccagaagaccatcgtgaaggagacctacggcgccttcctgcagaagttcggcagcgtgcccttcaccaagaaccccgagaagtacatcaagtacggcgtggagcaggtgggcgacatgatcgacagactgttcgacaccagcgcctag

SEQ ID NO: 57630 - DNA, 2332 bp, Artificial Sequence
  derived and/or modified sequence
ggtgggcccgcggaggaaagatactggggagtgggagccgcggggttcagagcgatgattcccccacaggaggcatccgctcgacggcgggagattgaggacaagctgaagcaggaggaggagactctgtccttcatccgagacagcctggagaagagcgaccagctcactaagaacatggtgtctatcttatcatcctttgagagccgccttatgaagctggagaactccatcatccctgtgcacaagcagacggagaatctgcagcggctgcaggagaatgttgagaagacgctgtcctgcctggaccatgtcatcagctactaccatgtggccagtgacactgagaagatcatcagagagggccccacaggtaggctggaagagtacctgggaagcatggccaagattcagaaggcagtggagtatttccaggacaacagcccagacagcccggaactcaacaaagtgaaactgctctttgagcgcgggaaggaggccctggagtccgaatttcgcagcctgatgacgcggcacagtaaggtcgtctcgcccgtgctcatcttggatctgatcagtggtgacgatgatctggaggcccaggaggacgtgaccctggagcacctgcccgagagcgtgctccaggatgtcattcgcatctcccgctggctggtggaatatggccgcaaccaagatttcatgaacgtctactaccagatacgctccagccagctggaccgctccatcaaaggactgaaggagcatttccataagagcagttcttcctctggggttccctactcccctgctatccccaacaagaggaaagacacacctaccaagaagccagtcaagcggccagggacgatccgtaaggctcagaaccttctgaaacagtattcccagcatggtctagatgggaaaaaggggggctctaacctcattcctctggaagggcttcttccctgtaccccaaggggcggcctgcctggcccctggataaacgctgcttgtgtttgtgcggccgacatctcgccaggtcacgagcatgatttccgagttaagcacctgtccgaggccttgaacgacaagcacgggccgctggccgggagagatgacatgctggacgtggagaccgatgcctacatccactgcgtcagtgccttcgtcaagctggcgcagagcgagtaccagctgctggccgacatcatccccgagcaccaccagaagaagaccttcgactccctgatacaggatgccctggatgggctgatgcttgaaggggagaacatcgtgtctgctgcccggaaggccattgtgcgacacgacttctccacggtgctcaccgtcttccccatcctgcgacacctcaagcagaccaagcctgagtttgaccaggtgctccagggcacggctgccagcacaaagaacaagctgcctggcctcatcacatccatggagaccatcggtgccaaagcgctggaggacttcgcagacaacatcaagaatgacccggacaaggagtacaacatgccgaaggacggcaccgtacacgagctcaccagcaatgccatcctcttcctgcagcagcttttggacttccaggagacggcaggcgccatgctggcctcccaagagaccagctcttcggccaccagctacagctctgagttcagcaagcggctgctaagcacctatatctgtaaagtgctgggcaacctgcagttgaacttgctgagcaagtccaaggtgtacgaggacccagctctgagcgccatcttcctgcacaacaactacaattacatcctcaagtccctggagaagtctgaactgatccagctggtggcagtgacacagaagactgctgagcgctcctaccgggagcacattgagcagcagatccagacctaccagcgcagctggttaaaggtgactgattacatcgcagagaagaatctacctgtgttccagccgggagtcaagctccgggacaaggagcggcagattatcaaggagcgttttaagggcttcaatgatggcctcgaagaactgtgcaaaatccagaaggcctgggctattccagacacagagcagagggacaggattcgccaggcccagaagaccattgtcaaggagacctacggggcctttctacagaagtttggcagcgtgcccttcaccaagaacccggagaagtacatcaagtacggggtggagcaggtgggcgacatgatcgatcgccttttcgacacctctgcctgagcctgctgctagccctgcctggttccaccagactggcgtgtcattggacagataaaccagtgttagcttg

SEQ ID NO: 57631 - DNA, 2208 bp, Artificial Sequence
  derived and/or modified sequence
atgatccccccacaggaggcgagcgctagaagaagggagatcgaagacaaacttaagcaggaggaggagacactgtccttcatccgcgactcactggagaagagtgaccagctgaccaagaatatggtatctattctttcgagtttcgaaagcagacttatgaaacttgagaactcgattatcccagtgcacaagcagactgagaacttgcagaggttgcaagagaacgtcgagaaaacgttgtcctgtttggaccatgttatctcttactatcacgtagcttccgacaccgagaaaatcattcgggaaggaccaacgggacgtctggaggaatatctgggttcaatggctaaaatacagaaggccgtagagtatttccaggataattcccctgacagccccgagttgaataaggtgaaacttctgttcgaaaggggtaaagaggctctcgaaagtgagttccgatcattgatgacacgccatagtaaagtggtgtcacctgtccttatccttgatctcattagtggcgacgacgacttagaagctcaggaagatgtgaccctggaacatctgccggagtctgtcctccaagatgtgatccgcataagcagatggttggtcgaatacggacggaaccaggatttcatgaatgtgtattaccagataaggtcttctcagctggaccgatcaatcaaggggctgaaagaacactttcataagagctcatcgagttccggtgttccctattcgccggccataccaaataagcgcaaggacaccccaacaaagaagcctgtgaagcgccccgggactattcgcaaggctcagaatctgctgaaacaatactcccagcacggacttgacgggaaaaaaggcggctcaaacctgatacctctggagggactgctgccctgtacaccacggggggggttgcccggaccgtggataaacgcagcgtgtgtgtgtgctgccgatatttccccgggccatgaacatgacttccgggttaagcatttgtctgaggccttgaacgacaagcacggccccctggcaggtagagacgacatgctcgacgtggagaccgatgcatatatccattgtgtgtccgctttcgtcaaactggcacaaagtgagtatcagctgcttgctgacatcattcctgagcaccatcagaagaaaacattcgacagtctgatccaggacgctctcgatgggctgatgcttgagggagaaaatatagtgagtgccgcgcgaaaagccatcgtcaggcatgatttttccacagtgctcaccgttttccctatactgaggcatttgaagcagaccaagccggaattcgaccaagtgctgcagggcacagccgctagcaccaagaataagttgccaggccttatcacttcaatggaaacaatcggcgccaaagcgctagaggacttcgccgacaacatcaagaacgacccggataaagagtataacatgcctaaggacgggactgtgcacgaactgacttccaatgccattcttttcctgcagcagctgctagattttcaggagactgcgggtgcgatgctggctagccaggaaacgtcctcctctgcaacctcctattcttcggagttcagcaagcggctgctgagcacctacatttgtaaggtgttaggcaatcttcagctcaacttgctttccaaatccaaagtgtatgaggatcccgccctttccgcaatttttctgcacaataattataactacatactgaagtcgcttgagaagtctgaactaatccaactcgtagcagtgacacagaagactgccgaacgcagctatcgggagcacatagaacaacagatacagacctatcagcgttcatggttgaaagtaaccgactatattgccgaaaaaaacctccctgtgttccagccaggcgtgaagctgcgtgataaggaaagacagatcattaaggaacgatttaagggcttcaacgatgggctggaagaactgtgcaaaatccagaaggcgtgggctattcccgacactgaacaaagagaccgtataagacaggcacagaagaccatagtgaaagagacctacggtgctttcctgcagaagttcggatccgtgcctttcacgaagaacccagaaaagtatatcaagtacggtgtggagcaggtaggtgacatgatagaccggctatttgacacttccgcctag

SEQ ID NO: 57632 - DNA, 2208 bp, Artificial Sequence
  derived and/or modified sequence
atgatccccccccaggaggccagcgccaggagaagagaaattgaggacaagctgaagcaggaggaggagaccctgtccttcatccgggacagcctggagaagagtgaccagctgaccaagaacatggtgtccatcctgagcagctttgagagccggctgatgaagctggagaacagcatcatccctgtgcacaagcagacagagaacctgcagaggctgcaggagaatgtggagaagaccctgagctgcctggaccacgtgatctcctactaccacgtggccagtgacacagagaagatcatccgggagggccccaccggccgcctggaggagtacctgggctccatggccaagatccagaaggctgtggagtacttccaggacaacagcccagacagccctgagctgaacaaggtgaagctgctgtttgagcggggcaaggaggccctggagagcgagttccgcagcctgatgaccaggcacagcaaggtggtgtcccctgtgctgatcctggacctgatctctggagatgatgacctggaggcccaggaggatgtgaccctggagcacctgcctgagagcgtgctgcaggacgtcatccgcatcagccgctggctggtggagtatggaagaaaccaggacttcatgaatgtgtactaccagatccgcagcagccagctggacaggagcatcaagggcctgaaggagcacttccacaagagcagcagcagcagtggagtgccctacagccctgccatccccaacaagaggaaggacacccccaccaagaagcctgtgaagaggcctggcaccatcaggaaggcccagaacctgctgaagcagtacagccagcacggcctggatggcaagaagggcggcagcaacctgatccccctggagggcctgctgccctgcaccccccggggcggcctgcccggcccctggatcaatgctgcctgtgtgtgtgccgctgacatcagccctggccacgagcatgacttccgggtgaagcacctgtctgaggccctgaatgacaagcacggccccctggccggcagagatgacatgctggatgtggagacagatgcctacatccactgtgtgtctgcctttgtgaagctggcccagagcgagtaccagctgctggccgacatcatccctgagcaccaccagaagaagacctttgacagcctcatccaggatgccctggatggcctgatgctggagggagaaaatattgtgtctgctgccaggaaggccatcgtgagacatgacttcagcacagtgctgactgtgttccccatcctgcggcacctgaagcagaccaagccagagtttgaccaggtgctgcagggcacagctgccagcaccaagaacaagctgcccggcctcatcacctccatggagaccatcggggccaaggccctggaggactttgctgacaacatcaagaatgaccctgacaaggagtacaacatgcccaaggatggcaccgtgcatgagctgaccagcaatgccatcctcttcctgcagcagctgctggacttccaggagacagctggggccatgctggccagccaggagaccagcagcagcgccaccagctacagcagcgagttcagcaagaggctgctgagcacctacatctgcaaggtgctgggcaacctgcagctgaacctgctgagcaagagcaaggtgtatgaggaccctgccctgagcgccatcttcctgcacaacaactacaactacatcctgaagagcctggagaagtctgagctgatccagctggtggccgtgacccagaagacagctgagaggagctaccgggagcacatcgagcagcagatccagacctaccagaggtcctggctgaaggtgacagactacatcgccgagaagaacctgcccgtcttccagcccggggtgaagctgcgggacaaggagcggcagatcatcaaggagcgcttcaagggcttcaatgatggcctggaggagctgtgcaagatccagaaggcctgggccatcccagacacagagcagagggaccgcatccggcaggcccagaagaccatcgtgaaggagacctacggggccttcctgcagaagtttggatctgtgcccttcaccaagaaccctgagaagtacatcaagtatggagtggagcaggtgggggacatgattgaccggctgtttgacaccagcgcctag

SEQ ID NO: 57633 - DNA, 2208 bp, Artificial Sequence
  derived and/or modified sequence
atgatccccccccaggaggccagcgcccggcggcgggagatcgaggacaaactcaaacaagaggaggagaccctgtcttttatccgcgactctctcgaaaaatcagaccagctgaccaaaaacatggtgtcaatactctcaagtttcgagtcgcgcctgatgaagctggaaaattctatcatccctgtccacaaacagactgaaaacctacagagactgcaggagaacgtagagaagacactcagctgtctggaccacgtcatttcttactatcatgttgcatctgacaccgaaaaaattatacgcgaaggccctaccggccgcctagaggaatacctaggatcaatggctaaaattcagaaagccgtggagtattttcaggacaactccccggacagtcctgagttgaataaagtcaaacttctgttcgagcggggcaaggaagccctggagtccgagttccggtccctgatgacacgacactccaaggtcgtgtcccccgtcttgatcctggacctcatctctggtgatgatgacctagaggcgcaggaagacgttactctcgagcatctccccgaaagtgtgcttcaggacgtcatcaggataagtagatggctggtggaatacggccgcaaccaggacttcatgaatgtgtattaccagatacggtccagccaactggatcgcagcatcaaaggccttaaggaacattttcacaaaagctcaagttcgagcggtgtgccttactccccagctatacctaataagcgaaaagataccccaacaaagaagccagtgaagcgccctggcaccattcggaaggcccagaatcttcttaagcaatactcacagcacggcctggatggtaagaaaggaggaagcaatctcattccattggaaggcctgctcccttgcacccctaggggcgggttaccggggccttggataaacgccgcttgcgtttgtgctgccgacatttctcctggtcacgagcatgatttccgcgtgaaacacctgtcagaagcactgaatgacaaacacggtcctttagccggccgggacgacatgttggacgtggagacagacgcttatatacactgcgtttcggcctttgttaaactggctcagtctgagtaccagctcctggctgatatcatccctgagcaccaccagaaaaagacttttgactccctgatccaggacgctcttgatggacttatgcttgagggggaaaatatagtttctgccgctaggaaagctattgtacgccacgacttctcaactgtgctgacagttttccccatactgcggcacttgaagcagaccaagcctgagttcgaccaggtcttgcaaggcacagccgctagcactaagaacaagctgccaggactgatcaccagcatggagactataggcgcaaaggccctggaggactttgcggacaatatcaagaacgatcccgataaggaatataatatgcctaaagacgggactgtccatgagctgacctctaacgcaatactgttcctccagcaattgctggacttccaagagaccgccggcgccatgctggcctcccaagagaccagttccagcgccacatcatattcaagcgagttcagcaagcgcttactcagcacctacatctgcaaagtgctagggaacctgcagttgaatttactgagcaagtctaaagtctacgaagatccagctttgtctgcaatttttctccataacaactacaactacattctgaaatccctggagaaaagtgagctgatacagctggtggctgtgacccaaaagacagcggaaaggagctaccgggagcacattgaacagcagatacagacctaccagcgatcttggttgaaagtgactgactatatcgctgagaagaacctgcccgtgttccaacctggggttaaactacgagataaggaacgccagatcattaaagagcgatttaagggttttaatgatggactcgaggaactctgcaaaatacagaaggcgtgggccatacctgacaccgaacagagagatagaattagacaggcacagaagactatcgtaaaggagacatatggtgcatttttgcagaaatttggcagcgtccccttcacgaaaaatccggaaaagtatattaaatacggcgtcgagcaggtaggcgatatgatagaccgactatttgatacgtccgcatag

SEQ ID NO: 57634 - DNA, 2208 bp, Artificial Sequence
  derived and/or modified sequence
atgattccccctcaggaagctagcgccaggcgccgtgagatcgaagacaaattaaagcaggaggaggagaccctgtctttcatcagggattccctggaaaaatctgatcaactgacaaagaacatggtctcaatccttagcagctttgaaagcaggctaatgaaactggaaaattcaatcattcccgtccataagcagaccgagaaccttcagaggttgcaggaaaacgttgagaagacactttcgtgccttgaccatgtgatcagttattaccacgttgctagcgataccgaaaaaattattcgcgagggtccgaccggtagactggaggagtatttgggctctatggccaagatccagaaggccgtggaatattttcaggataattcgcccgactcacctgaactcaacaaagtgaagctgctgtttgagcgcggaaaggaagcgctggagtctgagtttcggagcctgatgacacgtcacagcaaggtggtttccccagtgttgattctggacctaatcagcggagacgatgacctggaggcacaggaggatgtaaccttggagcaccttcctgagagcgtcctgcaagacgtcatcagaatatctaggtggcttgtggagtacggtcgaaaccaagattttatgaatgtttattaccaaatcaggtctagccagttggatcgcagcattaaagggttgaaagaacactttcacaaatcgtcttcctcatcaggggtgccatactcgccggctattcccaataagcgcaaagatacccctaccaagaagcccgttaaacgtcctggaacgatcagaaaagcgcagaatttactgaagcaatactcccagcacggcctggatggtaagaagggtggctcaaacctgattcccctcgaggggctgctcccctgcacccctagaggagggctgcccggaccgtggatcaatgccgcatgtgtgtgcgcagctgatatctctcccggacacgagcatgattttagggtaaaacacttatcagaagctctcaacgataagcacggcccacttgctggacgcgatgatatgctcgatgtcgagacggacgcatatatccactgtgtgtcggctttcgtaaagttagcacagagtgaatatcagcttctggccgacatcatccctgagcaccaccagaagaagacctttgacagtctaatccaggacgcgctcgacgggctgatgcttgaaggagaaaacattgtgagcgccgctcgaaaagccatagttcgacacgacttttcaaccgttctcacagtgttccccatcttgagacacctgaagcaaaccaagcctgagtttgatcaagtcttgcagggcaccgcagcctctaccaaaaataaattacctggcttgatcacaagcatggagacaataggtgccaaggccctggaggatttcgccgacaatataaagaatgatccggacaaggagtacaacatgcccaaggacggaactgtgcacgagctgacctctaacgccatcctgtttttacagcaactgttggattttcaagagactgccggagcgatgctggcctcacaggagacatcaagttcggctacctcgtattcaagcgagttctcgaagcgtttactatccacctacatatgcaaagtgctgggtaacctgcagctgaacctcctaagcaagtccaaggtgtacgaggatccagctctgtctgcaatctttcttcacaacaactataactacatcctgaaatcactggaaaagagcgagctaatccagctggttgctgtgactcagaagacagcggagagaagttaccgagagcatatcgagcagcagatccagacgtaccagaggagttggctgaaagttaccgattatattgctgagaagaatctgcccgtgtttcagcccggtgtcaagttgcgcgataaagaacggcagataatcaaagaacggtttaagggattcaatgacggtctggaggaactgtgtaagatccaaaaggcttgggccatcccggatacggaacagagagaccgtattagacaggcacagaaaacgattgtgaaggagacctacggagcctttctgcaaaagtttggcagtgtgccattcacaaagaacccagaaaagtatattaagtatggtgttgaacaggtcggtgatatgattgacagacttttcgacacttctgcctag

SEQ ID NO: 57635 - protein, 676 aa, Artificial Sequence
  derived and/or modified sequence
MIPPQEASARRREIEDKLKQEEETLSFIRDSLEKSDQLTKNMVSILSSFESRLMKLENSIIPVHKQTENLQRLQENVEKTLSCLDHVISYYHVASDTEKIIREGPTGRLEEYLGSMAKIQKAVEYFQDNSPDSPELNKVKLLFERGKEALESEFRSLMTRHSKVVSPVLILDLISGDDDLEAQEDVTLEHLPESVLQDVIRISRWLVEYGRNQDFMNVYYQIRSSQLDRSIKGLKEHFHKSSSSSGVPYSPAIPNKRKDTPTKKPVKRPGHEHDFRVKHLSEALNDKHGPLAGRDDMLDVETDAYIHCVSAFVKLAQSEYQLLADIIPEHHQKKTFDSLIQDALDGLMLEGENIVSAARKAIVRHDFSTVLTVFPILRHLKQTKPEFDQVLQGTAASTKNKLPGLITSMETIGAKALEDFADNIKNDPDKEYNMPKDGTVHELTSNAILFLQQLLDFQETAGAMLASQETSSSATSYSSEFSKRLLSTYICKVLGNLQLNLLSKSKVYEDPALSAIFLHNNYNYILKSLEKSELIQLVAVTQKTAERSYREHIEQQIQTYQRSWLKVTDYIAEKNLPVFQPGVKLRDKERQIIKERFKGFNDGLEELCKIQKAWAIPDTEQRDRIRQAQKTIVKETYGAFLQKFGSVPFTKNPEKYIKYGVEQVGDMIDRLFDTSA

SEQ ID NO: 57636 - DNA, 2031 bp, Artificial Sequence
  derived and/or modified sequence
atgatccccccccaggaggccagcgccagaagaagagagatcgaggacaagctgaagcaggaggaggagaccctgagcttcatcagagacagcctggagaagagcgaccagctgaccaagaacatggtgagcatcctgagcagcttcgagagcagactgatgaagctggagaacagcatcatccccgtgcacaagcagaccgagaacctgcagagactgcaggagaacgtggagaagaccctgagctgcctggaccacgtgatcagctactaccacgtggccagcgacaccgagaagatcatcagagagggccccaccggcagactggaggagtacctgggcagcatggccaagatccagaaggccgtggagtacttccaggacaacagccccgacagccccgagctgaacaaggtgaagctgctgttcgagagaggcaaggaggccctggagagcgagttcagaagcctgatgaccagacacagcaaggtggtgagccccgtgctgatcctggacctgatcagcggcgacgacgacctggaggcccaggaggacgtgaccctggagcacctgcccgagagcgtgctgcaggacgtgatcagaatcagcagatggctggtggagtacggcagaaaccaggacttcatgaacgtgtactaccagatcagaagcagccagctggacagaagcatcaagggcctgaaggagcacttccacaagagcagcagcagcagcggcgtgccctacagccccgccatccccaacaagagaaaggacacccccaccaagaagcccgtgaagagacccggccacgagcacgacttcagagtgaagcacctgagcgaggccctgaacgacaagcacggccccctggccggcagagacgacatgctggacgtggagaccgacgcctacatccactgcgtgagcgccttcgtgaagctggcccagagcgagtaccagctgctggccgacatcatccccgagcaccaccagaagaagaccttcgacagcctgatccaggacgccctggacggcctgatgctggagggcgagaacatcgtgagcgccgccagaaaggccatcgtgagacacgacttcagcaccgtgctgaccgtgttccccatcctgagacacctgaagcagaccaagcccgagttcgaccaggtgctgcagggcaccgccgccagcaccaagaacaagctgcccggcctgatcaccagcatggagaccatcggcgccaaggccctggaggacttcgccgacaacatcaagaacgaccccgacaaggagtacaacatgcccaaggacggcaccgtgcacgagctgaccagcaacgccatcctgttcctgcagcagctgctggacttccaggagaccgccggcgccatgctggccagccaggagaccagcagcagcgccaccagctacagcagcgagttcagcaagagactgctgagcacctacatctgcaaggtgctgggcaacctgcagctgaacctgctgagcaagagcaaggtgtacgaggaccccgccctgagcgccatcttcctgcacaacaactacaactacatcctgaagagcctggagaagagcgagctgatccagctggtggccgtgacccagaagaccgccgagagaagctacagagagcacatcgagcagcagatccagacctaccagagaagctggctgaaggtgaccgactacatcgccgagaagaacctgcccgtgttccagcccggcgtgaagctgagagacaaggagagacagatcatcaaggagagattcaagggcttcaacgacggcctggaggagctgtgcaagatccagaaggcctgggccatccccgacaccgagcagagagacagaatcagacaggcccagaagaccatcgtgaaggagacctacggcgccttcctgcagaagttcggcagcgtgcccttcaccaagaaccccgagaagtacatcaagtacggcgtggagcaggtgggcgacatgatcgacagactgttcgacaccagcgcctag

SEQ ID NO: 57637 - DNA, 2031 bp, Artificial Sequence
  derived and/or modified sequence
atgatccctccacaggaggcttctgcccggagacgtgagatcgaggataaactcaagcaggaagaggagaccctatccttcattcgggattctctggagaaatccgatcagttgaccaaaaatatggtctccatccttagctccttcgaatcaaggcttatgaagttagaaaatagtataatcccagttcacaagcagactgagaatttacagagactgcaggagaatgtcgagaaaacattatcctgtctcgatcacgttattagttattaccacgtggcttctgacaccgagaaaatcatccgcgagggacctaccggtagactggaggagtacctgggatccatggccaaaattcagaaagcagtcgaatatttccaggacaactcgcctgactcccccgagctcaacaaggtgaaactgctgttcgagcgcggtaaagaggcactggaatccgagtttcgaagtctcatgacacgtcactcaaaggtagtcagcccggtcctgatcctggacctgattagcggtgacgatgatttagaagctcaggaagatgtcaccttggaacatttgccagagagcgtactccaggacgtaattagaatctctcggtggttggtggaatatggccgaaatcaagacttcatgaacgtgtattatcaaatccgatcctcgcaattggaccgcagcattaaagggcttaaagagcacttccataagagttcctcatcaagcggcgtaccttattcaccagccattcccaacaagaggaaagacacccccactaagaaacccgtcaagcggcctgggcacgaacacgacttcagggtgaaacacctgtccgaagctctcaatgacaaacatggccctttggccggccgagatgatatgctcgacgtggagaccgacgcctatatccactgtgtgtcagcttttgtgaagcttgcgcagtccgaatatcagctgcttgctgatatcatcccagaacatcaccagaaaaagacgtttgactctttgatacaggacgctttggacggcctgatgctagaaggagagaatatagtgtcagccgctcgcaaagctatcgtgcgacatgacttctctactgtactgaccgtttttccaattctgcggcacctgaaacagaccaaaccagagtttgatcaggtcctacaaggaactgccgcctctacgaaaaacaaactgcccggactgattacatctatggaaaccatcggcgcaaaggctttagaggactttgccgataatattaagaacgatcccgacaaagagtataatatgcccaaggatgggacggtgcatgagttaactagcaacgcaatcttgtttctccaacagcttttagatttccaagaaactgctggagccatgctcgctagccaggaaacatcctccagcgccacctcttatagtagtgagttttcaaagcgcttactctcaacatacatttgcaaggtgctgggaaacctgcagcttaatctgttgtccaagagtaaggtctatgaggacccagccctgagcgccatcttcctgcataacaattacaactacatcctgaaatccctcgaaaagtcagaactgatccagctggttgcagttacgcagaagaccgccgaacgcagttatcgggaacacatcgaacagcagatacaaacctatcagcgctcttggcttaaagttaccgactacatcgccgaaaaaaacttgccagtgttccaacctggagtaaaactaagggacaaggaacggcagattatcaaggaacgatttaaaggattcaacgatggcttagaggagctgtgtaaaatccagaaggcttgggcaattccagacaccgagcagcgcgaccgcattcggcaggcccaaaaaaccattgttaaggaaacttacggagcctttcttcaaaaatttgggtcagttcctttcacaaagaaccccgaaaagtatatcaagtacggggttgaacaagtcggtgacatgattgaccgactcttcgataccagcgcctag

SEQ ID NO: 57638 - DNA, 2031 bp, Artificial Sequence
  derived and/or modified sequence
atgatccccccccaggaggccagcgccaggagaagagaaattgaggacaagctgaagcaggaggaggagaccctgtccttcatccgggacagcctggagaagagtgaccagctgaccaagaacatggtgtccatcctgagcagctttgagagccggctgatgaagctggagaacagcatcatccctgtgcacaagcagacagagaacctgcagaggctgcaggagaatgtggagaagaccctgagctgcctggaccacgtgatctcctactaccacgtggccagtgacacagagaagatcatccgggagggccccaccggccgcctggaggagtacctgggctccatggccaagatccagaaggctgtggagtacttccaggacaacagcccagacagccctgagctgaacaaggtgaagctgctgtttgagcggggcaaggaggccctggagagcgagttccgcagcctgatgaccaggcacagcaaggtggtgtcccctgtgctgatcctggacctgatctctggagatgatgacctggaggcccaggaggatgtgaccctggagcacctgcctgagagcgtgctgcaggacgtcatccgcatcagccgctggctggtggagtatggaagaaaccaggacttcatgaatgtgtactaccagatccgcagcagccagctggacaggagcatcaagggcctgaaggagcacttccacaagagcagcagcagcagtggagtgccctacagccctgccatccccaacaagaggaaggacacccccaccaagaagcctgtgaagaggcctggccatgaacatgacttccgggtgaagcacctgtctgaggccctgaatgacaagcacggccccctggccggcagagatgacatgctggatgtggagacagatgcctacatccactgtgtgtctgcctttgtgaagctggcccagagcgagtaccagctgctggccgacatcatccctgagcaccaccagaagaagacctttgacagcctcatccaggatgccctggatggcctgatgctggagggggagaacatcgtgtctgctgccaggaaggccatcgtgagacatgacttcagcacagtgctgaccgtcttccccatcctgcggcacctgaagcagaccaagccagagtttgaccaggtgctgcagggcacagctgccagcaccaagaacaagctgcccggcctcatcacctccatggagaccatcggggccaaggccctggaggactttgctgacaacatcaagaatgaccctgacaaggagtacaacatgcccaaggatggcaccgtgcatgagctgaccagcaatgccatcctcttcctgcagcagctgctggacttccaggagacagctggggccatgctggccagccaggagaccagcagcagcgccaccagctacagcagcgagttcagcaagaggctgctgagcacctacatctgcaaggtgctgggcaacctgcagctgaacctgctgagcaagagcaaggtgtatgaagatcctgccctgagcgccatcttcctgcacaacaactacaactacatcctgaagagcctggagaagtctgagctgatccagctggtggccgtgacccagaagacagctgagaggagctaccgggagcacatcgagcagcagatccagacctaccagaggtcctggctgaaggtgacagactacatcgccgagaagaacctgcctgtgttccagcccggggtgaagctgcgggacaaggagcggcagatcatcaaggagcgcttcaagggcttcaatgatggcctggaggagctgtgcaagatccagaaggcctgggccatcccagacacagagcagagggaccgcatccggcaggcccagaagaccatcgtgaaggagacctatggagccttcctgcagaagtttggatctgtgcccttcaccaagaaccctgagaagtacatcaagtatggagtggagcaggtgggggacatgattgaccggctgtttgacaccagcgcctag

SEQ ID NO: 57639 - DNA, 2031 bp, Artificial Sequence
  derived and/or modified sequence
atgatccccccccaggaggccagcgcccggcggcgggagatcgaggacaaactcaagcaggaggaggagaccctctcctttatcagagacagcctcgaaaagagcgatcagttaacaaagaatatggtgagcatattatcatccttcgaatcaagacttatgaagcttgaaaattcaattatccccgtgcataagcagacagagaatctacaacgcttgcaagagaacgtcgaaaagacgctcagttgccttgaccacgtaatttcgtattatcacgtagccagtgatactgagaaaataattagagaaggtcctacgggcaggcttgaggagtacctggggagtatggctaaaattcagaaagctgtggaatactttcaagacaactctcctgacagtcctgaattgaacaaggtcaagttgctcttcgagcgcggaaaggaagccctggagagcgaattcagatccctgatgacccggcacagtaaagtggtctcacccgtgctaattctcgatctgatctcgggagatgatgatttggaggcgcaggaggatgttactctcgaacacttgccagagagcgttctccaggatgtgatccgcatttccagatggcttgtggagtatgggcgaaaccaagattttatgaatgtgtattaccagatcagaagttcccagctggaccgcagcataaaaggattaaaggagcactttcataaatccagcagctctagcggagtgccctactcgccagcaatacctaataaacgaaaggatacccctacaaaaaaacccgtgaagcgcccaggtcatgagcatgactttcgcgtcaagcacttgtcagaggccctgaacgacaaacacggccctctagccgggagggacgacatgctcgatgtggagaccgacgcttatattcattgtgtcagtgcatttgtgaaactggcgcaaagcgaatatcagcttttagccgacataatcccagagcatcaccaaaagaaaacttttgacagcctgatccaagacgccctggacggcctaatgctggaaggtgagaacattgttagcgcagctaggaaggctatcgtacgccatgatttctcgactgtgcttacagtattcccaatcctacgacacctgaagcagactaaacccgagttcgaccaggtcttgcaggggaccgccgcctccacgaaaaacaaactccccggactaatcacatcgatggagacaatcggagcaaaagcccttgaggacttcgccgacaacataaagaatgacccagataaggagtataatatgccaaaagatggaactgtccacgaactcacatctaatgcgatcctgtttctgcagcagctgctcgactttcaagaaacggccggcgccatgctagcatctcaggaaacaagttctagcgccacatcttactcttccgaattcagcaaacgactgctgtcgacctacatctgtaaagtactggggaatcttcagctgaacttgttgagcaagagtaaggtttacgaggatcccgcgttatcagccatattcctccataataattacaattatattcttaaatccttagagaagtctgagctaatccagctggttgccgtgacgcaaaagaccgccgaacggtcctatcgcgaacacattgagcagcagatccagacataccaaaggagttggctaaaggtcacggactacatcgctgagaaaaacctaccggtatttcagcctggcgtgaaactcagagataaggaacgacagatcatcaaagagcggtttaaaggattcaatgatggactcgaagaactatgcaaaattcaaaaagcgtgggccatacccgacacggaacagcgcgaccggataaggcaagcgcagaagaccatcgtgaaagagacttacggagctttcctccagaaatttggatctgtgcccttcaccaaaaacccagaaaagtacataaaatatggagtggaacaggtaggcgacatgatagatcgtttgttcgacacctctgcttag

SEQ ID NO: 57640 - DNA, 2031 bp, Artificial Sequence
  derived and/or modified sequence
atgattcccccacaggaggcatccgctcgacggcgggagattgaggacaagctgaagcaggaggaggagactctgtccttcatccgagacagcctggagaagagcgaccagctcactaagaacatggtgtctatcttatcatcctttgagagccgccttatgaagctggagaactccatcatccctgtgcacaagcagacggagaatctgcagcggctgcaggagaatgttgagaagacgctgtcctgcctggaccatgtcatcagctactaccatgtggccagtgacactgagaagatcatcagagagggccccacaggtaggctggaagagtacctgggaagcatggccaagattcagaaggcagtggagtatttccaggacaacagcccagacagcccggaactcaacaaagtgaaactgctctttgagcgcgggaaggaggccctggagtccgaatttcgcagcctgatgacgcggcacagtaaggtcgtctcgcccgtgctcatcttggatctgatcagtggtgacgatgatctggaggcccaggaggacgtgaccctggagcacctgcccgagagcgtgctccaggatgtcattcgcatctcccgctggctggtggaatatggccgcaaccaagatttcatgaacgtctactaccagatacgctccagccagctggaccgctccatcaaaggactgaaggagcatttccataagagcagttcttcctctggggttccctactcccctgctatccccaacaagaggaaagacacacctaccaagaagccagtcaagcggccaggtcacgagcatgatttccgagttaagcacctgtccgaggccttgaacgacaagcacgggccgctggccgggagagatgacatgctggacgtggagaccgatgcctacatccactgcgtcagtgccttcgtcaagctggcgcagagcgagtaccagctgctggccgacatcatccccgagcaccaccagaagaagaccttcgactccctgatacaggatgccctggatgggctgatgcttgaaggggagaacatcgtgtctgctgcccggaaggccattgtgcgacacgacttctccacggtgctcaccgtcttccccatcctgcgacacctcaagcagaccaagcctgagtttgaccaggtgctccagggcacggctgccagcacaaagaacaagctgcctggcctcatcacatccatggagaccatcggtgccaaagcgctggaggacttcgcagacaacatcaagaatgacccggacaaggagtacaacatgccgaaggacggcaccgtacacgagctcaccagcaatgccatcctcttcctgcagcagcttttggacttccaggagacggcaggcgccatgctggcctcccaagagaccagctcttcggccaccagctacagctctgagttcagcaagcggctgctaagcacctatatctgtaaagtgctgggcaacctgcagttgaacttgctgagcaagtccaaggtgtacgaggacccagctctgagcgccatcttcctgcacaacaactacaattacatcctcaagtccctggagaagtctgaactgatccagctggtggcagtgacacagaagactgctgagcgctcctaccgggagcacattgagcagcagatccagacctaccagcgcagctggttaaaggtgactgattacatcgcagagaagaatctacctgtgttccagccgggagtcaagctccgggacaaggagcggcagattatcaaggagcgttttaagggcttcaatgatggcctcgaagaactgtgcaaaatccagaaggcctgggctattccagacacagagcagagggacaggattcgccaggcccagaagaccattgtcaaggagacctacggggcctttctacagaagtttggcagcgtgcccttcaccaagaacccggagaagtacatcaagtacggggtggagcaggtgggcgacatgatcgatcgccttttcgacacctctgcctga

SEQ ID NO: 57641 - DNA, 2031 bp, Artificial Sequence
  derived and/or modified sequence
atgatcccccctcaagaggcttctgctagacgcagggaaatcgaggacaagttaaagcaggaagaggagaccctaagttttatacgcgattccctcgaaaagtctgaccagctcaccaaaaacatggtgtcgatcttgtcaagctttgagtcaaggctgatgaaactcgaaaactcaattatccctgtgcataaacagaccgagaatctgcagagactgcaggaaaatgtggaaaaaacattgtcatgtctggaccacgtgatctcctactatcatgttgccagtgacacagaaaaaatcatcagggagggacctacagggcgactcgaggaatacttggggtctatggccaagatccagaaagccgtggagtacttccaagataacagcccagacagcccagagttaaacaaagttaaactgctgtttgaaagaggcaaagaggcactggagagtgaattccgatccctgatgactagacactccaaggtcgtttcacccgtcctgatcctggacttgatttcgggcgacgatgatttagaggcgcaagaggacgtgacccttgaacacctaccagagagtgtgcttcaagatgtgatccgcattagccgctggttggtagagtatggcagaaatcaggactttatgaatgtgtactaccagatcaggtcctcacaactggaccgcagcataaaaggactgaaggaacatttccacaagagctcctctagtagcggcgttccatattcacctgctatcccgaacaagcggaaggacacaccaactaaaaagccagtgaagcgccctggccacgagcatgatttcagagtgaagcatctgtccgaggctctaaacgacaaacacgggcctttggccggtcgggatgatatgcttgacgtggagaccgacgcatatattcactgtgtctctgctttcgtcaagttggctcagtccgagtaccagcttctagctgatattattcccgagcaccatcagaaaaaaacctttgattcattgatccaagacgctttggacgggctgatgttagagggcgaaaatattgtgtctgctgccagaaaggccatcgtaaggcacgatttctcgaccgtattgactgtgtttccaatactcagacacttgaagcagaccaaacctgagttcgaccaggtactgcagggtacagcagcctcgaccaagaacaagttgcctggtttgatcacttctatggagaccatcggagctaaagcactcgaagatttcgcggacaatatcaaaaacgacccagacaaagagtataatatgcccaaagacggcactgttcacgaactgaccagcaatgcgattctgttcttgcagcagctgctcgatttccaggaaactgcaggagcaatgctcgcctcccaggagacttcctcttctgctacgagctatagttccgagttctctaagagactgctgagcacatacatttgcaaggtactgggtaatctgcaacttaacttattgtccaaatccaaagtgtacgaggacccagcactcagtgccatcttcctgcacaataattacaattacatattgaaatccctcgagaaatctgaactcatccaactagtggccgttactcaaaagaccgcagagcgctcgtaccgggaacatatcgagcagcagattcaaacgtatcaacgatcctggcttaaagttacggattacatcgctgagaagaaccttccagtgttccaacctggagtcaaactgcgggacaaagagaggcagatcatcaaagaacggtttaaaggctttaacgacgggcttgaagagctatgcaaaattcagaaggcttgggcaattcctgatactgaacaacgggacagaattcggcaggctcagaaaacaattgtaaaagagacttacggagccttcttgcaaaagttcggttcagtcccattcacaaaaaatccagagaagtacattaagtacggcgttgagcaggtcggggacatgatcgatcggctattcgatacatcggcttag

SEQ ID NO: 57642 - protein, 707 aa, Artificial Sequence
  derived and/or modified sequence
MIPPQEASARRREIEDKLKQEEETLSFIRDSLEKSDQLTKNMVSILSSFESRLMKLENSIIPVHKQTENLQRLQENVEKTLSCLDHVISYYHVASDTEKIIREGPTGRLEEYLGSMAKIQKAVEYFQDNSPDSPELNKVKLLFERGKEALESEFRSLMTRHSKVVSPVLILDLISGDDDLEAQEDVTLEHLPESVLQDVIRISRWLVEYGRNQDFMNVYYQIRSSQLDRSIKGLKEHFHKSSSSSGVPYSPAIPNKRKDTPTKKPVKRPGTIRKAQNLLKQYSQHGLDGKKGGSNLIPLEGHEHDFRVKHLSEALNDKHGPLAGRDDMLDVETDAYIHCVSAFVKLAQSEYQLLADIIPEHHQKKTFDSLIQDALDGLMLEGENIVSAARKAIVRHDFSTVLTVFPILRHLKQTKPEFDQVLQGTAASTKNKLPGLITSMETIGAKALEDFADNIKNDPDKEYNMPKDGTVHELTSNAILFLQQLLDFQETAGAMLASQETSSSATSYSSEFSKRLLSTYICKVLGNLQLNLLSKSKVYEDPALSAIFLHNNYNYILKSLEKSELIQLVAVTQKTAERSYREHIEQQIQTYQRSWLKVTDYIAEKNLPVFQPGVKLRDKERQIIKERFKGFNDGLEELCKIQKAWAIPDTEQRDRIRQAQKTIVKETYGAFLQKFGSVPFTKNPEKYIKYGVEQVGDMIDRLFDTSA

SEQ ID NO: 57643 - DNA, 2124 bp, Artificial Sequence
  derived and/or modified sequence
atgatccccccccaggaggccagcgccagaagaagagagatcgaggacaagctgaagcaggaggaggagaccctgagcttcatcagagacagcctggagaagagcgaccagctgaccaagaacatggtgagcatcctgagcagcttcgagagcagactgatgaagctggagaacagcatcatccccgtgcacaagcagaccgagaacctgcagagactgcaggagaacgtggagaagaccctgagctgcctggaccacgtgatcagctactaccacgtggccagcgacaccgagaagatcatcagagagggccccaccggcagactggaggagtacctgggcagcatggccaagatccagaaggccgtggagtacttccaggacaacagccccgacagccccgagctgaacaaggtgaagctgctgttcgagagaggcaaggaggccctggagagcgagttcagaagcctgatgaccagacacagcaaggtggtgagccccgtgctgatcctggacctgatcagcggcgacgacgacctggaggcccaggaggacgtgaccctggagcacctgcccgagagcgtgctgcaggacgtgatcagaatcagcagatggctggtggagtacggcagaaaccaggacttcatgaacgtgtactaccagatcagaagcagccagctggacagaagcatcaagggcctgaaggagcacttccacaagagcagcagcagcagcggcgtgccctacagccccgccatccccaacaagagaaaggacacccccaccaagaagcccgtgaagagacccggcaccatcagaaaggcccagaacctgctgaagcagtacagccagcacggcctggacggcaagaagggcggcagcaacctgatccccctggagggccacgagcacgacttcagagtgaagcacctgagcgaggccctgaacgacaagcacggccccctggccggcagagacgacatgctggacgtggagaccgacgcctacatccactgcgtgagcgccttcgtgaagctggcccagagcgagtaccagctgctggccgacatcatccccgagcaccaccagaagaagaccttcgacagcctgatccaggacgccctggacggcctgatgctggagggcgagaacatcgtgagcgccgccagaaaggccatcgtgagacacgacttcagcaccgtgctgaccgtgttccccatcctgagacacctgaagcagaccaagcccgagttcgaccaggtgctgcagggcaccgccgccagcaccaagaacaagctgcccggcctgatcaccagcatggagaccatcggcgccaaggccctggaggacttcgccgacaacatcaagaacgaccccgacaaggagtacaacatgcccaaggacggcaccgtgcacgagctgaccagcaacgccatcctgttcctgcagcagctgctggacttccaggagaccgccggcgccatgctggccagccaggagaccagcagcagcgccaccagctacagcagcgagttcagcaagagactgctgagcacctacatctgcaaggtgctgggcaacctgcagctgaacctgctgagcaagagcaaggtgtacgaggaccccgccctgagcgccatcttcctgcacaacaactacaactacatcctgaagagcctggagaagagcgagctgatccagctggtggccgtgacccagaagaccgccgagagaagctacagagagcacatcgagcagcagatccagacctaccagagaagctggctgaaggtgaccgactacatcgccgagaagaacctgcccgtgttccagcccggcgtgaagctgagagacaaggagagacagatcatcaaggagagattcaagggcttcaacgacggcctggaggagctgtgcaagatccagaaggcctgggccatccccgacaccgagcagagagacagaatcagacaggcccagaagaccatcgtgaaggagacctacggcgccttcctgcagaagttcggcagcgtgcccttcaccaagaaccccgagaagtacatcaagtacggcgtggagcaggtgggcgacatgatcgacagactgttcgacaccagcgcctag

SEQ ID NO: 57644 - DNA, 2124 bp, Artificial Sequence
  derived and/or modified sequence
atgatccctccccaggaggccagcgccaggcgcagagagatcgaagataaactgaagcaggaggaggaaaccttaagctttatcagagactcgctggaaaagtctgatcagctcactaagaacatggtcagtattctgagctccttcgaatccagactgatgaagctcgagaattccattatacctgttcataagcagacggagaatttgcagaggcttcaggagaacgtcgaaaaaacattatcttgtctggatcacgtgatctcatactatcacgtcgcctctgacacagaaaaaattatccgggaagggcccactgggcgcctcgaggagtacctgggcagtatggctaaaatccagaaggctgttgaatatttccaggataacagccccgactcccccgagctgaacaaggtgaaactgctgtttgaaagaggcaaagaagcattggaatcggagttcaggtccctaatgactcggcactccaaagtggtcagcccagtcctgatcttggatctgattagcggtgatgacgacctagaagctcaggaggatgtcaccctggagcacttgcccgagtctgtgctgcaggacgtgatcaggatcagccgatggctggtcgagtatggtagaaaccaggattttatgaatgtgtactatcaaattagaagctcacagctggatagatctataaagggactgaaggaacatttccacaagtccagctcctcttccggtgttccctacagcccagcaatacctaataagcgaaaagatacgcctaccaaaaagcccgtgaaacggcctggaacaatacgcaaggcccagaatctgctcaagcagtactcacagcatggtctggacggcaagaagggaggatccaatcttattcctcttgaaggacatgagcacgacttccgcgtgaagcatctgtcggaagctctgaacgacaagcacgggcctttggctggacgtgacgacatgctagacgtggagaccgatgcatatatccactgtgtttcggcgtttgtaaagttggcacagtctgagtaccagttgctggcagatatcatcccagaacatcaccagaagaaaacattcgactctctgattcaggacgccctcgacgggctaatgcttgaaggcgaaaacattgtctccgcggctcgcaaagcaattgtgcggcatgactttagcaccgtgctgacagtgtttccaatcttgagacatttaaagcagaccaagccggagttcgaccaggtactccagggcaccgctgcttctacaaaaaataaattacctgggctgatcacatctatggagaccatcggcgctaaggccctggaagatttcgctgacaatattaaaaacgatcccgacaaggagtacaatatgccgaaggatggcacagttcacgagctgacaagtaacgccattctgttcctgcagcagcttttggattttcaggagacagccggcgcaatgctggcctctcaggagaccagtagctctgctacatcttacagttccgaattctctaagagattattgtcaacatacatctgcaaggtgctgggtaacctgcagctgaaccttcttagcaagagtaaggtctatgaagacccagcactgtcagctatctttctgcacaataattacaattacatactcaagtctctggagaaatctgaactgattcaacttgtggccgtaacacagaaaactgcagagaggtcatacagggagcacatcgagcagcaaatccagacttaccaacggtcctggctgaaggttactgactacatcgcagagaaaaatctgcccgtgttccagcctggagtgaaacttagggacaaggagcggcagattatcaaggagcgcttcaaaggttttaacgacggactggaggaactgtgtaaaatacaaaaagcctgggcaatccctgacaccgagcagcgggaccgcatccggcaagcgcaaaagaccatcgtcaaggaaacatacggtgcattcctgcagaaattcggcagcgtaccttttactaagaacccggaaaagtatatcaaatacggagtggagcaagtaggcgacatgatcgaccgcttgtttgataccagtgcatag

SEQ ID NO: 57645 - DNA, 2124 bp, Artificial Sequence
  derived and/or modified sequence
atgatccccccccaggaggccagcgccaggagaagagaaattgaggacaagctgaagcaggaggaggagaccctgtccttcatccgggacagcctggagaagagtgaccagctgaccaagaacatggtgtccatcctgagcagctttgagagccggctgatgaagctggagaacagcatcatccctgtgcacaagcagacagagaacctgcagaggctgcaggagaatgtggagaagaccctgagctgcctggaccacgtgatctcctactaccacgtggccagtgacacagagaagatcatccgggagggccccaccggccgcctggaggagtacctgggctccatggccaagatccagaaggctgtggagtacttccaggacaacagcccagacagccctgagctgaacaaggtgaagctgctgtttgagcggggcaaggaggccctggagagcgagttccgcagcctgatgaccaggcacagcaaggtggtgtcccctgtgctgatcctggacctgatctctggagatgatgacctggaggcccaggaggatgtgaccctggagcacctgcctgagagcgtgctgcaggacgtcatccgcatcagccgctggctggtggagtatggaagaaaccaggacttcatgaatgtgtactaccagatccgcagcagccagctggacaggagcatcaagggcctgaaggagcacttccacaagagcagcagcagcagtggagtgccctacagccctgccatccccaacaagaggaaggacacccccaccaagaagcctgtgaagaggcctggcaccatcaggaaggcccagaacctgctgaagcagtacagccagcacggcctggatggcaagaagggcggcagcaacctgatccccctggagggccacgagcatgacttccgggtgaagcacctgtctgaggccctgaatgacaagcacggccccctggccggcagagatgacatgctggatgtggagacagatgcctacatccactgtgtgtctgcctttgtgaagctggcccagagcgagtaccagctgctggccgacatcatccctgagcaccaccagaagaagacctttgacagcctcatccaggatgccctggatggcctgatgctggagggagaaaatattgtgtctgctgccaggaaggccatcgtgagacatgacttcagcacagtgctgactgtgttccccatcctgcggcacctgaagcagaccaagccagagtttgaccaggtgctgcagggcacagctgccagcaccaagaacaagctgcccggcctcatcacctccatggagaccatcggggccaaggccctggaggactttgctgacaacatcaagaatgaccctgacaaggagtacaacatgcccaaggatggcaccgtgcatgagctgaccagcaatgccatcctcttcctgcagcagctgctggacttccaggagacagctggggccatgctggccagccaggagaccagcagcagcgccaccagctacagcagcgagttcagcaagaggctgctgagcacctacatctgcaaggtgctgggcaacctgcagctgaacctgctgagcaagagcaaggtgtatgaggaccctgccctgagcgccatcttcctgcacaacaactacaactacatcctgaagagcctggagaagtctgagctgatccagctggtggccgtgacccagaagacagctgagaggagctaccgggagcacatcgagcagcagatccagacctaccagaggtcctggctgaaggtgacagactacatcgccgagaagaacctgcccgtcttccagcccggggtgaagctgcgggacaaggagcggcagatcatcaaggagcgcttcaagggcttcaatgatggcctggaggagctgtgcaagatccagaaggcctgggccatcccagacacagagcagagggaccgcatccggcaggcccagaagaccatcgtgaaggagacctacggggccttcctgcagaagtttggatctgtgcccttcaccaagaaccctgagaagtacatcaagtatggagtggagcaggtgggggacatgattgaccggctgtttgacaccagcgcctag

SEQ ID NO: 57646 - DNA, 2124 bp, Artificial Sequence
  derived and/or modified sequence
atgatccccccccaggaggccagcgcccggcggcgggagatcgaggataagctgaaacaggaggaggagacactgtccttcatccgggactctctagagaagtcagatcaattgacaaaaaacatggtttccatccttagttccttcgaaagtcgcctgatgaagttggaaaactcaatcatccccgttcacaagcagactgaaaacctgcaaagactgcaggagaatgtggagaagacacttagctgtttggaccacgtaatcagctactaccatgtggcctctgatactgaaaagattatacgagagggcccgacaggacgactcgaagagtacttaggctccatggctaagatccagaaagccgtggagtattttcaagacaactcgccagacagccctgaactgaataaggttaagttgctgttcgaacgaggaaaggaggcccttgagagcgagtttcgcagtctgatgacacggcatagtaaggttgtgtctccggtactaattctcgatttgatctccggagatgacgaccttgaggctcaagaggacgtcaccctcgaacacttacccgagtccgtccttcaggatgtcattagaattagcaggtggctggtggagtatggccggaaccaggacttcatgaatgtgtattaccagatccgctcatcacagctggatcggtctatcaaaggcctgaaagagcactttcataaaagctcatcctcttcgggagtgccatacagtccagccatccctaacaaacgtaaggatacccccacgaagaaacctgtcaagcgacccggcacaattagaaaggctcagaatcttctgaaacagtacagccaacacggccttgatgggaaaaagggggggtccaaccttatacccttggagggacatgagcacgatttcagggtaaaacacctgagtgaagctttaaatgataaacatgggccccttgccggtagagatgacatgcttgatgtggagacagacgcctatattcactgcgtctcggccttcgtgaagctggcacagagcgagtaccagctcctcgccgatataatccctgaacatcaccagaagaagacattcgacagcctcattcaggatgccctggacggcctaatgttggaaggcgagaacatcgtgtccgccgctagaaaggccatcgtgcgtcatgattttagcacagtactcactgtcttcccaatcttgcggcatttgaaacagacaaaaccagagtttgaccaggtgctgcagggaacagctgcatctacaaagaataagctgcctggactgattactagcatggagactattggggctaaagccctggaggattttgctgacaacattaaaaacgaccccgacaaggagtacaatatgccaaaggacgggacggtccacgaactcacgtcgaacgcaatcctctttctgcagcaacttctggacttccaagaaactgcaggagccatgctagcatcccaagagacttcctcttcagcaacctcttactcttcagagtttagcaaaaggcttttgagtacttacatttgtaaggtcctggggaatctgcaattaaacctgctgtccaagagtaaggtttatgaagacccagccctgagcgcaatcttcttgcataacaactacaattatattctcaagagcctcgagaagtccgagctgattcaactcgtggccgttacccaaaaaacagccgaaagatcataccgggaacacatcgaacagcagattcagacctaccagagaagttggctcaaagtgactgactatatcgccgagaagaatcttcccgtgtttcaaccgggagtcaaactcagagataaggagagacagatcattaaagagaggttcaaaggattcaacgacggactcgaggaattatgcaaaatccagaaggcgtgggcgatccccgataccgagcagagagaccgaattaggcaggcccaaaagaccatcgtcaaggaaacatacggagcatttctccagaaatttggatcagtgccatttacgaagaatccagagaagtacattaaatatggtgttgaacaggttggagatatgattgataggctcttcgatacaagtgcctag

SEQ ID NO: 57647 - DNA, 2248 bp, Artificial Sequence
  derived and/or modified sequence
ggtgggcccgcggaggaaagatactggggagtgggagccgcggggttcagagcgatgattcccccacaggaggcatccgctcgacggcgggagattgaggacaagctgaagcaggaggaggagactctgtccttcatccgagacagcctggagaagagcgaccagctcactaagaacatggtgtctatcttatcatcctttgagagccgccttatgaagctggagaactccatcatccctgtgcacaagcagacggagaatctgcagcggctgcaggagaatgttgagaagacgctgtcctgcctggaccatgtcatcagctactaccatgtggccagtgacactgagaagatcatcagagagggccccacaggtaggctggaagagtacctgggaagcatggccaagattcagaaggcagtggagtatttccaggacaacagcccagacagcccggaactcaacaaagtgaaactgctctttgagcgcgggaaggaggccctggagtccgaatttcgcagcctgatgacgcggcacagtaaggtcgtctcgcccgtgctcatcttggatctgatcagtggtgacgatgatctggaggcccaggaggacgtgaccctggagcacctgcccgagagcgtgctccaggatgtcattcgcatctcccgctggctggtggaatatggccgcaaccaagatttcatgaacgtctactaccagatacgctccagccagctggaccgctccatcaaaggactgaaggagcatttccataagagcagttcttcctctggggttccctactcccctgctatccccaacaagaggaaagacacacctaccaagaagccagtcaagcggccagggacgatccgtaaggctcagaaccttctgaaacagtattcccagcatggtctagatgggaaaaaggggggctctaacctcattcctctggaaggtcacgagcatgatttccgagttaagcacctgtccgaggccttgaacgacaagcacgggccgctggccgggagagatgacatgctggacgtggagaccgatgcctacatccactgcgtcagtgccttcgtcaagctggcgcagagcgagtaccagctgctggccgacatcatccccgagcaccaccagaagaagaccttcgactccctgatacaggatgccctggatgggctgatgcttgaaggggagaacatcgtgtctgctgcccggaaggccattgtgcgacacgacttctccacggtgctcaccgtcttccccatcctgcgacacctcaagcagaccaagcctgagtttgaccaggtgctccagggcacggctgccagcacaaagaacaagctgcctggcctcatcacatccatggagaccatcggtgccaaagcgctggaggacttcgcagacaacatcaagaatgacccggacaaggagtacaacatgccgaaggacggcaccgtacacgagctcaccagcaatgccatcctcttcctgcagcagcttttggacttccaggagacggcaggcgccatgctggcctcccaagagaccagctcttcggccaccagctacagctctgagttcagcaagcggctgctaagcacctatatctgtaaagtgctgggcaacctgcagttgaacttgctgagcaagtccaaggtgtacgaggacccagctctgagcgccatcttcctgcacaacaactacaattacatcctcaagtccctggagaagtctgaactgatccagctggtggcagtgacacagaagactgctgagcgctcctaccgggagcacattgagcagcagatccagacctaccagcgcagctggttaaaggtgactgattacatcgcagagaagaatctacctgtgttccagccgggagtcaagctccgggacaaggagcggcagattatcaaggagcgttttaagggcttcaatgatggcctcgaagaactgtgcaaaatccagaaggcctgggctattccagacacagagcagagggacaggattcgccaggcccagaagaccattgtcaaggagacctacggggcctttctacagaagtttggcagcgtgcccttcaccaagaacccggagaagtacatcaagtacggggtggagcaggtgggcgacatgatcgatcgccttttcgacacctctgcctgagcctgctgctagccctgcctggttccaccagactggcgtgtcattggacagataaaccagtgttagcttg

SEQ ID NO: 57648 - DNA, 2124 bp, Artificial Sequence
  derived and/or modified sequence
atgataccacctcaggaggcgtccgcacgaaggcgcgagattgaagataaactgaaacaagaggaggagaccctgtcgtttattcgagattccttggagaagtctgatcagctgacaaaaaatatggtcagtatactctcctcattcgaatctcgtctcatgaaattggaaaacagcatcatacccgtacacaagcaaactgaaaacctgcagagattgcaggagaacgtagagaaaactctgtcctgcctggatcacgtcattagctactaccacgtggcatctgatacggaaaagataataagggaaggaccaacaggcagactcgaagaatacctgggaagtatggccaagattcaaaaggccgtggaatacttccaggacaactcacccgattccccagagctcaacaaggttaagctgctcttcgagcggggaaaggaagccctggagagcgagtttcgcagtctcatgacccgccactcaaaagtggtcagcccggtcctaatactggatttgatctccggtgacgacgacctggaggctcaggaagatgttactctggagcacctgccggagtcagtgctgcaagatgtcatccggattagtcgatggcttgttgaatatggcagaaatcaagacttcatgaatgtctactatcaaatccggtctagccaactagaccggtccatcaaaggtctaaaagaacactttcataagtcatcctcttctagtggggttccgtattcaccagcgatccctaataaacgtaaagacactcccaccaagaagcctgttaagcgccctggtacaatcagaaaggcgcagaatttgctcaaacagtactcacagcatggcctagatggaaaaaagggcggtagtaacctgatccccttggaaggccatgaacacgattttcgcgtcaaacatctcagcgaagctcttaatgacaagcacggtccattggcgggaagagatgacatgttggacgtcgaaactgatgcttatatacactgcgttagcgcgttcgtgaagttagcccaaagcgaatatcagctactcgcagacatcattcctgaacaccaccaaaaaaagacgttcgactcattaatccaggatgccctcgatggactgatgctggagggggaaaacatcgtctccgcggctcgaaaagccattgtgcgccacgacttttccacggtgctgacagtgtttccaatcctgagacacttgaagcagaccaagcccgagtttgatcaggtattgcagggtacggccgctagcaccaaaaacaagctcccgggtcttattacgtctatggagacgatcggagccaaggctcttgaagacttcgcagataacattaagaacgatcccgataaggagtataacatgcccaaagatggcaccgtgcacgaactcacttccaacgccatcctgtttctgcagcaactcctcgactttcaagagaccgcgggagcaatgctggcctctcaagagacgtcctcttctgctactagctattctagcgagttctctaagcggctgctatccacatacatctgcaaggtcctggggaacctgcagctcaatctactgtccaagagtaaggtctacgaagaccctgcactctccgcaatttttctgcacaacaattataattatatactgaagagtctggagaaaagcgaactgatccaactggttgctgtgacacagaagaccgcggaaagatcatatagagagcatattgaacagcaaatccagacataccaacgctcctggcttaaggtgacagattacatcgcagagaagaacttgcctgtttttcaacccggagtgaaactgagggacaaggagagacagataatcaaagaacgttttaagggcttcaatgatggtctcgaagaactctgcaaaatacagaaagcatgggctatcccagacaccgagcagcgggatcgtattaggcaggcccaaaagaccatcgtgaaagagacctacggggcattcttacagaagttcggctccgttcctttcacgaagaacccggagaagtatataaagtacggcgtggagcaggtgggggacatgatcgatagactgtttgatacatctgcttag

SEQ ID NO: 57649 - protein, 365 aa, Artificial Sequence
  derived and/or modified sequence
MASNSSSCPTPGGGHLNGYPVPPYAFFFPPMLGGLSPPGALTTLQHQLPVSGYSTPSPATVRNDRNKKKKEVPKPECSESYTLTPEVGELIEKVRKAHQETFPALCQLGKYTTNNSSEQRVSLDIDLWDKFSELSTKCIIKTVEFAKQLPGFTTLTIADQITLLKAACLDILILRICTRYTPEQDTMTFSDGLTLNRTQMHNAGFGPLTDLVFAFANQLLPLEMDDAETGLLSAICLICGDRQDLEQPDRVDMLQEPLLEALKVYVRKRRPSRPHMFPKMLMKITDLRSISAKGAERVITLKMEIPGSMPPLIQEMLENSEGLDTLSGQPGGGGRDGGGLAPPPGSCSPSLSPSSNRSSPATHSP

SEQ ID NO: 57650 - DNA, 1041 bp, Artificial Sequence
  derived and/or modified sequence
atgggacaagaaatccttccagctcggagccctacgctgagactgggctcgcctaccccccatctcccacaggagctcctgagggcctcacctaagggccccccaggacgcctgcaattaggtgggctcgcagtgcgcaacgaccgcaacaagaagaagaaggaggtgcccaaacccgaatgctcagaaagttacaccctgaccccagaggtcggggaactcatagaaaaggtgaggaaggcccaccaggaaaccttccccgccctctgtcaactgggaaagtataccacaaataactcctccgagcagcgcgtcagtctcgatatagacctttgggacaagtttagcgaactgagtaccaaatgcatcattaagactgtagagtttgcaaagcagctccccggtttcacaacactcaccatcgccgaccaaattacccttctgaaggcggcgtgtctggacatccttatcctgagaatatgcacgaggtatacaccagagcaggataccatgactttcagcgatggcctgaccctcaatagaacccagatgcataacgccggatttggaccgcttacagacctggtttttgcgtttgccaatcaactgcttccgctggaaatggatgatgcggagactggacttctctctgccatttgcctaatctgcggtgaccggcaagacctggagcagcctgaccgtgttgatatgctgcaggaaccgctgttagaagccctgaaggtgtacgtaagaaaacgcaggccatcgagacctcacatgtttccgaaaatgctgatgaaaattactgatttaaggtccatttcagcaaagggggcggagcgggtaatcaccctcaaaatggagattcccgggtctatgccccccctgattcaagagatgctcgagaatagtgaaggcttagacacactttcaggtcagcccggcggaggcggtcgggatgggggcgggctggccccaccgcccgggtcttgttctccatcccttagcccgtcctctaatcgttcctcaccggctacgtag

SEQ ID NO: 57651 - DNA, 1098 bp, Artificial Sequence
  derived and/or modified sequence
atggcttctaactcatcttcctgtccgacgccaggcggcggccatctgaacggataccccgtgcccccatacgcattcttctttccgcctatgctgggcggcctgtccccccccggcgctttgaccactctgcagcaccaactacccgtaagtgggtatagcacaccctcccctgccacagtacgtaatgatcggaataagaaaaagaaagaggtccctaagccagaatgtagtgagtcatatacactgacccccgaggtcggcgagctgatcgagaaagttaggaaagcccaccaagaaactttccccgcactctgccagctgggaaaatacactacaaacaattccagtgagcagcgagtgagcctggacatcgacctatgggacaagttttccgagctgagcactaagtgtataattaaaaccgtggaatttgccaaacaactcccgggttttactacgcttactatagccgatcaaataactctgctgaaggctgcctgtcttgacatccttatcctcaggatttgcacccggtacacccccgaacaagacaccatgactttctctgatggattaactctaaatcgcactcaaatgcataacgccgggttcggccccctcacagacctggttttcgcttttgccaatcagttattgcccctggagatggatgatgccgagactggcctgctgtccgcaatctgtcttatatgcggggatcgtcaggatctagagcagcccgaccgggtggacatgctccaggagcccctgttggaggcgttaaaggtgtatgttcggaagcggaggccaagccgccctcatatgtttcctaagatgctcatgaaaatcaccgatctaagatctattagcgccaaaggtgcggaaagggttattacgctgaaaatggaaattccagggtccatgccccctctgattcaggaaatgctggaaaacagtgaagggctggacacactgtctggacagccgggcggcggaggaagagacggtggcggcctggctccccctccaggctcctgttccccgtcacttagcccctcctccaacagatctagtccagctacacactcaccttag

SEQ ID NO: 57652 - DNA, 1041 bp, Artificial Sequence
  derived and/or modified sequence
atgggccaggagatcctgcctgcccggagccccaccctgcggctgggcagccccaccccccacctgccccaggagctgctgcgggccagccccaagggccccccaggccgcctgcagctgggcggcctggccgtgagaaatgacaggaacaagaagaagaaggaggtgcccaagccagagtgcagcgagagctacaccctgaccccagaggtgggggagctgattgagaaggtgaggaaggcccaccaggagaccttccctgccctgtgccagctgggcaagtacaccaccaacaacagcagcgagcagagggtgtccctggacatcgacctgtgggacaagttcagcgagctgagcaccaagtgcatcatcaagacagtggagtttgccaagcagctgcccggcttcaccaccctgaccatcgctgaccagatcaccctgctgaaggccgcctgcctggacatcctgatcctgcgcatctgcacccgctacaccccagagcaggacaccatgaccttcagtgatggcctgaccctgaacagaacccagatgcacaatgccggcttcggccccctgacagacctggtgtttgcctttgccaaccagctgctgcccctggagatggatgatgctgagaccggcctgctgagcgccatctgcctgatctgtggggaccggcaggacctggagcagcctgacagagtggacatgctgcaggagcccctgctggaggccctgaaggtgtatgtgaggaagagaagacccagccggccccacatgttccccaagatgctgatgaagatcacagacctgcggagcatcagcgccaagggagctgagagggtcatcaccctgaagatggagatccctggctccatgccacccctcatccaggagatgctggagaacagcgagggcctggacaccctgagcggccagcccggcggcggcggcagagatggcggcggcctggcccctcctcctggcagctgcagccccagcctgagccccagcagcaacagaagcagccctgccacctag

SEQ ID NO: 57653 - DNA, 1098 bp, Artificial Sequence
  derived and/or modified sequence
atggccagcaacagcagcagctgccccaccccaggcggcggccacctgaatggctaccctgtgcccccctatgccttcttcttcccccccatgctgggcggcctgagccccccaggggccctgaccaccctgcagcaccagctgcctgtgtctggctacagcacccccagccctgccaccgtgagaaatgacaggaacaagaagaagaaggaggtgcccaagccagagtgcagcgagagctacaccctgaccccagaggtgggggagctgattgagaaggtgaggaaggcccaccaggagaccttccctgccctgtgccagctgggcaagtacaccaccaacaacagcagcgagcagagggtgtccctggacatcgacctgtgggacaagttcagcgagctgagcaccaagtgcatcatcaagacagtggagtttgccaagcagctgcccggcttcaccaccctgaccatcgctgaccagatcaccctgctgaaggccgcctgcctggacatcctgatcctgcgcatctgcacccgctacaccccagagcaggacaccatgaccttcagtgatggcctgaccctgaacagaacccagatgcacaatgccggcttcggccccctgacagacctggtgtttgcctttgccaaccagctgctgcccctggagatggatgatgctgagaccggcctgctgagcgccatctgcctgatctgtggggaccggcaggacctggagcagcctgacagagtggacatgctgcaggagcccctgctggaggccctgaaggtgtatgtgaggaagagaagacccagccggccccacatgttccccaagatgctgatgaagatcacagacctgcggagcatcagcgccaagggagctgagagggtcatcaccctgaagatggagatccctggctccatgccacccctcatccaggagatgctggagaacagcgagggcctggacaccctgagcggccagcccggcggcggcggcagagatggcggcggcctggcccctcctcctggcagctgcagccccagcctgagccccagcagcaacagaagcagccctgccacccacagcccctag

SEQ ID NO: 57654 - DNA, 1041 bp, Artificial Sequence
  derived and/or modified sequence
atgggccaggagatcctgcccgcccggagccccaccctgcggctgggatcgccaaccccccatttaccccaggagctactgcgggcatcccctaaagggccccccggcaggttgcaactgggaggcttggcggtgcggaatgaccgaaacaagaaaaaaaaagaggtgcctaaacccgaatgttctgagagctatacgcttacgccagaagtgggggaacttatcgagaaagttcgcaaggcccaccaagaaaccttccccgctctgtgtcagctgggaaaatataccacgaataactcatctgagcagcgagtaagccttgacattgatctgtgggacaagttttcagagctaagtaccaagtgtatcatcaaaaccgtagaatttgccaaacagctgccaggtttcaccacgctcactatcgcggatcagataacactgctgaaagctgcctgtctggacattttgatcctgcgtatttgcaccagatatacacctgagcaggatactatgacattctccgacggattgaccctcaatagaacccaaatgcacaatgcaggattcggccctctgacagatctggtttttgctttcgccaatcagctcctccctctggaaatggatgatgcagagaccggcctcctgagcgctatatgtctcatttgcggggatagacaggacctagagcagccagacagggtggacatgctacaagaacctctccttgaagctcttaaagtctatgtaaggaaacggaggccgagtcgcccccatatgttccccaaaatgttaatgaagattaccgatcttcggtcaatctccgcaaagggcgccgagcgcgtaatcaccctcaagatggagatccctggatccatgccgcccttaattcaggagatgctcgagaatagtgagggcctggatactctgagcggccagcccggtggaggggggagggacggaggagggctcgcccccccccccgggtcttgtagcccttcattgtccccctcatccaatagatcctcacccgccacgtag

SEQ ID NO: 57655 - DNA, 1098 bp, Artificial Sequence
  derived and/or modified sequence
atggccagcaacagcagcagctgccccacccccggcggcggccaccttaatgggtacccagtgcctccctacgcctttttctttccaccaatgcttggtggcctcagcccccctggcgccttaaccactctccagcatcaactgccagtgtctggttattcaaccccgtccccagccacagtgaggaatgatagaaacaagaaaaaaaaggaggtccccaaacctgagtgctctgagtcctacaccctcacccctgaggtcggggaactcatcgaaaaagttcgaaaggctcaccaggaaacctttcccgcgctgtgtcagctgggcaaatatactaccaataattcatctgagcagcgagtgagcctggacatcgacctctgggacaaattttccgagctctctacaaagtgcattatcaaaacggtggagttcgctaagcagttgccgggtttcactactttaacaatcgcagatcagatcaccttgttaaaggcagcttgtctcgatattttgatcctgaggatctgtacccgatacacacccgagcaagacaccatgaccttctccgatggtctgaccctcaaccgcacccagatgcataacgctggcttcggccctctgactgatctggtgtttgcctttgcaaatcagctgctccctttagagatggatgacgccgagactgggcttctgagtgccatttgcctaatatgcggagatcggcaggacctggaacagcccgaccgcgtggatatgctgcaggaacccctactagaagcactcaaggtgtacgtgcgaaagcgaaggccaagtcgaccacatatgttccctaaaatgttaatgaagatcactgacttacggagtattagcgcaaaaggagctgagcgcgtgatcactctcaagatggagattccagggagtatgccccctctcatccaagagatgctagagaacagtgaagggctcgacacgctatctgggcaacccggcggaggtggccgagacggaggtggcctcgccccaccccctggctcctgtagccctagtttgagtccaagttcgaacagaagcagccccgccacgcattcaccttag

SEQ ID NO: 57656 - DNA, 1041 bp, Artificial Sequence
  derived and/or modified sequence
atgggtcaagagatccttcccgcacgatctcccaccctgcggcttggctcgcctaccccccacctgcctcaggaactactgcgcgcatccccaaagggacccccaggacggttacaactgggagggctggctgtgcgtaatgaccgtaataaaaaaaaaaaggaggtgcccaagccagaatgctccgagagttacacccttaccccagaggttggagaactgatagaaaaggtccgaaaggcccaccaagagaccttccccgctctgtgtcagttaggcaagtataccaccaataactcatcagaacagcgagtcagcctggacatcgatctgtgggacaaattctcggagctgagcaccaaatgcatcattaagaccgtggagtttgcaaagcagttgccagggtttaccactctgactattgccgatcagatcacgttattgaaggcagcgtgcttagacatcctgattttgaggatttgcacacgttacactcccgaacaggacacgatgactttctccgatggattgactctaaatcggacacagatgcataatgccggatttggccctcttacagatcttgtgttcgcttttgccaatcagctgctcccacttgagatggacgatgcagagaccggtcttttaagcgccatctgtctgatttgcggcgaccggcaggatctggagcagccggaccgggtcgacatgctacaggagccactgttggaggccctgaaggtctacgtacgaaaacgtagaccctctcgcccacatatgttccccaaaatgttaatgaaaatcaccgacttgaggagcatatccgctaaaggtgcggagagggtcattaccctgaaaatggaaatcccgggaagcatgccaccactaattcaggagatgctggagaacagtgaaggtctggatacattatcaggacagccaggcggaggaggcagagatggaggtggactcgcgccaccacccggaagctgtagtccctccctgtccccttcatccaatagatccagtcccgctacttag

SEQ ID NO: 57657 - DNA, 1098 bp, Artificial Sequence
  derived and/or modified sequence
atggcctctaattcctcctcttgtcctacaccaggtgggggtcacttaaacggatacccagtgcccccttatgcatttttttttcctccaatgttggggggtctgagtcccccaggagcattgaccactttgcagcatcagctgcccgtttctgggtactccactccttctccagctaccgtgaggaatgatagaaataagaagaaaaaggaagtgcctaagcctgaatgctcagagagctacactctgacacctgaagtgggtgaactgatagagaaagtcagaaaagctcaccaggagacatttcctgctctgtgccagctgggtaagtatactacgaataactcaagcgagcaacgcgtgtctttggatatcgacctctgggataagttttccgagctcagtaccaaatgtattataaagactgtggagtttgcaaaacagttgcctgggttcactaccctgactattgcggaccagatcacattactcaaagccgcatgcttagacatcctcatcctgagaatctgcacaagatatacccctgaacaagatacaatgaccttctctgatggcctcacactgaaccggacacagatgcacaacgctgggttcggtcctctcacggatctggtgtttgcattcgcaaaccaattgttaccacttgagatggacgatgcggagaccgggctgctgagtgccatttgcttgatttgtggggatcgccaggacctcgagcaacccgaccgggtggacatgttgcaagagcccctcctcgaagccctgaaggtatatgttcgtaagagacgaccatcccggcctcatatgttccctaaaatgttaatgaagatcaccgacttacgtagcatcagtgctaaaggtgccgaaagagttatcacgctgaaaatggagattcctggatccatgcctcctctaattcaggagatgctcgagaactccgaaggcctggacacactttctgggcagccaggcggaggaggtcgcgatgggggaggcctcgcccctcctcctggctcgtgctcaccctccctgtctccttcaagcaatagaagctcccccgctacgcacagtccatag

SEQ ID NO: 57658 - DNA, 1052 bp, Artificial Sequence
  derived and/or modified sequence
tcagctccccagctaatgggccaagagattctccccgccaggtcccccactctcaggctggggagccctactccccacttgccccaggagctgctcagagccagtcccaagggacccccagggagactgcagctgggagggctggctgtgagaaacgaccgaaacaagaagaagaaggaggtgcccaagcccgagtgctctgagagctacacgctgacgccggaggtgggggagctcattgagaaggtgcgcaaagcgcaccaggaaaccttccctgccctctgccagctgggcaaatacactacgaacaacagctcagaacaacgtgtctctctggacattgacctctgggacaagttcagtgaactctccaccaagtgcatcattaagactgtggagttcgccaagcagctgcccggcttcaccaccctcaccatcgccgaccagatcaccctcctcaaggctgcctgcctggacatcctgatcctgcggatctgcacgcggtacacgcccgagcaggacaccatgaccttctcggacgggctgaccctgaaccggacccagatgcacaacgctggcttcggccccctcaccgacctggtctttgccttcgccaaccagctgctgcccctggagatggatgatgcggagacggggctgctcagcgccatctgcctcatctgcggagaccgccaggacctggagcagccggaccgggtggacatgctgcaggagccgctgctggaggcgctaaaggtctacgtgcggaagcggaggcccagccgcccccacatgttccccaagatgctaatgaagattactgacctgcgaagcatcagcgccaagggggctgagcgggtgatcacgctgaagatggagatcccgggctccatgccgcctctcatccaggaaatgttggagaactcagagggcctggacactctgagcggacagccggggggtggggggcgggacgggggtggcctggcccccccgccaggcagctgtagccccagcctcagccccagctccaacagaagcagcccggccac

SEQ ID NO: 57659 - DNA, 3104 bp, Artificial Sequence
  derived and/or modified sequence
ctgctccgtaccctccgccccttcagtctggggctccgggtaaagtttcagcctccgcacgtgactcgctatggccgctgccatcgccccgcgcccctgagccgcggccccctggacggctcctctcccgggaccccgcaccctgatgccgagcagcaccagggcgccgggttagggcagacgctgtgctcgctggcaccccgaacgggttgcttcccccgctgcgagcatcacaggacatggccccctcagccacctagctggggcccatctaggagtggcatcttttttggtgccctgaaggccagctctggaccttcccaggaaaagtgccagctcacagaactgcttgaccaaaggaccggctcttgagacatcccccaacccacctggcccccagctagggtgggggctccaggagactgagattagcctgccctctttggacagcagctccaggacagggcgggtgggctgaccacccaaaccccatctgggcccaggccccatgccccgaggaggggtggtctgaagcccaccagagccccctgccagactgtctgcctcccttctgactgtggccgcttggcatggccagcaacagcagctcctgcccgacacctgggggcgggcacctcaatgggtacccggtgcctccctacgccttcttcttcccccctatgctgggtggactctccccgccaggcgctctgaccactctccagcaccagcttccagttagtggatatagcacaccatccccagccactgtgagaaacgaccgaaacaagaagaagaaggaggtgcccaagcccgagtgctctgagagctacacgctgacgccggaggtgggggagctcattgagaaggtgcgcaaagcgcaccaggaaaccttccctgccctctgccagctgggcaaatacactacgaacaacagctcagaacaacgtgtctctctggacattgacctctgggacaagttcagtgaactctccaccaagtgcatcattaagactgtggagttcgccaagcagctgcccggcttcaccaccctcaccatcgccgaccagatcaccctcctcaaggctgcctgcctggacatcctgatcctgcggatctgcacgcggtacacgcccgagcaggacaccatgaccttctcggacgggctgaccctgaaccggacccagatgcacaacgctggcttcggccccctcaccgacctggtctttgccttcgccaaccagctgctgcccctggagatggatgatgcggagacggggctgctcagcgccatctgcctcatctgcggagaccgccaggacctggagcagccggaccgggtggacatgctgcaggagccgctgctggaggcgctaaaggtctacgtgcggaagcggaggcccagccgcccccacatgttccccaagatgctaatgaagattactgacctgcgaagcatcagcgccaagggggctgagcgggtgatcacgctgaagatggagatcccgggctccatgccgcctctcatccaggaaatgttggagaactcagagggcctggacactctgagcggacagccggggggtggggggcgggacgggggtggcctggcccccccgccaggcagctgtagccccagcctcagccccagctccaacagaagcagcccggccacccactccccgtgaccgcccacgccacatggacacagccctcgccctccgccccggcttttctctgcctttctaccgaccatgtgaccccgcaccagccctgcccccacctgccctcccgggcagtactggggaccttccctgggggacggggagggaggaggcagcgactccttggacagaggcctgggccctcagtggactgcctgctcccacagcctgggctgacgtcagaggccgaggccaggaactgagtgaggcccctggtcctgggtctcaggatgggtcctgggggcctcgtgttcatcaagacacccctctgcccagctcaccacatcttcatcaccagcaaacgccaggacttggctcccccatcctcagaactcacaagccattgctccccagctggggaacctcaacctcccccctgcctcggttggtgacagagggggtgggacaggggcggggggttccccctgtacataccctgccataccaaccccaggtattaattctcgctggttttgtttttattttaatttttttgttttgatttttttaataagaattttcattttaagcacatttatactgaaggaatttgtgctgtgtattggggggagctggatccagagctggagggggtgggtccgggggagggagtggctcggaaggggcccccactctcctttcatgtccctgtgccccccagttctcctcctcagccttttcctcctcagttttctctttaaaactgtgaagtactaactttccaaggcctgccttcccctccctcccactggagaagccgccagcccctttctccctctgcctgaccactgggtgtggacggtgtggggcagccctgaaaggacaggctcctggccttggcacttgcctgcacccaccatgaggcatggagcagggcagagcaagggccccgggacagagttttcccagacctggctcctcggcagagctgcctcccgtcagggcccacatcatctaggctccccagcccccactgtgaaggggctggccaggggcccgagctgcccccacccccggcctcagccaccagcacccccatagggcccccagacaccacacacatgcgcgtgcgcacacacacaaacacacacacactggacagtagatgggccgacacacacttggcccgagttcctccatttccctggcctgccccccacccccaacctgtcccacccccgtgccccctccttaccccgcaggacgggcctacaggggggtctcccctcacccctgcacccccagctgggggagctggctctgccccgacctccttcaccaggggttggggccccttcccctggagcccgtgggtgcacctgttactgttgggctttccactgagatctactggataaagaataaagttctatttattct

SEQ ID NO: 57660 - DNA, 1041 bp, Artificial Sequence
  derived and/or modified sequence
atgggccaggagatcctgcccgccagaagccccaccctgagactgggcagccccaccccccacctgccccaggagctgctgagagccagccccaagggcccccccggcagactgcagctgggcggcctggccgtgagaaacgacagaaacaagaagaagaaggaggtgcccaagcccgagtgcagcgagagctacaccctgacccccgaggtgggcgagctgatcgagaaggtgagaaaggcccaccaggagaccttccccgccctgtgccagctgggcaagtacaccaccaacaacagcagcgagcagagagtgagcctggacatcgacctgtgggacaagttcagcgagctgagcaccaagtgcatcatcaagaccgtggagttcgccaagcagctgcccggcttcaccaccctgaccatcgccgaccagatcaccctgctgaaggccgcctgcctggacatcctgatcctgagaatctgcaccagatacacccccgagcaggacaccatgaccttcagcgacggcctgaccctgaacagaacccagatgcacaacgccggcttcggccccctgaccgacctggtgttcgccttcgccaaccagctgctgcccctggagatggacgacgccgagaccggcctgctgagcgccatctgcctgatctgcggcgacagacaggacctggagcagcccgacagagtggacatgctgcaggagcccctgctggaggccctgaaggtgtacgtgagaaagagaagacccagcagaccccacatgttccccaagatgctgatgaagatcaccgacctgagaagcatcagcgccaagggcgccgagagagtgatcaccctgaagatggagatccccggcagcatgccccccctgatccaggagatgctggagaacagcgagggcctggacaccctgagcggccagcccggcggcggcggcagagacggcggcggcctggcccccccccccggcagctgcagccccagcctgagccccagcagcaacagaagcagccccgccacctag

SEQ ID NO: 57661 - DNA, 1098 bp, Artificial Sequence
  derived and/or modified sequence
atggccagcaacagcagcagctgccccacccccggcggcggccacctgaacggctaccccgtgcccccctacgccttcttcttcccccccatgctgggcggcctgagcccccccggcgccctgaccaccctgcagcaccagctgcccgtgagcggctacagcacccccagccccgccaccgtgagaaacgacagaaacaagaagaagaaggaggtgcccaagcccgagtgcagcgagagctacaccctgacccccgaggtgggcgagctgatcgagaaggtgagaaaggcccaccaggagaccttccccgccctgtgccagctgggcaagtacaccaccaacaacagcagcgagcagagagtgagcctggacatcgacctgtgggacaagttcagcgagctgagcaccaagtgcatcatcaagaccgtggagttcgccaagcagctgcccggcttcaccaccctgaccatcgccgaccagatcaccctgctgaaggccgcctgcctggacatcctgatcctgagaatctgcaccagatacacccccgagcaggacaccatgaccttcagcgacggcctgaccctgaacagaacccagatgcacaacgccggcttcggccccctgaccgacctggtgttcgccttcgccaaccagctgctgcccctggagatggacgacgccgagaccggcctgctgagcgccatctgcctgatctgcggcgacagacaggacctggagcagcccgacagagtggacatgctgcaggagcccctgctggaggccctgaaggtgtacgtgagaaagagaagacccagcagaccccacatgttccccaagatgctgatgaagatcaccgacctgagaagcatcagcgccaagggcgccgagagagtgatcaccctgaagatggagatccccggcagcatgccccccctgatccaggagatgctggagaacagcgagggcctggacaccctgagcggccagcccggcggcggcggcagagacggcggcggcctggcccccccccccggcagctgcagccccagcctgagccccagcagcaacagaagcagccccgccacccacagcccctag

SEQ ID NO: 57662 - protein, 158 aa, Artificial Sequence
  derived and/or modified sequence
MNKRDYMNTSVQEPPLDYSFRSIHVIQDLVNEEPRTGLRPLKRSKSGKSLTQSLWLNNNVLNDLRDFNQVASQLLEHPENLAWIDLSFNDLTSIDPVLTTFFNLSVLYLHGNSIQRLGEVNKLAVLPRLRSLTLHGNPMEEEKGYRVPGSVEMPHRPP

SEQ ID NO: 57663 - DNA, 477 bp, Artificial Sequence
  derived and/or modified sequence
atgaataagcgcgactacatgaatactagcgtgcaggagcctcctctggattactcattccggtcaattcatgtgatccaagacttggtaaatgaggagccacggaccggattgaggcccctgaaacgaagtaaaagcggcaagagcctcacacagtcgctatggctgaataataacgtgctaaacgacctgagagatttcaatcaggtcgccagccagctactggagcaccccgaaaatctcgcctggatcgatcttagttttaatgatcttacttcaatagacccagtcctgacaaccttttttaacctgtcagttttatatctgcatggcaattctattcaacggttgggcgaagttaacaagctggccgttctcccacggctgaggagtctgaccctgcatggtaatcccatggaggaagaaaaggggtaccgggtccctggatcggtggaaatgccccacaggccaccatag

SEQ ID NO: 57664 - DNA, 477 bp, Artificial Sequence
  derived and/or modified sequence
atgaacaaacgagactacatgaacacctccgttcaggagcctcctctggattattcattccgatccatccatgtcatccaggatctggtgaacgaggaacctagaactgggctgcgcccgctcaagcgcagtaagtctgggaaatccctaacgcagagcctgtggcttaataataacgtgctgaatgacctgagagattttaaccaggtcgcgtcgcagcttcttgaacatcccgagaacttggcttggatagacctgtcctttaatgatctgacttctatcgaccccgtcctcaccacctttttcaacctgagcgtattgtacctgcatggcaattccatccagcgcctcggcgaggtcaataagctggctgtgttgccacgcttacgttcgttgactctgcacgggaatccgatggaggaggagaaagggtatcgagtccccgggagcgtggaaatgccccaccgccctccttag

SEQ ID NO: 57665 - DNA, 477 bp, Artificial Sequence
  derived and/or modified sequence
atgaacaagagggactacatgaacacctctgtgcaggagccccccctggactacagcttccgcagcatccacgtgatccaggacctggtgaatgaggagcccaggacaggcctgcggcccctgaagaggagcaagagcggcaagagcctgacccagagcctgtggctgaacaacaacgtgctgaatgacctgcgggacttcaaccaggtggccagccagctgctggagcaccctgagaacctggcctggattgacctgtccttcaatgacctgaccagcattgatcctgtgctgaccaccttcttcaacctgtctgtgctgtacctgcacggcaacagcatccagaggctgggggaggtgaacaagctggccgtgctgccccggctgcggagcctgaccctgcacggcaaccccatggaggaggagaagggctacagagtgcccggctctgtggagatgccccacaggcctccttag

SEQ ID NO: 57666 - DNA, 983 bp, Artificial Sequence
  derived and/or modified sequence
agagaaggggtatcaccgcttccggaccccggcctgtacttgaaggcaaagagaactacaaatcccagcgtcacccgcggccttgaagccccgcccctgacaaactgaaggtcccggtaagcatcgcgtcagtacttatggcgcctgccgggttgtggtgacgaaagcagttgccatggagttgctctgagtaaccctgaggcagtgggacgccaagactggagaggaagcgactgcggggagtatttccattttaaccggaaacaatccctgaacccacaggaatgaatgcctaatggtggagtttcagccatcagtgacaggctgaacccagactcccagggcacctgcttgcacctttgaatgatggcctgaactatgaacaaacgggactatatgaacacttcggtacaggagccccctcttgactactccttcagaagcatccacgtcattcaagatctggtaaatgaggagccaaggacaggactacgaccactgaagcgttcaaagtcggggaaatcactgacccagtccctgtggctgaataacaatgttctcaatgatctgagagacttcaaccaggtggcttcacagctgttggagcacccagagaacctggcctggatcgacctgtcctttaatgacctgacttccattgaccctgtcctaacaactttcttcaacctgagtgtcctctatcttcacggcaacagcatccagcgcctgggggaggtgaataagctggctgtccttcctcggctccgtagcctgacactccatgggaaccccatggaggaagagaaagggtatagagtaccagggtctgtagagatgcctcacaggcctccatgacaggccaagaagatggcctatgatctctgaaaccagcccccacttcaatcagatcaaagtaattccattctgttttatatgctgggattctgcttaagatttcatttgataaaaagaatcttctgctt

SEQ ID NO: 57667 - DNA, 726 bp, Artificial Sequence
  derived and/or modified sequence
aacaatccctgaacccacaggaatgaatgcctaatggtggagtttcagccatcagtgacaggctgaacccagactcccagggcacctgcttgcacctttgaatgatggcctgaactatgaacaaacgggactatatgaacacttcggtacaggagccccctcttgactactccttcagaagcatccacgtcattcaagatctggtaaatgaggagccaaggacaggactacgaccactgaagcgttcaaagtcggggaaatcactgacccagtccctgtggctgaataacaatgttctcaatgatctgagagacttcaaccaggtggcttcacagctgttggagcacccagagaacctggcctggatcgacctgtcctttaatgacctgacttccattgaccctgtcctaacaactttcttcaacctgagtgtcctctatcttcacggcaacagcatccagcgcctgggggaggtgaataagctggctgtccttcctcggctccgtagcctgacactccatgggaaccccatggaggaagagaaagggtatagagtaccagggtctgtagagatgcctcacaggcctccatgacaggccaagaagatggcctatgatctctgaaaccagcccccacttcaatcagatcaaagtaattccattctgttttatatgctgggattctgcttaagatttcatttgataaaaagaatcttctgcttaaaaa

SEQ ID NO: 57668 - DNA, 477 bp, Artificial Sequence
  derived and/or modified sequence
atgaacaagcgggactacatgaacaccagcgtgcaggagccccccctggattacagtttccgcagtattcatgtgatccaggatttggtgaacgaagagcctcgcaccggactgcggcccctcaagcgctcgaaatccggcaagtcccttactcagagcctgtggctgaataacaatgtacttaatgacctaagagacttcaatcaggtcgctagtcaactgctcgagcaccctgaaaatctagcctggatcgatctgagcttcaatgatttaacctccatcgaccctgtcttgaccacctttttcaatctgtctgtgctctatttacacgggaacagcatacaacgattaggagaggttaataagctcgctgtgctgcctagactgcgctcgctgactctgcacggcaatccaatggaggaagagaaggggtaccgggttcctgggtccgtggaaatgccacacaggccaccatag

SEQ ID NO: 57669 - DNA, 477 bp, Artificial Sequence
  derived and/or modified sequence
atgaacaagcgggactacatgaacaccagcgtgcaggagccccccttggactactcctttcggtccattcatgtgattcaagatttggtgaacgaggagccgcgcaccggtctgcgtcctttaaagaggtccaagagcggcaaaagtttaacccagtctttgtggctgaacaataacgttcttaatgacctgagggactttaaccaggttgcatcccagcttttggagcatcccgaaaatctcgcatggattgatctgagttttaatgacctcacctcaattgacccagtgctcacaactttctttaacttatctgtgctgtacttacacggaaacagtatacagaggctgggggaagtaaacaagttggcggtgctgccaaggctgagatccttgacactccatggcaacccaatggaggaggagaagggataccgtgtgcccggtagtgtagaaatgccccaccgccctccatag

SEQ ID NO: 57670 - DNA, 477 bp, Artificial Sequence
  derived and/or modified sequence
atgaataaacgcgactacatgaacacgtccgtgcaggagcccccactggattattcttttcggagtattcatgtaattcaagatctggtaaacgaagaaccccgaactggactccgacccctgaaacggagcaaatccggcaaatcactcacccagtccctgtggctaaataacaacgtgctgaatgatctgcgggactttaaccaggtggcatcacaactgttggaacatcccgaaaatttggcgtggatagacctgagttttaatgacctgacttcgattgaccctgtgttgacaacattctttaacctgagtgtgctgtatctgcatggcaactccattcagcgcctgggcgaggtgaataagctcgcagtgcttccacgcttgagatctctgacactccatggcaatcccatggaggaagagaagggctaccgcgtcccaggctccgtggagatgccccaccgacccccatag

SEQ ID NO: 57671 - DNA, 477 bp, Artificial Sequence
  derived and/or modified sequence
atgaacaaacgcgattatatgaacacttcagtgcaagagccccctctggattattccttccgttcaatccacgttatccaggaccttgttaacgaagagcctcgcacaggactgcgcccattaaaaaggtctaagtccggaaaatcgttgactcagagtttgtggctgaacaacaacgtcctcaatgacctcagggattttaatcaggttgcctcccagctgctagagcacccggaaaatctggcttggatagatctcagcttcaacgatttaacctctattgaccctgtgctcactacgtttttcaatctgtcagtgctgtatctccacgggaatagtatccagagactgggcgaagttaataagctcgccgtcctgcccaggcttcggtccctcactctacatggcaatccaatggaggaggagaaaggctacagggtacccggttccgtggagatgccccatagacctccatag

SEQ ID NO: 57672 - DNA, 477 bp, Artificial Sequence
  derived and/or modified sequence
atgaacaagagagactacatgaacaccagcgtgcaggagccccccctggactacagcttcagaagcatccacgtgatccaggacctggtgaacgaggagcccagaaccggcctgagacccctgaagagaagcaagagcggcaagagcctgacccagagcctgtggctgaacaacaacgtgctgaacgacctgagagacttcaaccaggtggccagccagctgctggagcaccccgagaacctggcctggatcgacctgagcttcaacgacctgaccagcatcgaccccgtgctgaccaccttcttcaacctgagcgtgctgtacctgcacggcaacagcatccagagactgggcgaggtgaacaagctggccgtgctgcccagactgagaagcctgaccctgcacggcaaccccatggaggaggagaagggctacagagtgcccggcagcgtggagatgccccacagacccccctag

SEQ ID NO: 57673 - protein, 291 aa, Artificial Sequence
  derived and/or modified sequence
MGTPWRKRKGIAGPGLPDLSCALVLQPRAQVGTMSPAIALAFLPLVVTLLVRYRHYFRLLVRTVLLRSLRDCLSGLRIEERAFSYVLTHALPGDPGHILTTLDHWSSRCEYLSHMGPVKGQILMRLVEEKAPACVLELGTYCGYSTLLIARALPPGGRLLTVERDPRTAAVAEKLIRLAGFDEHMVELIVGSSEDVIPCLRTQYQLSRADLVLLAHRPRCYLRDLQLLEAHALLPAGATVLADHVLFPGAPRFLQYAKSCGRYRCRLHHTGLPDFPAIKDGIAQLTYAGPG

SEQ ID NO: 57674 - DNA, 876 bp, Artificial Sequence
  derived and/or modified sequence
atgggcacaccatggagaaagcgcaagggaattgcgggcccaggcctcccagacctaagttgcgccctggtgctgcagccacgagcccaggttggaacaatgagtccggctatagctctggcatttctgccactcgttgttacactcctggtcagatatcgtcattacttccggctgctggtgaggaccgtgctgcttaggagcctccgagattgtctatccggcctgagaattgaggagcgcgctttttcctacgttctcacacatgcgttacccggcgaccccggacatattttgaccactttagaccactggtccagccggtgcgaatatttgagccacatggggcctgtgaagggccagatcctgatgcggctggtcgaggaaaaggcccccgcttgcgtcctagaattggggacatattgcggttactcaactcttctcatcgctcgggccctcccaccgggtggcagacttctgaccgttgagagagaccctagaaccgcagccgtggccgagaagctgatcagactggccggatttgatgaacatatggtggaactgatcgttggctcctccgaggatgtcattccttgtctccgcacccagtatcagctgagtcgcgccgatctggtgctactggcccatagacctcgctgctatctacgggatttgcagctgttggaggctcatgcactactgcctgcaggagcgacggtcctggcagaccacgtgctcttccccggcgcccctcgatttctacagtacgctaagagctgcggcagatatcgctgtaggctgcaccataccgggctcccggacttcccagcaattaaagatgggattgcccagctgacatacgcgggaccaggctag

SEQ ID NO: 57675 - DNA, 876 bp, Artificial Sequence
  derived and/or modified sequence
atgggaactccttggcggaagagaaagggcatcgccggcccagggctaccagatctgagttgtgcccttgtgttacagccgcgggcccaggtaggaacaatgtctcctgcaatcgcactcgctttcttgccacttgttgtcacgctgctcgtccgttatcggcactacttcaggttgcttgttaggaccgttcttctgcgctcccttcgggattgcctttccggtctgagaatcgaggaacgtgccttttcttatgtcttgacccacgctctgcctggcgatcctgggcacatcctgacaactctcgatcactggagctctcgctgtgagtacctgagccatatgggaccggttaaagggcaaatcctgatgaggcttgtcgaggaaaaagctccagcatgcgtactagagctgggcacttattgcggatacagcacgcttctcatcgcccgagcattgcccccgggcggcaggttgttgaccgtcgagcgcgacccacgcacagccgcagtggccgaaaagttgattcgcctcgcaggtttcgatgaacacatggtcgagcttatcgtgggtagttcagaagatgtcatcccttgtctacgaacgcagtaccagttgtcgcgggcagatcttgtactcctcgcgcaccgaccaaggtgttatctgagggatctccagcttttggaagctcacgccctcctgccggctggcgctactgttctcgctgaccatgtgttattccccggggctcctagatttttacagtatgctaagagctgcggtagatacagatgtaggttgcatcatacgggcctccccgactttccggcgataaaggacggcatcgcccagcttacatatgcgggaccaggttag

SEQ ID NO: 57676 - DNA, 876 bp, Artificial Sequence
  derived and/or modified sequence
atgggcaccccctggaggaagaggaaaggaattgctggccctggcctgcctgacctgagctgtgccctggtgctgcagccccgggcccaggtgggcaccatgagccctgccatcgccctggccttcctgcccctggtggtgaccctgctggtgcgctaccgccactacttccggctgctggtgaggacagtgctgctgcggagcctgcgggactgcctgagcggcctgcgcatcgaggagcgggccttctcctatgtgctgacccacgccctgcccggggaccccggccacatcctgaccaccctggaccactggagcagccgctgtgagtacctgagccacatgggccctgtgaagggccagatcctgatgaggctggtggaggagaaggccccagcctgtgtgctggagctgggcacctactgcggctacagcaccctgctgattgcccgggccctgcccccaggcggccgcctgctgactgtggagcgggaccccaggacagctgctgtggccgagaagctgatccggctggccggctttgatgagcacatggtggagctgattgtgggcagcagtgaagatgtgatcccctgcctgcggacccagtaccagctgagcagagctgacctggtgctgctggcccaccggccccgctgctacctgcgggacctgcagctgctggaggcccacgccctgctgcctgctggggccaccgtgctggccgaccacgtgctcttccctggggccccccgcttcctgcagtatgccaagagctgtggccgctaccgctgccgcctgcaccacacaggcctgcctgacttccctgccatcaaggatggcatcgcccagctgacctacgccggccctggatag

SEQ ID NO: 57677 - DNA, 3601 bp, Artificial Sequence
  derived and/or modified sequence
ctttcggactcggttatggaggaggccttccgctcgcagcggcctctccagcaccccttttaggcctgagcacccgcaggggtgcccaggccgcacgccaaacgcgggcccgcgccggttacctggctgcgcgctcccgctctgcctcgcgattctccggaatcgtacctcttcgtgggctcgcgccagcgctgtgagcgcacaattagtttaaactatggccccgccccctcgcgctgccctctgattggcctctgtcggcggggcccgcttaaggacccgggaaaaggaagtttgagggccactgggaaagagaaggggtatcaccgcttccggaccccggcctgtacttgaaggcaaagagaactacaaatcccagcgtcacccgcggccttgaagccccgcccctgacaaactgaaggtcccggtaagcatcgcgtcagtacttatggcgcctgccgggttgtggtgacgaaagcagttgccatggagttgctctgagtaaccctgaggcagtgggacgccaagactggagaggaagcgactgcggatctggtaaatgaggagccaaggacaggactacgaccactgaagcgttcaaagtcggggaaatcactgacccagtccctgtggctgaataacaatgttctcaatgatctgagagacttcaaccaggtggcttcacagctgttggagcacccagagaacctggcctggatcgacctgtcctttaatgacctgacttccattgaccctgtcctaacaactttcttcaacctgagtgtcctctatcttcacggcaacagcatccagcgcctgggggaggtgaataagctggctgtccttcctcggctccgtagcctgacactccatgggaaccccatggaggaagagaaagggtatagcaggccctggactccccgacctgtcctgtgctctggtcctccagcccagggcccaggtagggaccatgtcccctgccattgcattggccttcctgccactggtggtaacattgctggtgcggtaccggcactacttccgattgctggtgcgcacggtcttgctgcgaagcctccgagactgcctgtcagggctgcggatcgaggagcgggccttcagctacgtgctcacccatgccctgcccggtgaccctggtcacatcctcaccaccctggaccactggagcagccgctgcgagtacttgagccacatggggcctgtcaaaggtcagatcctgatgcggctggtggaggagaaggcccctgcttgtgtgctggaattgggaacctactgtggatactctaccctgcttattgcccgagccctgccccctgggggtcgccttcttactgtggagcgggacccacgcacggcagcagtggctgaaaaactcatccgcctggccggctttgatgagcacatggtggagctcatcgtgggcagctcagaggacgtgatcccgtgcctacgcacccagtatcagctgagtcgggcagacctggtgctcctggcacaccggccacgatgttacctgagggacctgcagctgctggaggcccatgccctactgccagcaggtgccaccgtgctggctgaccatgtgctcttccctggtgcaccccgcttcttgcagtatgctaagagctgtggccgctaccgctgccgcctccaccacactggccttccagacttccctgccatcaaggatggaatagctcagctcacctatgctggaccaggctgaggtccaggcccaggggtacttactgatgcccacccccacccccacccaagcagggacctcaaaatcccctccctttcctgtttggggccttgacacacgctgggctcagggctagggagtctctcttcccacctctgacctctttcagcctctacactgacctcaagtgtcaagttctatcaggctgcttggtctcactaggccccctctttccagagagaaccatggactgacagcaagaagcctgagctcccgacccagctctgtcactgatttgctgagtgactccaagggaatccccaccttgctctgagatttaatcttctctcttaacacgaaggaagctggatgggagagctccaggggcctcccagttctcggcctcagaaagcctcccatcctcagcccatgccattctgggtgggatcagaggaagtggcaatgagttagacgccctgcaggaatagctggatgcaagctgggccagagaaaatggcacagaaccctggacccagggccagggatgccctggccttccctaactctggcccacctagccaattaggtgtggctgatgtcccttgagtgccctcttcctaaagcccaaaagaagatgctggactcctctgggccccaccaacaaatagggaatagacatgggtggaaaatcactcctttgtctttattaaagaaacttagaccagacctggcaatcaaggggtgaggtactggccaggaaggtggagtaggtttcaggccctggggatttcaagtgcagactgatggcctgggaggggccaaagagaccagatcctggcagcagctgaggaggtgcccaagggcactttcaggcactggggccatcagctggttctgtgggcaggggttgggggttgggatgcagggtagtttgggctggcctggaatctccctgaggccaccctgccttgtctacctagatcatccactggtcctgatcctgttcgttgccttccatgtccacctggagaggaggctgggtgtgggtggggaggggcctcagccagcctcagccccagatcctgcccctggctggatccagggtttctgtaccccttggccatcaactgggtcaggagcaagggtccaggaacagaggccctcccccataccccttgcctacctcattgacctctccatcatccggtgactcattgtagtcattcatctcgtccatgtcctgcatatcctcatcatcctctgagtcctcttcactatcctcatcatcttcatcatcctcttcttcctcgtcatcatagtgctggtgggcaggacagagcctgtaagccctacaggcctgcatggaccagttcaagaactgacccacttgagcctctctctagggccaatgaatgaccccctaccccgacactccctccttgagtctagcaggctggtgcatgttctgcaggaccttaatgctaggcccaatgcccaccccttctatctccccttttaggcttttacccagatctgagaaccacaactgctctgggtcagagacaggacattcagaattagagcagagcctcggtccactgcggcccccacacaggccccacctgctagagccactcacctctgaggctggcttgccaataggaaccaggttgttgtctttctccgcgatgctttggagctgtgggcaaaggcacagaggaacaaggccagagcccaagtagggcaggtcaggggcatgggactggcccattctgcccagaagacaacccacacgtgttggggagaagcttcctcccagttctcagggagatacaatccctttcttgtcatctgccatttatgaacttgatccaa

SEQ ID NO: 57678 - DNA, 3822 bp, Artificial Sequence
  derived and/or modified sequence
ctttcggactcggttatggaggaggccttccgctcgcagcggcctctccagcaccccttttaggcctgagcacccgcaggggtgcccaggccgcacgccaaacgcgggcccgcgccggttacctggctgcgcgctcccgctctgcctcgcgattctccggaatcgtacctcttcgtgggctcgcgccagcgctgtgagcgcacaattagtttaaactatggccccgccccctcgcgctgccctctgattggcctctgtcggcggggcccgcttaaggacccgggaaaaggaagtttgagggccactgggaaagagaaggggtatcaccgcttccggaccccggcctgtacttgaaggcaaagagaactacaaatcccagcgtcacccgcggccttgaagccccgcccctgacaaactgaaggtcccggtaagcatcgcgtcagtacttatggcgcctgccgggttgtggtgacgaaagcagttgccatggagttgctctgagtaaccctgaggcagtgggacgccaagactggagaggaagcgactgcggggagtatttccattttaaccggaaacaatccctgaacccacaggaatgaatgcctaatggtggagtttcagccatcagtgacaggctgaacccagactcccagggcacctgcttgcacctttgaatgatggcctgaactatgaacaaacgggactatatgaacacttcggtacaggagccccctcttgactactccttcagaagcatccacgtcattcaagatctggtaaatgaggagccaaggacaggactacgaccactgaagcgttcaaagtcggggaaatcactgacccagtccctgtggctgaataacaatgttctcaatgatctgagagacttcaaccaggtggcttcacagctgttggagcacccagagaacctggcctggatcgacctgtcctttaatgacctgacttccattgaccctgtcctaacaactttcttcaacctgagtgtcctctatcttcacggcaacagcatccagcgcctgggggaggtgaataagctggctgtccttcctcggctccgtagcctgacactccatgggaaccccatggaggaagagaaagggtatagcaggccctggactccccgacctgtcctgtgctctggtcctccagcccagggcccaggtagggaccatgtcccctgccattgcattggccttcctgccactggtggtaacattgctggtgcggtaccggcactacttccgattgctggtgcgcacggtcttgctgcgaagcctccgagactgcctgtcagggctgcggatcgaggagcgggccttcagctacgtgctcacccatgccctgcccggtgaccctggtcacatcctcaccaccctggaccactggagcagccgctgcgagtacttgagccacatggggcctgtcaaaggtcagatcctgatgcggctggtggaggagaaggcccctgcttgtgtgctggaattgggaacctactgtggatactctaccctgcttattgcccgagccctgccccctgggggtcgccttcttactgtggagcgggacccacgcacggcagcagtggctgaaaaactcatccgcctggccggctttgatgagcacatggtggagctcatcgtgggcagctcagaggacgtgatcccgtgcctacgcacccagtatcagctgagtcgggcagacctggtgctcctggcacaccggccacgatgttacctgagggacctgcagctgctggaggcccatgccctactgccagcaggtgccaccgtgctggctgaccatgtgctcttccctggtgcaccccgcttcttgcagtatgctaagagctgtggccgctaccgctgccgcctccaccacactggccttccagacttccctgccatcaaggatggaatagctcagctcacctatgctggaccaggctgaggtccaggcccaggggtacttactgatgcccacccccacccccacccaagcagggacctcaaaatcccctccctttcctgtttggggccttgacacacgctgggctcagggctagggagtctctcttcccacctctgacctctttcagcctctacactgacctcaagtgtcaagttctatcaggctgcttggtctcactaggccccctctttccagagagaaccatggactgacagcaagaagcctgagctcccgacccagctctgtcactgatttgctgagtgactccaagggaatccccaccttgctctgagatttaatcttctctcttaacacgaaggaagctggatgggagagctccaggggcctcccagttctcggcctcagaaagcctcccatcctcagcccatgccattctgggtgggatcagaggaagtggcaatgagttagacgccctgcaggaatagctggatgcaagctgggccagagaaaatggcacagaaccctggacccagggccagggatgccctggccttccctaactctggcccacctagccaattaggtgtggctgatgtcccttgagtgccctcttcctaaagcccaaaagaagatgctggactcctctgggccccaccaacaaatagggaatagacatgggtggaaaatcactcctttgtctttattaaagaaacttagaccagacctggcaatcaaggggtgaggtactggccaggaaggtggagtaggtttcaggccctggggatttcaagtgcagactgatggcctgggaggggccaaagagaccagatcctggcagcagctgaggaggtgcccaagggcactttcaggcactggggccatcagctggttctgtgggcaggggttgggggttgggatgcagggtagtttgggctggcctggaatctccctgaggccaccctgccttgtctacctagatcatccactggtcctgatcctgttcgttgccttccatgtccacctggagaggaggctgggtgtgggtggggaggggcctcagccagcctcagccccagatcctgcccctggctggatccagggtttctgtaccccttggccatcaactgggtcaggagcaagggtccaggaacagaggccctcccccataccccttgcctacctcattgacctctccatcatccggtgactcattgtagtcattcatctcgtccatgtcctgcatatcctcatcatcctctgagtcctcttcactatcctcatcatcttcatcatcctcttcttcctcgtcatcatagtgctggtgggcaggacagagcctgtaagccctacaggcctgcatggaccagttcaagaactgacccacttgagcctctctctagggccaatgaatgaccccctaccccgacactccctccttgagtctagcaggctggtgcatgttctgcaggaccttaatgctaggcccaatgcccaccccttctatctccccttttaggcttttacccagatctgagaaccacaactgctctgggtcagagacaggacattcagaattagagcagagcctcggtccactgcggcccccacacaggccccacctgctagagccactcacctctgaggctggcttgccaataggaaccaggttgttgtctttctccgcgatgctttggagctgtgggcaaaggcacagaggaacaaggccagagcccaagtagggcaggtcaggggcatgggactggcccattctgcccagaagacaacccacacgtgttggggagaagcttcctcccagttctcagggagatacaatccctttcttgtcatctgccatttatgaacttgatccaa

SEQ ID NO: 57679 - DNA, 876 bp, Artificial Sequence
  derived and/or modified sequence
atgggcaccccctggcggaagcggaagggcatcgccggccccggcctgccagatttgtcttgcgccttggtgcttcaaccacgggctcaagttggcacgatgtcccctgctatcgctctcgcctttttgcccctggtcgttacattgttagtgcgctataggcattacttccggctgttggtgagaactgtgctattgcggtccttgcgggattgtctcagcggcctccgcattgaagagcgtgccttttcctacgtcctcactcacgccctcccgggtgatcctgggcatatcctcaccacccttgaccattggagtagccggtgcgaatatttatcacacatgggccctgtcaaagggcaaatcctgatgcgcctcgtagaagagaaggcaccggcttgtgtgctagagctgggtacatactgtggctacagcaccctgctcatcgccagagccctgccgccaggtgggaggctacttactgtggaaagagacccgaggacggctgccgttgctgagaagctcatcagactggctggttttgatgagcatatggttgagcttatcgtcggatcatccgaagacgttatcccatgtcttcggacacagtaccaactctcgagagccgatcttgttctgcttgcccacagaccaaggtgctacctgcgcgacttgcagctcctcgaagctcacgccctcctgcctgccggggctacggttctcgctgaccatgtgctttttcccggagccccacgattcttgcagtatgcgaagtcttgtggaaggtatagatgcagactgcaccatacaggcctccccgatttccctgccattaaggacggaattgcgcagctgacttatgccggcccaggttag

SEQ ID NO: 57680 - DNA, 876 bp, Artificial Sequence
  derived and/or modified sequence
atgggcaccccctggcggaagcggaagggcatcgccggccccggcttgcctgacctatcttgcgctctggtgctgcagccaagggcacaggtcggaaccatgtctccggccattgcactggctttcctgccactggtggtgaccctcctcgtgcggtacagacattacttcagacttcttgttagaaccgtgcttttacggagcctcagagattgtctgagtggccttcgtatcgaggagagggcctttagttacgttctgacacacgcgttaccaggcgatcccggacacattcttaccaccctcgatcattggagttctcgttgcgagtacctgagccatatgggccctgtaaaggggcagatcctcatgcgtctggtcgaagagaaggcgcctgcatgcgtcttggaactaggaacttattgcgggtacagcactcttctcatagcaagagctttgccaccaggcgggcggctgctcacagttgaacgggatccacgtacagctgcagttgcagagaaacttatccggctcgccggatttgacgagcacatggtcgagttgatagtcggctcctccgaagacgtcataccatgcttacgaactcagtaccagttgtcgcgggcggaccttgtgttgctcgcgcaccgtcctcgatgctacttgagggacttacagttactggaggctcacgccctcttgcccgccggggccaccgtgctggctgatcacgttttgtttccgggcgcccctcgtttcctgcagtacgctaagtcctgcggcaggtataggtgccgcttgcatcatacaggattgcccgattttcccgctatcaaggatggcatagcccagttgacttatgctggccctggctag

SEQ ID NO: 57681 - DNA, 876 bp, Artificial Sequence
  derived and/or modified sequence
atggggactccatggcggaaaaggaagggcatcgctggtcccggattgccggacttaagctgtgcactggtgctgcagcctagggcccaagtaggcaccatgtcccctgcgatcgccttggctttcttgccacttgtcgtaacgcttctggtacgctatagacattacttccgcctgctagttcgcacagtgttactgagaagccttagagactgcctttctggactacggatcgaagagagggctttctcttatgttttaacgcacgcacttcctggagatccaggacatattctaactacactggatcactggtccagtcggtgtgagtatctgagccacatgggccctgtgaaggggcagatcctaatgcgattagtagaggagaaggcgcctgcctgcgtcctcgaattagggacctattgcggatactcaaccctactgattgcacgcgctctgccccctgggggtcgtctactgactgtggagcgtgacccacgtacggctgcagtggccgaaaagctcatccggctcgcaggcttcgacgaacacatggtcgaacttattgtgggcagctcagaagacgtgattccttgcctgagaacacagtatcagttaagtagggccgatctggtgttactcgctcaccgtcctcggtgttacttgagagacctccaattgttggaagcccatgcgttactgccagccggagctaccgtgcttgctgatcatgtattatttccaggggctcccagatttctgcaatatgccaagtcctgcggcaggtaccgctgccgactccatcatacgggcctgccagacttcccagcaatcaaagacggtatcgcccagctgacttatgcaggccctggttag

SEQ ID NO: 57682 - DNA, 876 bp, Artificial Sequence
  derived and/or modified sequence
atgggcacaccgtggcggaagagaaagggcatcgccggtcccggattgcctgatctgagctgtgccctggtgctccagcctagagctcaagtgggtaccatgtcgcctgctatcgctttggccttcctgcctctagtggtcacccttcttgtccgctataggcattatttccgccttttggtgcgcaccgtcctcttaaggtccctgagggattgcttgtctggattgcgtatcgaggaacgcgcattctcctatgtcctcacgcacgcgctgcccggtgaccctggacatattctcacgaccctcgatcactggagctctaggtgtgagtatctctcgcacatgggccctgtaaaggggcaaatcttaatgcggctcgttgaggaaaaggctccagcttgtgtgctggaactgggaacttactgtggctacagtacactcctgatcgccagggctcttcctcctggaggacggcttttgacagtggaacgcgacccacgaactgcagcagttgcagagaaattgatacgccttgcgggttttgatgagcatatggtcgaactgatcgtggggtcatctgaggatgtaataccatgcctccgtacacagtatcagctgtcccgcgctgacctcgtgctgctggcccaccgtccaagatgttacctgagagacctgcagctcctggaagcccatgctctcttacctgcaggagctacagtgttggcggatcatgtcctttttccaggcgcaccgaggttcctgcagtacgcgaagagctgtggacgctacagatgccgcctgcatcacacgggcctgcccgattttcctgctatcaaagatggcatagctcagcttacatatgccggacccggatag

SEQ ID NO: 57683 - DNA, 876 bp, Artificial Sequence
  derived and/or modified sequence
atgggcaccccctggagaaagagaaagggcatcgccggccccggcctgcccgacctgagctgcgccctggtgctgcagcccagagcccaggtgggcaccatgagccccgccatcgccctggccttcctgcccctggtggtgaccctgctggtgagatacagacactacttcagactgctggtgagaaccgtgctgctgagaagcctgagagactgcctgagcggcctgagaatcgaggagagagccttcagctacgtgctgacccacgccctgcccggcgaccccggccacatcctgaccaccctggaccactggagcagcagatgcgagtacctgagccacatgggccccgtgaagggccagatcctgatgagactggtggaggagaaggcccccgcctgcgtgctggagctgggcacctactgcggctacagcaccctgctgatcgccagagccctgccccccggcggcagactgctgaccgtggagagagaccccagaaccgccgccgtggccgagaagctgatcagactggccggcttcgacgagcacatggtggagctgatcgtgggcagcagcgaggacgtgatcccctgcctgagaacccagtaccagctgagcagagccgacctggtgctgctggcccacagacccagatgctacctgagagacctgcagctgctggaggcccacgccctgctgcccgccggcgccaccgtgctggccgaccacgtgctgttccccggcgcccccagattcctgcagtacgccaagagctgcggcagatacagatgcagactgcaccacaccggcctgcccgacttccccgccatcaaggacggcatcgcccagctgacctacgccggccccggctag

SEQ ID NO: 57684 - protein, 251 aa, Artificial Sequence
  derived and/or modified sequence
MGTPWRKRKGIAGPGLPDLSCALVLQPSLRDCLSGLRIEERAFSYVLTHALPGDPGHILTTLDHWSSRCEYLSHMGPVKGQILMRLVEEKAPACVLELGTYCGYSTLLIARALPPGGRLLTVERDPRTAAVAEKLIRLAGFDEHMVELIVGSSEDVIPCLRTQYQLSRADLVLLAHRPRCYLRDLQLLEAHALLPAGATVLADHVLFPGAPRFLQYAKSCGRYRCRLHHTGLPDFPAIKDGIAQLTYAGPG

SEQ ID NO: 57685 - DNA, 756 bp, Artificial Sequence
  derived and/or modified sequence
atgggcactccttggcgaaagaggaagggtatcgcagggcccggcctgcccgatctttcctgtgcactggtcctacaacctagcctgcgcgattgcctgtccgggttacgcattgaggagagagcttttagctatgtcctgacacacgccctccctggggaccctggccatattctaaccaccctggatcactggtctagcaggtgtgagtacttatctcacatgggacccgtgaagggtcagatcctcatgagattagtggaggaaaaggcgccagcatgtgttctggaactcggaacttattgcggatacagcactctcctgattgctcgagcactaccccctggaggaaggttgcttactgtggagcgtgatcccaggacggccgctgtggcagaaaagcttattagactggcaggattcgatgagcatatggtggagctgatcgtgggatcttccgaagacgtgattccatgcctgaggacacagtatcagctctctagggcagatttggtcctacttgcgcaccggccaaggtgctaccttagggatctgcagctgctggaggcacatgcccttctgcctgctggggctacagtactggctgaccatgtattgttccctggcgcgcccaggtttctgcagtatgccaaaagctgcggaaggtaccgctgccgactgcatcatactgggctccccgattttcccgccatcaaggatgggattgcacagctgacatatgctggaccaggctag

SEQ ID NO: 57686 - DNA, 756 bp, Artificial Sequence
  derived and/or modified sequence
atgggcaccccctggaggaagaggaaaggaattgctggccctggcctgcctgacctgagctgtgccctggtgctgcagcccagcctgcgggactgcctgagcggcctgcgcatcgaggagcgggccttctcctatgtgctgacccacgccctgcccggggaccccggccacatcctgaccaccctggaccactggagcagccgctgtgagtacctgagccacatgggccctgtgaagggccagatcctgatgaggctggtggaggagaaggccccagcctgtgtgctggagctgggcacctactgcggctacagcaccctgctgattgcccgggccctgcccccaggcggccgcctgctgactgtggagcgggaccccaggacagctgctgtggccgagaagctgatccggctggccggctttgatgagcacatggtggagctgattgtgggcagcagtgaagatgtgatcccctgcctgcggacccagtaccagctgagcagagctgacctggtgctgctggcccaccggccccgctgctacctgcgggacctgcagctgctggaggcccacgccctgctgcctgctggggccaccgtgctggccgaccacgtgctcttccctggggccccccgcttcctgcagtatgccaagagctgtggccgctaccgctgccgcctgcaccacacaggcctgcctgacttccctgccatcaaggatggcatcgcccagctgacctacgccggccctggatag

SEQ ID NO: 57687 - DNA, 3705 bp, Artificial Sequence
  derived and/or modified sequence
ctttcggactcggttatggaggaggccttccgctcgcagcggcctctccagcaccccttttaggcctgagcacccgcaggggtgcccaggccgcacgccaaacgcgggcccgcgccggttacctggctgcgcgctcccgctctgcctcgcgattctccggaatcgtacctcttcgtgggctcgcgccagcgctgtgagcgcacaattagtttaaactatggccccgccccctcgcgctgccctctgattggcctctgtcggcggggcccgcttaaggacccgggaaaaggaagtttgagggccactgggaaagagaaggggtatcaccgcttccggaccccggcctgtacttgaaggcaaagagaactacaaatcccagcgtcacccgcggccttgaagccccgcccctgacaaactgaaggtcccggtaagcatcgcgtcagtacttatggcgcctgccgggttgtggtgacgaaagcagttgccatggagttgctctgagtaaccctgaggcagtgggacgccaagactggagaggaagcgactgcggggagtatttccattttaaccggaaacaatccctgaacccacaggaatgaatgcctaatggtggagtttcagccatcagtgacaggctgaacccagactcccagggcacctgcttgcacctttgaatgatggcctgaactatgaacaaacgggactatatgaacacttcggtacaggagccccctcttgactactccttcagaagcatccacgtcattcaagatctggtaaatgaggagccaaggacaggactacgaccactgaagcgttcaaagtcggggaaatcactgacccagtccctgtggctgaataacaatgttctcaatgatctgagagacttcaaccaggtggcttcacagctgttggagcacccagagaacctggcctggatcgacctgtcctttaatgacctgacttccattgaccctgtcctaacaactttcttcaacctgagtgtcctctatcttcacggcaacagcatccagcgcctgggggaggtgaataagctggctgtccttcctcggctccgtagcctgacactccatgggaaccccatggaggaagagaaagggtatagcaggccctggactccccgacctgtcctgtgctctggtcctccagcccagcctccgagactgcctgtcagggctgcggatcgaggagcgggccttcagctacgtgctcacccatgccctgcccggtgaccctggtcacatcctcaccaccctggaccactggagcagccgctgcgagtacttgagccacatggggcctgtcaaaggtcagatcctgatgcggctggtggaggagaaggcccctgcttgtgtgctggaattgggaacctactgtggatactctaccctgcttattgcccgagccctgccccctgggggtcgccttcttactgtggagcgggacccacgcacggcagcagtggctgaaaaactcatccgcctggccggctttgatgagcacatggtggagctcatcgtgggcagctcagaggacgtgatcccgtgcctacgcacccagtatcagctgagtcgggcagacctggtgctcctggcacaccggccacgatgttacctgagggacctgcagctgctggaggcccatgccctactgccagcaggtgccaccgtgctggctgaccatgtgctcttccctggtgcaccccgcttcttgcagtatgctaagagctgtggccgctaccgctgccgcctccaccacactggccttccagacttccctgccatcaaggatggaatagctcagctcacctatgctggaccaggctgaggtccaggcccaggggtacttactgatgcccacccccacccccacccaagcagggacctcaaaatcccctccctttcctgtttggggccttgacacacgctgggctcagggctagggagtctctcttcccacctctgacctctttcagcctctacactgacctcaagtgtcaagttctatcaggctgcttggtctcactaggccccctctttccagagagaaccatggactgacagcaagaagcctgagctcccgacccagctctgtcactgatttgctgagtgactccaagggaatccccaccttgctctgagatttaatcttctctcttaacacgaaggaagctggatgggagagctccaggggcctcccagttctcggcctcagaaagcctcccatcctcagcccatgccattctgggtgggatcagaggaagtggcaatgagttagacgccctgcaggaatagctggatgcaagctgggccagagaaaatggcacagaaccctggacccagggccagggatgccctggccttccctaactctggcccacctagccaattaggtgtggctgatgtcccttgagtgccctcttcctaaagcccaaaagaagatgctggactcctctgggccccaccaacaaatagggaatagacatgggtggaaaatcactcctttgtctttattaaagaaacttagaccagacctggcaatcaaggggtgaggtactggccaggaaggtggagtaggtttcaggccctggggatttcaagtgcagactgatggcctgggaggggccaaagagaccagatcctggcagcagctgaggaggtgcccaagggcactttcaggcactggggccatcagctggttctgtgggcaggggttgggggttgggatgcagggtagtttgggctggcctggaatctccctgaggccaccctgccttgtctacctagatcatccactggtcctgatcctgttcgttgccttccatgtccacctggagaggaggctgggtgtgggtggggaggggcctcagccagcctcagccccagatcctgcccctggctggatccagggtttctgtaccccttggccatcaactgggtcaggagcaagggtccaggaacagaggccctcccccataccccttgcctacctcattgacctctccatcatccggtgactcattgtagtcattcatctcgtccatgtcctgcatatcctcatcatcctctgagtcctcttcactatcctcatcatcttcatcatcctcttcttcctcgtcatcatagtgctggtgggcaggacagagcctgtaagccctacaggcctgcatggaccagttcaagaactgacccacttgagcctctctctagggccaatgaatgaccccctaccccgacactccctccttgagtctagcaggctggtgcatgttctgcaggaccttaatgctaggcccaatgcccaccccttctatctccccttttaggcttttacccagatctgagaaccacaactgctctgggtcagagacaggacattcagaattagagcagagcctcggtccactgcggcccccacacaggccccacctgctagagccactcacctctgaggctggcttgccaataggaaccaggttgttgtctttctccgcgatgctttggagctgtgggcaaaggcacagaggaacaaggccagagcccaagtagggcaggtcaggggcatgggactggcccattctgcccagaagacaacccacacgtgttggggagaagcttcctcccagttctcagggagatacaatccctttcttgtcatctgccatttatgaacttgatccaaata

SEQ ID NO: 57688 - DNA, 756 bp, Artificial Sequence
  derived and/or modified sequence
atgggcaccccctggcggaagcggaagggcatcgccggccccggcctgcctgacttatcttgcgctctggtgctgcagccgtcccttagggattgcctttccggcctgcgaatcgaagaaagggcttttagctatgtgctgacccatgccctaccaggagatcccggccatattttgacaacactcgaccattggtcctcacggtgtgaatacctcagccacatgggccctgtcaaaggacagatcctcatgagattggtcgaagaaaaagcccctgcctgtgttctggagttaggcacctactgcggctatagcacactgttgattgccagggctcttccccccggagggcgcctgctcactgttgagcgggatccaaggactgccgccgtggccgaaaaattaatacgtctggcaggattcgatgaacacatggtcgagctaatagtggggtccagcgaagacgttataccatgccttagaacgcagtaccagctgtctcgcgccgacctggtcttactggctcaccgaccaagatgctacttgcgggatctacagctattggaggcccacgctctactgcccgcgggggccacggtgctcgctgatcacgttctgttccctggcgcacctaggtttctacagtacgctaagtcctgcgggcgctacagatgcagactgcaccataccggcctgcctgattttcctgctataaaggatggtatcgcccaactgacttacgccggtcccggttag

SEQ ID NO: 57689 - DNA, 756 bp, Artificial Sequence
  derived and/or modified sequence
atgggcaccccctggagaaagcggaaggggattgccggaccaggcctaccagacctgagctgtgcacttgtactccaaccatccctgcgggactgccttagcggtcttcggattgaagagcgtgccttctcttatgtgctgacacacgccctgccaggcgaccctggtcatattcttaccacccttgaccattggagctcgcgatgtgagtatctgtcccacatgggcccagtcaagggccaaatacttatgcggttggtggaggagaaagctccagcatgtgtgcttgaactcggaacgtactgcggctactcgaccctgcttatcgccagggccctgcccccaggaggccgtcttctgacagtggaaagagatcccagaacagcggcagtcgctgagaaactgattagactcgctgggtttgacgagcatatggtggagttgattgtggggtccagcgaagacgtaattccgtgtcttcgcacgcagtaccaactgtctcgcgctgatctagtcttgctggcccatagacccagatgctatctgcgtgacctccagctgctggaggcacacgccttgctgccagccggagctactgtgctagcagatcatgttttattcccaggtgctcctcggtttcttcagtatgcaaagtcctgcggtcgctaccggtgcaggctgcaccatacaggactgcccgacttcccggctataaaggatgggattgcccagctgacctatgctggtcccggatag

SEQ ID NO: 57690 - DNA, 756 bp, Artificial Sequence
  derived and/or modified sequence
atgggcaccccctggagaaagagaaagggcatcgccggccccggcctgcccgacctgagctgcgccctggtgctgcagcccagcctgagagactgcctgagcggcctgagaatcgaggagagagccttcagctacgtgctgacccacgccctgcccggcgaccccggccacatcctgaccaccctggaccactggagcagcagatgcgagtacctgagccacatgggccccgtgaagggccagatcctgatgagactggtggaggagaaggcccccgcctgcgtgctggagctgggcacctactgcggctacagcaccctgctgatcgccagagccctgccccccggcggcagactgctgaccgtggagagagaccccagaaccgccgccgtggccgagaagctgatcagactggccggcttcgacgagcacatggtggagctgatcgtgggcagcagcgaggacgtgatcccctgcctgagaacccagtaccagctgagcagagccgacctggtgctgctggcccacagacccagatgctacctgagagacctgcagctgctggaggcccacgccctgctgcccgccggcgccaccgtgctggccgaccacgtgctgttccccggcgcccccagattcctgcagtacgccaagagctgcggcagatacagatgcagactgcaccacaccggcctgcccgacttccccgccatcaaggacggcatcgcccagctgacctacgccggccccggctag

SEQ ID NO: 57691 - protein, 530 aa, Artificial Sequence
  derived and/or modified sequence
MDSQKYCFKENENVTVDKACFLISNITIGPESINLQQEALQRIISTLANKNDEIQNFIDTLHHTLKGVQENSSNILSELDEEFDSLYSILDEVKESMINCIKQEQARKSQELQSQISQCNNALENSEELLEFATRSLDIKEPEEFSKAARQIKDRVTMASAFRLSLKPKVSDNMTHLMVDFSQERQMLQTLKFLPVPKAPEIDPVECLVADNSVTVAWRMPEEDNKIDHFILEHRKTNFDGLPRVKDERCWEIIDNIKGTEYTLSGLKFDSKYMNFRVRACNKAVAGEYSDPVTLETKALNFNLDNSSSHLNLKVEDTCVEWDPTGGKGQESKIKGKENKGRSGTPSPKRTSVGSRPPAVRGSRDRFTGESYTVLGDTAIESGQHYWEVKAQKDCKSYSVGVAYKTLGKFDQLGKTNTSWCIHVNNWLQNTFAAKHNNKVKALDVTVPEKIGVFCDFDGGQLSFYDANSKQLLYSFKTKFTQPVLPGFMVWCGGLSLSTGMQVPSAVRTLQKSENGMTGSASSLNNVVTQ

SEQ ID NO: 57692 - DNA, 1804 bp, Artificial Sequence
  derived and/or modified sequence
ggtgccggtgcgggctggggcagtgcagtgagtagcggtcttggggtgtgcgatctcgctgagcctcctcacacggttcgtcgtctcgggttcgagcccagtgggcttagccactcgccatggactcccagaaatactgctttaaggagaatgaaaacgttacagttgataaagcctgttttctgatctctaacatcactattggaccagagtctattaacttgcagcaggaagctctacagaggatcatttcaactctggcaaataaaaatgatgaaattcagaactttattgatacactacatcatacactaaaaggagttcaggaaaattcgtccaacatactctcagagttagatgaagaatttgatagtttatactctatactggatgaagtaaaagaaagtatgattaactgtatcaagcaggaacaagctcgtaaatcccaagagttacagagtcagattagtcaatgtaataatgccctggagaactctgaagaactattagaatttgcaacaaggtcattagatataaaggaacctgaagaattttcaaaggctgccagacagatcaaggatagagtcacaatggcttcagcctttcgcctttctttgaaaccaaaggtcagtgacaacatgactcatttaatggtggatttctcacaggaaagacagatgctgcaaactttgaagtttttgccagtccccaaagctccagagatagatccagtagagtgtttggtggcagataactctgtaacagtggcttggagaatgccagaagaagataataagattgaccattttatactggaacataggaagactaattttgatggacttccacgtgtaaaggatgagcgatgctgggagataattgataatattaagggtactgaatatacactatcaggcttaaaatttgattcaaagtatatgaatttcagagtgcgagcttgtaacaaggctgtggctggagagtattctgatccagtgactctagagaccaaagcacttaacttcaatttggataactcctcatcccatttgaacctgaaagttgaagatacatgtgtagagtgggatcctactggaggaaaaggtcaagaaagtaaaattaaaggaaaagagaacaagggcagaagtggtacaccatccccaaaacgaacatctgtaggctccaggccaccagcagtaagaggcagtagagatcgttttactggagaatcatacacagtgctgggagacactgctattgaaagtggacaacattattgggaggtcaaggcccagaaggattgtaaatcctacagtgtgggagtagcatacaaaacgttggggaaatttgaccaattgggaaagacaaacactagttggtgtatccatgtcaacaactggctacaaaacacatttgcagcaaagcataataataaagtcaaagctttggatgttactgttcctgaaaaaataggtgtattttgtgattttgatgggggtcaactttcattctatgatgcaaattctaaacagttgctatattcctttaagacaaaatttactcagccagtactacctggtttcatggtatggtgtggtggactttctttgagtactgggatgcaggttccaagtgctgtgagaacacttcagaaaagtgaaaatggaatgactggttcagctagcagcctgaacaatgttgttactcaatagtgtctactcagaatacgtttaccctccgtcttgattaggtggccttttctgtgcagttactaatcacaggaatttggtagtagtgaaaatca

SEQ ID NO: 57693 - DNA, 1593 bp, Artificial Sequence
  derived and/or modified sequence
atggactcccagaaatactgcttcaaagaaaacgaaaacgtgactgtggataaagcttgcttcctgatctccaacataacgatcggacccgaatctatcaacctccaacaagaagcgctgcaaagaataatcagcacattagccaataagaatgatgaaatccagaactttatcgatacactgcaccacaccttgaagggagtccaagaaaattccagcaacattctgagcgaactcgacgaggagttcgattccctctactccatccttgacgaggtcaaggaaagcatgatcaattgcatcaagcaggagcaggcccgaaaatctcaggagcttcagtcccagattagccaatgtaataatgctctggagaatagcgaggaactactcgagttcgccaccagaagtctcgacataaaggaaccggaagagttctccaaggccgccaggcagattaaagacagagtcacgatggcctctgcctttcggctatcactgaaacctaaggtgagcgacaatatgacacatctgatggtggacttttcacaggagcggcagatgctgcagacgttaaagttcctccccgtaccaaaggcgcctgaaattgaccccgttgagtgcctggtggcagacaactctgtgaccgtcgcttggaggatgccggaagaagataacaaaattgaccattttatcctggaacatcggaaaaccaattttgacgggctgccccgagtcaaagacgaaaggtgctgggagatcattgataatatcaagggcacagagtacacacttagcggcttgaagttcgactctaagtatatgaacttcagagtacgtgcctgtaacaaggctgtggccggagagtacagtgacccagtcacgctggagacaaaagccctgaatttcaacttggataatagtagctcccacctgaacctgaaggtggaggacacttgcgttgagtgggacccgaccggaggcaagggccaagagtctaaaattaaaggcaaggagaacaaagggcgctccggaaccccatctcctaaacgcacatccgtgggttcccgacctcccgctgtacgcgggtcccgtgatcggttcacaggcgaatcgtatactgtactcggagacaccgcaatcgaaagcggccaacattactgggaggtgaaggcgcagaaagattgcaagagttattccgtaggggtggcttacaaaacactgggaaaattcgatcagcttggaaaaactaacaccagttggtgtattcacgtgaataactggctgcagaacacattcgctgccaagcataacaataaggtgaaggcattagatgtgaccgtgcccgagaaaattggggtgttctgtgacttcgatgggggtcagctgtctttttatgacgccaatagtaagcagctgctgtattcattcaagacaaaatttactcagcccgtgctgcccggctttatggtttggtgcggggggctaagtctgtccactggaatgcaggtgcctagtgcagttcggaccctacaaaagtcggagaatggaatgacaggctcagccagctctctgaacaatgtggttacacaatag

SEQ ID NO: 57694 - DNA, 1593 bp, Artificial Sequence
  derived and/or modified sequence
atggacagccagaagtactgcttcaaggaaaatgaaaatgtgacagtggacaaggcctgcttcctgatcagcaacatcaccatcggccctgagagcatcaacctgcagcaggaggccctgcagaggatcatcagcaccctggccaacaagaatgatgagatccagaacttcatcgacaccctgcaccacaccctgaagggcgtgcaggagaacagcagcaacatcctgtctgagctggatgaggagtttgacagcctgtacagcatcctggatgaggtgaaggagagcatgatcaactgcatcaagcaggagcaggccaggaagagccaggagctgcagagccagatcagccagtgcaacaatgccctggagaacagcgaggagctgctggagtttgccaccaggagcctggacatcaaggagcctgaggagttcagcaaggccgcccggcagatcaaggacagagtgaccatggccagcgccttccggctgagcctgaagcccaaggtgtctgacaacatgacccacctgatggtggacttcagccaggagcggcagatgctgcagaccctgaagttcctgcctgtgcccaaggcccctgagattgatcctgtggagtgcctggtggccgacaacagcgtgacagtggcctggaggatgcctgaggaggacaacaagattgaccacttcatcctggagcacaggaagaccaactttgatggcctgccccgggtgaaggatgagcgctgctgggagatcatcgacaacatcaagggcacagagtacaccctgagcggcctgaagtttgacagcaagtacatgaacttccgggtgcgggcctgcaacaaggctgtggccggggagtacagcgaccctgtgaccctggagaccaaggccctgaacttcaacctggacaacagcagcagccacctgaacctgaaggtggaggacacctgtgtggagtgggaccccactggaggcaagggccaggagagcaagatcaagggcaaggagaacaagggccgcagcggcacccccagccccaagaggacctctgtgggcagcaggcctcctgctgtgcggggcagccgggaccgcttcaccggggagagctacacagtgctgggggacacagccatcgagagcggccagcactactgggaggtgaaggcccagaaggactgcaagagctacagcgtgggcgtggcctacaagaccctgggcaagtttgaccagctgggcaagaccaacacctcctggtgcatccacgtgaacaactggctgcagaacacctttgctgccaagcacaacaacaaggtgaaggccctggatgtgacagtgcctgagaagattggagtcttctgtgactttgatggcggccagctgtccttctatgatgccaacagcaagcagctgctgtacagcttcaagaccaagttcacccagcctgtgctgcccggcttcatggtgtggtgtggcggcctgagcctgagcacaggcatgcaggtgcccagcgctgtgaggaccctgcagaagtcagaaaatggcatgacaggcagcgccagcagcctgaacaacgtggtgacccagtag

SEQ ID NO: 57695 - DNA, 1593 bp, Artificial Sequence
  derived and/or modified sequence
atggacagccagaagtactgcttcaaggagaacgagaacgtgaccgtggataaggcctgcttcctgataagtaatatcaccatcggccccgaatccatcaatttgcagcaggaggctctgcagcgaataatttccacgttagcaaataaaaacgacgaaattcagaatttcatagacaccttgcaccacacgctgaagggtgtgcaggagaatagctcaaacatcctgagcgagctcgacgaagaattcgacagcctgtactctatcttagacgaagtgaaagaatccatgataaattgcatcaagcaggaacaggcccggaaaagccaagagctccagtcacagatctcccagtgtaataatgccctcgaaaacagcgaggagttacttgaatttgccaccaggtccctcgacatcaaagaaccggaggaattctccaaagccgcccggcagattaaggaccgggtcaccatggcctctgcctttagattgtccctgaagcccaaggtgagcgataatatgacccacttgatggttgacttctcccaggagcgtcagatgcttcagacattgaagtttttgcccgtgcctaaggccccggagatcgaccctgtcgagtgtttagtggccgataatagcgtgacagtggcttggagaatgccagaagaggataacaagattgaccatttcattttagagcaccgaaagaccaacttcgatggcctccccagagtcaaagacgagagatgttgggaaattattgacaacattaaggggaccgagtacaccctctctgggctgaagtttgacagcaagtacatgaatttcagggtgagggcctgcaacaaggccgtagccggcgagtattctgaccctgtgaccctcgagaccaaggctttaaattttaatttggacaattcctcctctcaccttaatttaaaagtggaggatacctgcgtcgaatgggatcccacgggtggaaaaggccaagaatctaagattaaagggaaggagaataaaggacggtctggcacaccaagtcccaaaaggacgtctgtcgggtctaggcccccagcggtgagaggttcaagggatcgattcaccggggaaagttataccgtcctcggcgatactgctatcgaaagcggacagcattattgggaggttaaggctcagaaggactgtaagtcctacagcgtaggggtggcatataaaaccctgggtaaattcgaccaattgggcaagacaaatactagctggtgcatccacgtcaacaactggcttcagaatacgtttgccgccaaacataataataaggtgaaggcactagatgtgaccgtccctgagaagatcggcgtgttctgtgactttgacggggggcagcttagcttttacgacgcaaacagcaaacagctcctgtactccttcaaaaccaaattcacccagcctgtgctgcctggcttcatggtctggtgtggcgggctctccctttctacaggcatgcaagttcccagcgccgtcagaacactgcaaaagagcgagaacggaatgaccgggtccgccagctcattaaataacgtcgtgacgcagtag

SEQ ID NO: 57696 - DNA, 1593 bp, Artificial Sequence
  derived and/or modified sequence
atggacagtcagaagtactgtttcaaggaaaatgaaaatgtgaccgtggacaaagcctgcttcctgatcagcaatatcaccataggtcctgaaagcattaacctgcaacaggaggccctgcagaggataatcagtaccctggctaacaaaaatgatgagatccagaatttcatcgacaccctacaccacacgctcaagggggtgcaggagaatagtagcaacatactgtctgaactggatgaggagttcgattccctgtattctatcctagatgaagtaaaagaatccatgataaactgtattaagcaggaacaggctcggaaatcgcaggagctgcaatctcagatcagccagtgtaacaacgcccttgaaaacagcgaagagctgttagagttcgccacaagaagcctggacatcaaagagcccgaagagttcagtaaggctgctcgtcagataaaggaccgagtgacgatggccagtgcctttcggctgtctctaaagccaaaagtgtccgacaacatgacccacctaatggtcgatttcagtcaagaacgacagatgctgcagactctcaagttcttgcctgtgccaaaggcccctgagatcgatcccgtcgaatgcctggtggccgacaactctgtgacagtggcctggagaatgccagaagaggataataaaattgatcactttattctggagcatcgcaagactaatttcgacggattgccaagggtgaaagacgaacgctgctgggagattattgataacataaaaggaactgagtacacattatcaggcctgaagttcgactccaaatatatgaactttagagtgcgtgcatgcaataaagcagtagccggtgaatattccgatcccgtgaccctggaaactaaagctttgaattttaatctagacaactccagttctcacttaaacctcaaggtggaggatacctgtgttgagtgggaccctacaggaggcaaggggcaggagtcgaagatcaagggaaaggagaacaaaggcaggtctggaacaccttcaccaaaacgtacatctgtgggcagtcgcccacccgctgtgaggggctccagggatcgttttactggagagtcttataccgtactgggggatactgcaatcgagtcaggtcagcactactgggaggtgaaggcacagaaagattgcaaaagctatagcgtaggcgtagcctataagacactcgggaagtttgaccagctgggtaagacaaatacatcctggtgcatccacgtgaataattggctacagaatacctttgcagctaagcataacaacaaagttaaggcccttgacgtcacagtgcccgaaaaaattggagtgttttgtgatttcgatggcggtcaattgagcttttatgatgccaactcgaagcaattgctgtactcatttaagaccaagtttacccagcccgttctgcccggtttcatggtgtggtgcggtggcctttcactctccaccggcatgcaggtaccttcggccgttcgaacactgcagaagagcgaaaacgggatgaccggatcagccagttcattaaacaacgtcgtgacccagtag

SEQ ID NO: 57697 - DNA, 1593 bp, Artificial Sequence
  derived and/or modified sequence
atggacagccagaagtactgcttcaaggagaacgagaacgtgaccgtggacaaggcctgcttcctgatcagcaacatcaccatcggccccgagagcatcaacctgcagcaggaggccctgcagagaatcatcagcaccctggccaacaagaacgacgagatccagaacttcatcgacaccctgcaccacaccctgaagggcgtgcaggagaacagcagcaacatcctgagcgagctggacgaggagttcgacagcctgtacagcatcctggacgaggtgaaggagagcatgatcaactgcatcaagcaggagcaggccagaaagagccaggagctgcagagccagatcagccagtgcaacaacgccctggagaacagcgaggagctgctggagttcgccaccagaagcctggacatcaaggagcccgaggagttcagcaaggccgccagacagatcaaggacagagtgaccatggccagcgccttcagactgagcctgaagcccaaggtgagcgacaacatgacccacctgatggtggacttcagccaggagagacagatgctgcagaccctgaagttcctgcccgtgcccaaggcccccgagatcgaccccgtggagtgcctggtggccgacaacagcgtgaccgtggcctggagaatgcccgaggaggacaacaagatcgaccacttcatcctggagcacagaaagaccaacttcgacggcctgcccagagtgaaggacgagagatgctgggagatcatcgacaacatcaagggcaccgagtacaccctgagcggcctgaagttcgacagcaagtacatgaacttcagagtgagagcctgcaacaaggccgtggccggcgagtacagcgaccccgtgaccctggagaccaaggccctgaacttcaacctggacaacagcagcagccacctgaacctgaaggtggaggacacctgcgtggagtgggaccccaccggcggcaagggccaggagagcaagatcaagggcaaggagaacaagggcagaagcggcacccccagccccaagagaaccagcgtgggcagcagaccccccgccgtgagaggcagcagagacagattcaccggcgagagctacaccgtgctgggcgacaccgccatcgagagcggccagcactactgggaggtgaaggcccagaaggactgcaagagctacagcgtgggcgtggcctacaagaccctgggcaagttcgaccagctgggcaagaccaacaccagctggtgcatccacgtgaacaactggctgcagaacaccttcgccgccaagcacaacaacaaggtgaaggccctggacgtgaccgtgcccgagaagatcggcgtgttctgcgacttcgacggcggccagctgagcttctacgacgccaacagcaagcagctgctgtacagcttcaagaccaagttcacccagcccgtgctgcccggcttcatggtgtggtgcggcggcctgagcctgagcaccggcatgcaggtgcccagcgccgtgagaaccctgcagaagagcgagaacggcatgaccggcagcgccagcagcctgaacaacgtggtgacccagtag

SEQ ID NO: 57698 - protein, 629 aa, Artificial Sequence
  derived and/or modified sequence
MENSTTTISREELEELQEAFNKIDIDNSGYVSDYELQDLFKEASLPLPGYKVREIVEKILSVADSNKDGKISFEEFVSLMQELKSKDISKTFRKIINKREGITAIGGTSTISSEGTQHSYSEEEKVAFVNWINKALENDPDCKHLIPMNPNDDSLFKSLADGILLCKMINLSEPDTIDERAINKKKLTPFTISENLNLALNSASAIGCTVVNIGASDLKEGKPHLVLGLLWQIIKVGLFADIEISRNEALIALLNEGEELEELMKLSPEELLLRWVNYHLTNAGWHTISNFSQDIKDSRAYFHLLNQIAPKGGEDGPAIAIDLSGINETNDLKRAGLMLQEADKLGCKQFVTPADVVSGNPKLNLAFVANLFNTYPCLHKPNNNDIDMNLLEGESKEERTFRNWMNSLGVNPYINHLYSDLADALVIFQLYEMIRVPVNWSHVNKPPYPALGGNMKKIENCNYAVELGKNKAKFSLVGIAGQDLNEGNSTLTLALVWQLMRRYTLNVLSDLGEGEKVNDEIIIKWVNQTLKSANKKTSISSFKDKSISTSLPVLDLIDAIAPNAVRQEMIRRENLSDEDKLNNAKYAISVARKIGARIYALPDDLVEVKPKMVMTVFACLMGKGLNRIK

SEQ ID NO: 57699 - protein, 54 aa, Artificial Sequence
  derived and/or modified sequence
MENSTTTISREELEELQEAFNKIDIDNSGYVSDYELQDLFKEASLPLPGYKVRE

SEQ ID NO: 57700 - protein, 120 aa, Artificial Sequence
  derived and/or modified sequence
MENSTTTISREELEELQEAFNKIDIDNSGYVSDYELQDLFKEASLPLPGYKVREIVEKILSVADSNKDGKISFEEFVSLMQELKSKDISKTFRKIINKREGITAIGGTSTISSEGTQHSY

SEQ ID NO: 57701 - protein, 119 aa, Artificial Sequence
  derived and/or modified sequence
MENSTTTISREELEELQEAFNKIDIDNSGYVSDYELQDLFKEASLPLPGYKVREIVEKILSVADSNKDGKISFEEFVSLMQELKSKDISKTFRKIINKREGITAIGGTSTISSEGTQHS

SEQ ID NO: 57702 - protein, 33 aa, Artificial Sequence
  derived and/or modified sequence
MENSTTTISREELEELQEAFNKIDIDNSGYVSD

SEQ ID NO: 57703 - protein, 58 aa, Artificial Sequence
  derived and/or modified sequence
MENSTTTISREELEELQEAFNKIDIDNSGYVSDYELQDLFKEASLPLPGYKVREIVEK

SEQ ID NO: 57704 - protein, 53 aa, Artificial Sequence
  derived and/or modified sequence
MENSTTTISREELEELQEAFNKIDIDNSGYVSDYELQDLFKEASLPLPGYKVR

SEQ ID NO: 57705 - DNA, 1890 bp, Artificial Sequence
  derived and/or modified sequence
atggaaaatagcacgaccactatatcacgagaggaactggaagaactgcaagaggccttcaacaaaatcgacatcgacaactcagggtacgtaagcgattatgaattacaagatctgttcaaagaagcctccctcccgctgcctggctacaaagtccgggaaattgttgagaaaattctgtccgtggctgatagcaacaaggatggaaagatttcctttgaggagtttgtgagtctgatgcaagaattgaaaagcaaggacataagcaaaacttttaggaaaataataaacaagcgggaaggcattactgctatcggagggacttctacaatcagctcagaaggaacgcaacattcgtacagcgaggaggaaaaggtggcctttgtgaattggatcaataaagctctcgagaacgaccccgactgtaaacatctcataccaatgaatccaaatgatgatagccttttcaaatccctggccgacggtatcttgctgtgcaagatgatcaacctcagcgagcccgacacaatcgatgagagggcgatcaataaaaagaagcttactcccttcactatatcagagaacctcaatttggctctgaattccgctagcgccattggctgcaccgtagtcaacataggcgcctcagatctgaaggagggtaaacctcaccttgtcctggggctgttatggcaaattatcaaggtgggcttattcgctgacatcgagattagcagaaacgaggctctcatagcattgctgaacgaaggcgaagaactggaagagctcatgaagctgagtcctgaagaactattgctccgctgggtgaattatcacctgactaacgccggctggcacaccatctcgaatttttctcaagatataaaagactccagggcctactttcatctcctcaatcaaatcgcaccgaagggtggagaggacggaccagccattgccatcgatctaagcggaattaacgaaacaaatgatcttaaaagagctggattgatgctgcaagaggccgataaactggggtgcaaacagtttgtcacaccagctgacgtcgtgagcgggaatcccaagctgaacctggcttttgtcgccaacctgtttaatacctatccatgtcttcataagcctaataataacgacattgacatgaaccttttggaaggagaaagcaaggaagaacgcacttttaggaactggatgaattcactcggtgtgaacccctacatcaaccacctgtactccgatctggccgacgcactggtaatcttccagctgtatgagatgatcagggtccctgtgaactggtctcatgtgaacaaacctccatacccagcactaggggggaatatgaagaaaattgaaaattgcaattacgctgtagaactgggtaaaaataaggccaagttttcactggtagggattgcaggacaggacctgaacgagggtaattcgacactgacattagccttggtctggcaattgatgcgaagatatacgctgaacgttttgagcgacttaggggagggagaaaaggttaatgatgagattattatcaagtgggtgaaccagacactgaagtccgcaaacaagaagacctcaatctcaagttttaaagacaaaagtattagcactagcctaccagtcctggacttgatcgacgcaatcgcccctaacgccgtgcgacaggaaatgataaggcgagagaacttgtctgacgaggataaactcaacaatgcgaagtacgcaatttccgtcgcccggaagattggagcaaggatctatgcactgcctgatgaccttgtggaggtaaagcctaaaatggtcatgacagttttcgcctgcctgatgggaaagggcctgaatagaattaagtag

SEQ ID NO: 57706 - DNA, 1890 bp, Artificial Sequence
  derived and/or modified sequence
atggaaaactccaccaccacaatctcgcgcgaggagctcgaggagctgcaggaggcattcaataagatagacatcgacaacagtggctatgtatccgattacgagttgcaagacctgttcaaggaggcttccctgccgctgccaggatataaagtgcgcgagatcgtggagaagatcctgagcgtggccgatagtaacaaggacggcaagattagttttgaggagttcgttagcctgatgcaagagctgaagtcaaaagacatctccaagacctttagaaagattatcaataagcgcgaaggtataactgcaatcggcggaaccagcacgatttcctcagaggggactcaacattcttattctgaagaagagaaggtggctttcgtgaattggatcaacaaagcccttgagaatgaccccgattgtaagcacctgatcccgatgaatcccaacgatgacagcctcttcaagagcctcgctgacggcatcttgctgtgcaagatgatcaatctctccgagcctgacacaattgatgagagagccataaataaaaagaaactgactcctttcacaataagcgagaatctgaacctggcgctcaattctgcgtctgcaattggctgtactgtggttaacatcggcgcctctgacctgaaggaaggtaagcctcacctggtgcttggcctgctttggcagattatcaaagtcgggttgttcgccgatattgagatatctcgtaatgaagccctaatcgcactgttgaatgaaggggaagagcttgaggagcttatgaaattgagtcccgaggaactgctccttcgctgggtcaattaccacctcacaaacgctggctggcacaccatctccaacttttcccaggacattaaagacagtcgcgcctacttccatcttctgaaccagattgcaccgaagggcggcgaagatggacccgctatcgcgatagatttaagcggcatcaatgagaccaacgacctgaaacgtgctgggctgatgttgcaggaggctgataaattaggttgcaagcagtttgtgactcccgcagatgtggtaagcggcaatccaaaactgaacctggccttcgtggcgaacctatttaacacttacccttgcttgcataaaccgaacaacaacgacatcgatatgaatttattagagggcgagagcaaagaggagagaacatttcggaattggatgaatagcttgggggttaacccttacatcaaccacctctacagcgatctggcagatgccctcgtaatctttcagctatatgagatgattagggttccagtaaattggtcacacgtgaacaagcccccatatcctgcgctgggcgggaatatgaaaaagattgaaaactgcaattatgctgtggagctgggcaaaaataaggcgaagttttccttagtcggcattgccgggcaagatcttaacgaagggaatagcactcttacactggccctggtctggcagttaatgaggcggtacacccttaatgtgctgtccgacctcggagagggcgaaaaagttaatgatgaaatcataataaagtgggtcaaccagaccctgaagagtgctaacaagaagacctcaatatcctcctttaaagataagagcatctccacttccctgcctgtgcttgaccttattgatgctattgcccctaacgctgttcgacaagagatgatccgtcgtgagaacttatcagatgaggataagctaaataatgccaagtatgcgatcagtgttgccaggaaaatcggtgcgaggatatacgccctccctgatgatctggtcgaagtgaagcccaagatggtgatgactgtcttcgcctgcctgatgggaaagggactgaatcggatcaagtag

SEQ ID NO: 57707 - DNA, 165 bp, Artificial Sequence
  derived and/or modified sequence
atggaaaactccactactacgatctcccgcgaggaactagaggagctgcaggaggcatttaataagattgacattgataacagcggctatgtatccgattacgagctgcaggacctgtttaaagaagcctcactgcctttgcctgggtataaagtgcgcgagtag

SEQ ID NO: 57708 - DNA, 363 bp, Artificial Sequence
  derived and/or modified sequence
atggagaatagtacgaccactatttctagagaggaacttgaggagctccaggaagccttcaacaagatcgacattgacaatagcggttatgtgtccgactacgaattacaggatctgtttaaagaggcctctttgccacttcctgggtataaagttcgtgaaattgtcgagaagatcctgtcagtcgccgattccaacaaggatgggaagatcagtttcgaggagtttgtctcactcatgcaggaactgaagagcaaagacatcagcaagacctttcggaaaatcattaacaaacgcgaaggaataactgccattggtgggaccagcaccatctcgtctgagggaacccagcacagctactag

SEQ ID NO: 57709 - DNA, 360 bp, Artificial Sequence
  derived and/or modified sequence
atggagaattcaacaacaactatctcaagggaggagctagaggagcttcaggaggctttcaataagattgatatagacaattcaggctatgtatcggattacgaactgcaggatctgtttaaagaggcatctttgcccttaccagggtataaagtacgggagatagtagaaaagattcttagtgtggctgattcgaacaaagacggtaagatcagcttcgaagagttcgtgagtctgatgcaggagcttaagagcaaagatatctctaaaacatttcgtaaaattatcaataaacgggaggggattacagcaataggcgggacttccaccatctcaagcgaaggaacccagcattcttag

SEQ ID NO: 57710 - DNA, 102 bp, Artificial Sequence
  derived and/or modified sequence
atggaaaattcaactactactattagccgtgaggagctggaagaactccaggaagcctttaacaaaattgacattgacaatagcggatatgtgagcgactag

SEQ ID NO: 57711 - DNA, 177 bp, Artificial Sequence
  derived and/or modified sequence
atggagaacagcaccactacaatcagccgtgaggaattggaggaactacaagaagcctttaataaaatcgacatcgataacagtggctacgtctccgattacgagttgcaggacctgttcaaggaggcgagccttccactacccgggtacaaggttagagaaattgtggagaaatag

SEQ ID NO: 57712 - DNA, 1890 bp, Artificial Sequence
  derived and/or modified sequence
atggagaactctactactacaatttcacgagaagagttggaagagttacaggaagctttcaacaaaatcgacatcgacaatagcggatatgtcagtgactatgaactccaagatctgtttaaggaagcctcccttccactgccaggctacaaagtgcgggagattgtggaaaagatcttgagcgtagccgactccaacaaagatggaaagatcagttttgaggagtttgtgtctctgatgcaagagttgaagagtaaagacatctcaaagacttttaggaagattataaataagcgggaggggatcaccgcgattggcggaacctctaccatttcgtccgagggcactcaacatagctactccgaggaagaaaaagtcgcattcgtgaactggattaataaggccctggagaacgacccagactgtaaacatttgattcccatgaatcctaacgatgatagtctttttaagtcactggcagacggaatcctgttgtgcaaaatgatcaatctctctgaacccgacacaattgacgaacgggctattaataagaagaaactgaccccttttactatatccgagaatctcaatctggccctgaacagcgcttccgccatcgggtgcactgtggtaaacataggggcatccgatttgaaggagggtaagccccatctagtgctgggtttactctggcagatcattaaggtgggcctgtttgctgacattgaaatctcaagaaacgaggccctgattgccctgttaaacgaaggagaggagctggaggagttaatgaaactcagtccagaggaactcttactccggtgggtgaattatcatctgaccaatgccggatggcacacaatctctaacttttcccaggacattaaggacagccgggcctacttccatctgttgaatcaaatcgccccaaaaggaggcgaggacgggccagccattgctatcgatctgtcaggtattaacgaaactaacgatttaaaacgagctggcctgatgttgcaggaagccgataaattaggatgtaaacaattcgtgacaccggctgacgttgtgtctggcaatcctaaactgaacctcgctttcgtggccaatctgttcaatacatacccatgcctccataaacctaataacaatgacatcgacatgaacttactggaaggcgagtctaaagaggagagaacctttagaaactggatgaattcattaggagtgaacccctatatcaatcatttgtatagcgatcttgcagatgccctggtgatattccagttatacgagatgattcgcgtgccagtgaattggagtcacgtgaataagcccccctatcccgcattggggggcaacatgaaaaagattgaaaactgtaactacgccgtggaacttgggaaaaataaggccaaattttcccttgtcggaattgcagggcaggacctcaacgaaggaaattctactctaacactagccttagtctggcaactgatgaggcgctataccctgaatgtgctcagtgacctgggagagggggaaaaggtgaatgatgaaattatcatcaaatgggtcaatcagactctgaaaagtgcaaacaaaaagaccagcatttctagttttaaagataaatctatctcaaccagtcttcccgtcttggacctgattgacgccattgcccctaacgccgttcgacaggaaatgattaggcgcgagaacctgtccgatgaggataagttaaacaatgctaaatatgcaatcagtgtcgcgcggaagattggcgcaagaatctacgcacttcccgatgacctggtcgaggtcaagcctaagatggtgatgaccgtatttgcctgtctgatgggcaagggcctcaaccggattaaatag

SEQ ID NO: 57713 - DNA, 162 bp, Artificial Sequence
  derived and/or modified sequence
atggagaacagtactacgaccatctcccgcgaagaactcgaagagttgcaggaggccttcaacaagatcgatattgacaactccggatacgttagcgattacgaactgcaggatctctttaaggaagccagtctgcctttgcccggttacaaagttcgttag

SEQ ID NO: 57714 - DNA, 1890 bp, Artificial Sequence
  derived and/or modified sequence
atggagaacagcaccaccaccatcagccgggaggagctggaggagctgcaggaggccttcaacaagattgatattgacaacagcggctacgtgtctgactatgagctgcaggacctcttcaaggaggccagcctgcccctgcccggctacaaggtgcgggagatcgtggagaagatcctgtctgtggccgacagcaacaaggatggcaagatcagctttgaggagtttgtgtccctgatgcaggagctgaagagcaaggacatcagcaagaccttcaggaagatcatcaacaagcgggagggcatcacagccatcggcggcaccagcaccatcagcagcgagggcacccagcacagctacagcgaggaggagaaggtggcctttgtgaactggatcaacaaggccctggagaatgaccctgactgcaagcacctgatccccatgaaccccaatgatgacagcctcttcaagagcctggctgatggcatcctgctgtgcaagatgatcaacctgtctgagccagacaccattgatgagcgggccatcaacaagaagaagctgacccccttcaccatcagcgagaacctgaacctggccctgaacagcgccagcgccatcggctgcaccgtggtgaacattggagccagtgacctgaaggagggcaagccccacctggtgctgggcctgctgtggcagatcatcaaggtgggcctgtttgctgacatcgagatcagcagaaatgaggccctgattgccctgctgaatgaaggagaggagctggaggagctgatgaagctgagccctgaggagctgctgctgcgctgggtgaactaccacctgaccaatgccggctggcacaccatcagcaacttcagccaggacatcaaggacagccgggcctacttccacctgctgaaccagatcgcccccaagggcggggaggatggccctgccatcgccatcgacctgagcggcatcaatgagaccaatgacctgaagagagctggcctgatgctgcaggaggccgacaagctgggctgcaagcagtttgtgaccccagcagatgtggtgtctggcaaccccaagctgaacctggcctttgtggccaacctcttcaacacctacccctgcctgcacaagcccaacaacaatgacatcgacatgaacctgctggagggggagagcaaggaggagaggaccttcaggaactggatgaacagcctgggcgtgaacccctacatcaaccacctgtacagcgacctggctgatgccctggtgatcttccagctgtatgagatgatccgggtgcctgtgaactggagccacgtgaacaagccaccctacccagccctgggcggcaacatgaagaagattgagaactgcaactatgctgtggagctgggcaagaacaaggccaagttcagcctggtgggcattgctggccaggacctgaatgaaggcaacagcaccctgaccctggccctggtgtggcagctgatgaggcgctacaccctgaatgtgctgagtgacctgggggagggggagaaggtgaatgatgagatcatcatcaagtgggtgaaccagaccctgaagagcgccaacaagaagaccagcatcagcagcttcaaggacaagagcatcagcaccagcctgcctgtgctggacctgattgatgccatcgccccaaatgctgtgcggcaggagatgatcagaagagagaacctgagtgatgaggacaagctgaacaatgccaagtatgccatctctgtggccaggaagatcggggcccgcatctatgccctgcctgatgacctggtggaggtgaagcccaagatggtgatgacagtgtttgcctgcctgatgggcaagggcctgaaccgcatcaagtag

SEQ ID NO: 57715 - DNA, 165 bp, Artificial Sequence
  derived and/or modified sequence
atggagaacagcaccaccaccatcagccgggaggagctggaggagctgcaggaggccttcaacaagattgatattgacaacagcggctacgtgtctgactatgagctgcaggacctcttcaaggaggccagcctgcccctgcccggctacaaggtgcgggagtag

SEQ ID NO: 57716 - DNA, 363 bp, Artificial Sequence
  derived and/or modified sequence
atggagaacagcaccaccaccatcagccgggaggagctggaggagctgcaggaggccttcaacaagattgatattgacaacagcggctacgtgtctgactatgagctgcaggacctcttcaaggaggccagcctgcccctgcccggctacaaggtgcgggagatcgtggagaagatcctgtctgtggccgacagcaacaaggatggcaagatcagctttgaggagtttgtgtccctgatgcaggagctgaagagcaaggacatcagcaagaccttcaggaagatcatcaacaagcgggagggcatcacagccatcggcggcaccagcaccatcagcagcgagggcacccagcacagctactag

SEQ ID NO: 57717 - DNA, 360 bp, Artificial Sequence
  derived and/or modified sequence
atggagaacagcaccaccaccatcagccgggaggagctggaggagctgcaggaggccttcaacaagattgatattgacaacagcggctacgtgtctgactatgagctgcaggacctcttcaaggaggccagcctgcccctgcccggctacaaggtgcgggagatcgtggagaagatcctgtctgtggccgacagcaacaaggatggcaagatcagctttgaggagtttgtgtccctgatgcaggagctgaagagcaaggacatcagcaagaccttcaggaagatcatcaacaagcgggagggcatcacagccatcggcggcaccagcaccatcagcagcgagggcacccagcacagctag

SEQ ID NO: 57718 - DNA, 102 bp, Artificial Sequence
  derived and/or modified sequence
atggagaacagcaccaccaccatcagccgggaggagctggaggagctgcaggaggccttcaacaagattgatattgacaacagcggctacgtgtctgactag

SEQ ID NO: 57719 - DNA, 177 bp, Artificial Sequence
  derived and/or modified sequence
atggagaacagcaccaccaccatcagccgggaggagctggaggagctgcaggaggccttcaacaagattgatattgacaacagcggctacgtgtctgactatgagctgcaggacctcttcaaggaggccagcctgcccctgcccggctacaaggtgcgggagatcgtggagaagtag

SEQ ID NO: 57720 - DNA, 162 bp, Artificial Sequence
  derived and/or modified sequence
atggagaacagcaccaccaccatcagccgggaggagctggaggagctgcaggaggccttcaacaagattgatattgacaacagcggctacgtgtctgactatgagctgcaggacctcttcaaggaggccagcctgcccctgcccggctacaaggtgaggtag

SEQ ID NO: 57721 - DNA, 1890 bp, Artificial Sequence
  derived and/or modified sequence
atggagaacagcaccaccaccatcagccgggaggagctggaggagcttcaggaagcttttaataaaatcgacatcgacaactccggttatgtcagcgactacgagctccaggacctgttcaaggaagcaagcttgccgctgccaggctacaaagtgcgagagattgtggagaagattctaagtgtggccgacagcaacaaagatggcaagattagctttgaagagtttgtttccctgatgcaggaactaaagagcaaggacatttccaagacattcaggaagataattaacaaaagagaagggatcacagccattgggggaacatcgacaatcagcagcgaaggaacacagcactcatactccgaggaggagaaggtggccttcgtcaactggatcaacaaagcgctggagaacgatccggattgcaagcatttgattcctatgaatccgaatgatgacagcctgttcaaatccctggcagatgggatccttctctgtaaaatgatcaatctctcagagcctgacacaatcgatgaacgcgccattaacaagaaaaaactgacgccattcacaataagcgaaaatctcaatttggccttgaactctgccagcgcaatcggctgcacagttgtcaacatcggggcgagcgatctgaaagagggcaagccgcacttagttctcggtttattgtggcagatcatcaaagtggggctgttcgccgatattgagataagcagaaatgaggcactcatcgccttactgaatgaaggagaggagctggaggaactcatgaagcttagccctgaggagttactccttcggtgggttaactaccacctgaccaatgcgggctggcacaccatttctaactttagtcaggacatcaaggactcccgggcatactttcacctgctgaatcagatcgcacctaaaggaggcgaagatggccccgcaatcgctatcgacctgtcaggaatcaatgaaacaaatgacttgaagagggctggcctcatgctgcaagaggccgataagctgggatgcaaacagtttgttacccctgcagacgtcgtatctggcaaccctaagctgaacctggcgtttgtggccaatctattcaatacctatccatgtctgcataagccaaataacaatgacatcgatatgaacctgctcgaaggcgaaagcaaagaagaaaggactttcaggaattggatgaacagcctcggcgtgaacccttatattaaccatctttatagtgaccttgctgacgccctggtgatcttccagctttatgagatgatcagggttcctgtgaattggtcacacgtcaacaaacccccatacccagccttaggtggtaacatgaagaaaatcgaaaattgtaattatgcggtggagctaggtaagaataaggcaaaattctccctcgtcggtatcgcgggccaggacctcaatgaaggcaactcaaccttgactcttgcactcgtgtggcagctcatgcgaaggtacacactgaacgtccttagcgatctgggcgagggcgagaaggtgaacgacgagattattattaagtgggtgaaccagacgctaaagagcgctaataagaaaacctccattagctcattcaaggacaagtcaatttccacaagtctgcccgtcctggacctgattgacgctatcgcgccgaacgcagtgcgccaagagatgattagaagagagaacctgagtgatgaagataaacttaacaacgccaaatacgccatttctgtcgctaggaagatcggcgcccgaatttatgccctgcctgacgatctcgtcgaagtgaagcccaaaatggttatgacagttttcgcctgcttgatgggtaagggcctgaaccggatcaagtag

SEQ ID NO: 57722 - DNA, 1890 bp, Artificial Sequence
  derived and/or modified sequence
atggagaacagcaccaccaccatcagccgggaggagctggaggagttgcaagaggcatttaacaaaatcgatatcgataactccggatacgtttcagattacgaactccaagacttgttcaaggaggcctccttgccgctacccgggtacaaggtgagggaaatcgtggagaagatcttgtctgtggcagactctaacaaggatggaaagattagctttgaggaattcgtatctcttatgcaggagttaaaatctaaagacatcagcaagacattccgcaagattatcaacaagcgcgaggggatcaccgctatcggaggaacctcaacaatctcctcggaaggcacccagcattcgtacagcgaagaagaaaaagtcgcatttgtgaactggattaataaggctttagagaacgacccagattgcaaacatttgatccccatgaacccaaatgacgattccctgttcaaaagtctggctgacgggatcctgctgtgcaaaatgattaacctctccgagccggacacgatcgacgagagagccatcaataagaaaaaactgaccccgttcactatctctgagaacctcaatctggccctcaactctgcaagcgcaataggctgcactgtggtgaacattggcgcttcagacctgaaagagggcaagccacacctggttttggggcttctgtggcagatcattaaggtcggcttgtttgcagacatcgaaatctcccgcaatgaggctctaattgcattgttaaacgaaggcgaggagctcgaagagctcatgaagctttcaccagaggagctgcttctccggtgggtaaactaccacctgaccaacgccggctggcatacgatctctaacttcagccaggatattaaggactcccgagcctacttccacctcctaaatcaaattgcccccaaaggcggggaggatgggcccgctattgcaattgatttgtcgggcattaacgaaaccaacgatcttaaaagggctggacttatgcttcaggaagctgataaactggggtgtaaacagttcgtgacaccagcagacgtggttagcggcaaccctaagctgaacctggccttcgtagccaatctcttcaatacctacccttgccttcacaaacccaataacaacgacatcgacatgaatctcttggaaggagaatcgaaggaggagcggaccttccgcaactggatgaacagcctgggggttaacccttatatcaatcacctttacagcgacctcgccgatgccctcgttatattccagctttacgaaatgattcgtgtgccggtgaattggagccacgttaacaagcctccttaccctgcactcggcggtaacatgaaaaaaattgagaattgcaattacgccgtggagttgggtaaaaacaaggccaaattttctctggttggcattgccgggcaggatctgaatgagggcaactcaactctgactttggctctggtgtggcagcttatgcggcggtatacattgaacgtactgtcagacctgggggaaggcgagaaggttaatgacgaaatcataattaaatgggtgaaccagacacttaaaagcgcaaacaagaaaacgtccattagttctttcaaggataaaagcataagtaccagtctgcccgtgctggatctcatcgacgcaatcgctccaaacgcagtgcggcaagagatgattagaagagaaaatctgtccgatgaagataagctcaataatgccaaatacgctatttcggtggcccgaaagataggcgcccgtatctatgccctccccgacgatttagtggaggtaaagccgaagatggtgatgaccgtgttcgcctgcttaatgggcaaaggcctgaatcgtattaagtag

SEQ ID NO: 57723 - DNA, 165 bp, Artificial Sequence
  derived and/or modified sequence
atggagaacagcaccaccaccatcagccgggaggagctggaggagctgcaggaggccttcaacaaaatagacatcgataatagcgggtatgtgagtgactatgagctgcaggacttgttcaaggaagcaagccttccgctgccggggtataaggtccgagaatag

SEQ ID NO: 57724 - DNA, 363 bp, Artificial Sequence
  derived and/or modified sequence
atggagaacagcaccaccaccatcagccgggaggagctggaggagttgcaggaagctttcaacaaaatagatatagataacagcggttacgtctcagattacgaactgcaggacctctttaaagaagccagcctcccactgcccggatacaaggttcgggaaatcgtggaaaagatcctgagcgtcgccgattccaacaaagacggtaaaatctccttcgaagaatttgtgtcactcatgcaggagttgaaaagtaaggacattagcaaaacatttcgaaaaataattaataaaagagaaggcatcaccgctattggcggaacctccactattagttctgaggggacacaacatagctattag

SEQ ID NO: 57725 - DNA, 360 bp, Artificial Sequence
  derived and/or modified sequence
atggagaacagcaccaccaccatcagccgggaggagctggaggagttgcaggaggccttcaacaaaattgatatagataatagcggttacgtgtctgactacgagctccaggacctcttcaaggaggcatctctgcccctgcccgggtacaaagtgagagaaattgtagagaagatcctgtccgtcgccgattccaataaagacggcaaaatatctttcgaggaatttgtgtctctgatgcaagagctgaaaagcaaggacatctccaaaacttttagaaaaatcattaacaaaagagagggcattacagcaatcggcggtacctcaacgatctcatccgaaggtacacaacacagctag

SEQ ID NO: 57726 - DNA, 102 bp, Artificial Sequence
  derived and/or modified sequence
atggagaacagcaccaccaccatcagccgggaggagctggaggagcttcaggaggcgttcaacaagattgatatagacaatagcggttatgtatcggattag

SEQ ID NO: 57727 - DNA, 177 bp, Artificial Sequence
  derived and/or modified sequence
atggagaacagcaccaccaccatcagccgggaggagctggaggagcttcaggaggcatttaacaaaatagatatcgataactccggctacgtcagtgactacgagctccaggacttgtttaaggaagctagtttacccctgcccggctacaaggtgagagaaatcgtggagaaatag

SEQ ID NO: 57728 - DNA, 1890 bp, Artificial Sequence
  derived and/or modified sequence
atggagaacagcaccaccaccatcagccgggaggagctggaggagctccaagaggccttcaacaaaatcgatatcgacaactcgggctacgtgagtgactatgagctccaggatttgtttaaggaggcctccctcccgctgccaggctataaagtgagagaaatagttgaaaagatcctttctgtggcagattcgaacaaggatggtaagatatccttcgaggaatttgtctccttaatgcaggagctgaaatctaaggatatttcgaagacctttcgcaagataattaacaaacgggaaggcattaccgctatcggaggtacgagcacaatcagctctgaaggaacacagcactcgtactcagaggaggagaaggtggccttcgtcaactggattaataaggcccttgagaatgaccctgactgcaagcatctaatcccaatgaatccaaacgacgactccctgttcaagtctttggcggatggtatcctcctatgtaagatgattaacctgtctgagcccgacaccatagatgagagggccattaataaaaagaagctgactccatttaccatctcggagaacctgaacctcgccctgaattcagcatccgctatcggatgtacagtagtcaatattggggcttctgacctcaaagaaggcaagccccatttggtcctgggcctgctgtggcaaattattaaggttggcctttttgccgatatcgaaatctctcgcaacgaggccttaatcgccctcctcaacgagggagaagaactcgaggagctgatgaagctgtcacccgaggagctactgctgcgctgggttaactaccatctgacgaacgccggctggcataccatttccaacttcagccaggacatcaaagattcacgagcctatttccatctgctgaatcaaatagcccccaaggggggcgaagatggtcccgccatcgctatagatctgtcaggcatcaacgagacaaatgatctgaagagggccggtttgatgctccaggaagctgacaaacttggctgcaagcaatttgtgacgcctgccgacgtggtgtcagggaacccgaagctgaatttggcctttgtggcaaatctgtttaacacctacccatgccttcacaagccgaataataacgacattgacatgaatttgctcgaaggcgaatccaaggaagagaggacctttaggaattggatgaactcactcggtgtgaatccatacataaaccacctttacagtgacctcgctgatgcactcgtaattttccaactctatgaaatgatacgggtacccgtcaattggagtcacgtgaacaagcccccatatcccgcccttggtgggaatatgaaaaaaattgagaattgtaattatgcagtcgaactcgggaaaaacaaagccaaatttagcctcgtgggcatcgctggccaagacctgaacgagggtaattctaccttgacactggcccttgtttggcagctgatgaggcgatacacactgaatgtgctgtctgaccttggcgagggcgagaaggttaacgacgaaattattatcaaatgggtcaaccagaccctcaagtctgctaacaagaaaacctccattagctccttcaaggataagtctatttcaacatccctgcccgtgctcgatttgatcgatgccatcgcgccgaatgccgtcaggcaagagatgattagacgggagaacctctccgatgaggataaattaaacaatgccaaatatgctatctcagtggcaagaaagattggcgcacgaatttatgccctgcctgatgatttggtggaggtgaaacctaaaatggttatgaccgtgttcgcctgccttatgggaaagggtttaaacaggatcaagtag

SEQ ID NO: 57729 - DNA, 162 bp, Artificial Sequence
  derived and/or modified sequence
atggagaacagcaccaccaccatcagccgggaggagctggaggagctccaggaggcctttaacaagatagacatagacaactccgggtacgtgagtgattacgaattacaagacctattcaaggaagcttccctccctttgcctgggtacaaagtgagatag

SEQ ID NO: 57730 - DNA, 3755 bp, Artificial Sequence
  derived and/or modified sequence
atcaagattaatatctgtagtaataggcagaacacttcagtgtggaattgcttcttttctttggtcaaacactaactttggcagaggatagacacagcttaggaagactgaattttaagtcttctgaattgtttttctggacttccaaatctcaagtgataagaccagcagaagcagatataaagacctgaagatagtcttttctgtccaaagatggaaaacagtactactaccatttctcgggaggagcttgaagaactacaagaggcatttaataaaatagatattgacaatagtgggtatgtcagtgactatgaacttcaagacctgtttaaggaagcaagccttcctctgcctggctacaaggtgcgcgagattgtggagaaaattctatcagttgctgacagcaacaaagatggcaaaatcagttttgaagagtttgtgtcactaatgcaagaattaaaaagcaaagatatcagcaaaacattccgaaaaataattaacaagagggaagggattactgctattggaggaacttcaactatttccagtgagggcacacagcattcttattcagaggaagaaaaagtggcttttgttaactggataaacaaagccctggagaatgaccctgactgtaagcatcttatacccatgaatcccaatgatgatagtcttttcaagtcacttgcagatggcatccttctttgcaaaatgatcaacttatctgaaccagatacaattgatgaaagagccatcaataagaaaaagctcacgccattcactatttctgaaaatttaaacctagctctgaattctgcctcagccattggttgtacagtggtcaacattggtgcatcagatctcaaagaaggaaaacctcacttggtcttgggacttctctggcagatcatcaaagttggcctttttgctgatattgagatttccaggaatgaagctctgattgcattgttaaatgaaggtgaggaactagaggagctgatgaagctttctcccgaggaattactgctgcgatgggtgaactaccatctgaccaatgcaggatggcataccatcagcaacttcagccaagacattaaggactcgagagcctattttcatctgcttaatcagattgcccctaaaggtggggaagatggacctgccattgccattgacctttcaggaattaatgagacaaatgacctgaagcgtgctggactcatgcttcaagaagcagataaactgggctgcaaacagtttgttactcctgcagatgtggtttcaggcaatcctaaacttaatttagcttttgtagctaatttgtttaacacatacccgtgcctgcacaagccgaataataatgacatcgatatgaatttactggaaggagagagcaaggaagagagaacatttcggaactggatgaattccttgggagtcaacccatacattaatcatttgtacagtgaccttgcagatgctttagtgatctttcagctctatgagatgatccgagtgccagtcaactggagccatgtcaacaaacctccttatcctgcccttggagggaacatgaagaagattgaaaactgtaactatgcagtggaacttgggaagaacaaggccaaattctccttggttggcattgctgggcaggacctaaatgaagggaattcaacacttaccctggcattggtatggcagctgatgagaaggtacacattgaatgtgttatcggatcttggagagggtgaaaaagtaaatgatgaaattataattaaatgggtcaatcagactcttaaaagtgcaaacaaaaagacttctatttccagcttcaaggataaatctataagcacaagtttacctgtcctagatttaatagatgccattgcaccaaatgcagttcgtcaagaaatgatcaggagagaaaacttatctgatgaggacaagctgaacaatgctaaatacgccatttcagttgctcgaaagatcggtgcccggatatatgcattacctgatgacctcgtagaagtgaaaccaaagatggttatgacggtgtttgcatgcttaatgggaaaaggactgaacagaataaaataatcatttcatatgattttctgccacattaaacatattgtatgcctcacagtttacaggattctgaaatgtagtgggtgtaaaaccagagattatttgtatgctcaaaatagttatatattcattaatgaattcaatatcctgttcatactagttagagctggtcagcctttttgggtaacacagttaatttaccaactgatacagataatagaatatattcataatcaagctgatacttcatgattaaattatttttgttgcttaaaagtcgtattagacaagactaaatcattcttttttatggttcaaaaaagatgaatacaaacgtttttgcaggttctgctgtgaaatgtggtttgatttttttggtgtgttaattttgatcataaatgcattcatactcataatccagtttaatccttttatttgcttcctccaactatttaaagtggtccaaaaacacttttctgtaagtttctatactgtctaaaaccttatggtgaccagaattgtttattaatatcaaacttttttatatatgagaactaattcttgaataaaccccaaagttcactctcttgtttaagtagcagcagctttttacttaaaatttaattttaactacattgatactttacacatcctagtttggtaacacagctttaactatgtcatgcaacatatatatgttggtaggatgttattagagagatatgtgtgcatatatatttttttgcacctgaatcacccagcttttcataagtggtatgtttaattggtcattcagccaaccatcagtattttccccccacaacatgtgtaacacttttcagtctgtggatatctgatacattaagatttctttttataagtattcattttgaatgtgcatatagttatttgaccccttccaaatacttgtagccaaacattggctagaacatcccaagatatgctgacactgtcctgttagcttcatattatacttgctagtttaggtctctatagaagccctatataatttagaatatgcccactgaatatctttaatagaaagtaacataaagctagtattcaatgtagagtattttcatatgtttttcacagcccgttacaaattggcaatgtttggttaatgtttgtattacttggaaatcgctacagcttggactatttttttctaaatttttagcattagtccatttctgctgctaacaattgaatccagaaatctactttctccatcttccactgttagtgccagtgagcaatactgttgtgcaacaaaaatgtcactttatctcagtgtgaatgagtagtctaaattccctttctaccattgatttaaatatatatattggtaagagagactgcccatgtgtttagaatagaattttttaaatgaaatgatcaacaggtggaatttgaaatatattcttctacaaaagagatttctttcccttttatattttgatgattgttttcttaagattaagatatgttcttgctcttttataagattatttaaattatgtttccctctgattttttttcaccattgtatttactaagttattggatttacatgaaatctggcactttagggtgttctttttctcacagagtatatttaataaaaatgctgtgtatat

SEQ ID NO: 57731 - DNA, 3706 bp, Artificial Sequence
  derived and/or modified sequence
atgcgcagtggcgcgagcgcagcggctacgcgggcgcggagaggtagccgcagagtggacctgcaggtacttggatctccagtgggagctgccctctcgaaggcaggacagcggtggcggcagatataaagacctgaagatagtcttttctgtccaaagatggaaaacagtactactaccatttctcgggaggagcttgaagaactacaagaggcatttaataaaatagatattgacaatagtgggtatgtcagtgactatgaacttcaagacctgtttaaggaagcaagccttcctctgcctggctacaaggtgcgcgagattgtggagaaaattctatcagttgctgacagcaacaaagatggcaaaatcagttttgaagagtttgtgtcactaatgcaagaattaaaaagcaaagatatcagcaaaacattccgaaaaataattaacaagagggaagggattactgctattggaggaacttcaactatttccagtgagggcacacagcattcttattcagaggaagaaaaagtggcttttgttaactggataaacaaagccctggagaatgaccctgactgtaagcatcttatacccatgaatcccaatgatgatagtcttttcaagtcacttgcagatggcatccttctttgcaaaatgatcaacttatctgaaccagatacaattgatgaaagagccatcaataagaaaaagctcacgccattcactatttctgaaaatttaaacctagctctgaattctgcctcagccattggttgtacagtggtcaacattggtgcatcagatctcaaagaaggaaaacctcacttggtcttgggacttctctggcagatcatcaaagttggcctttttgctgatattgagatttccaggaatgaagctctgattgcattgttaaatgaaggtgaggaactagaggagctgatgaagctttctcccgaggaattactgctgcgatgggtgaactaccatctgaccaatgcaggatggcataccatcagcaacttcagccaagacattaaggactcgagagcctattttcatctgcttaatcagattgcccctaaaggtggggaagatggacctgccattgccattgacctttcaggaattaatgagacaaatgacctgaagcgtgctggactcatgcttcaagaagcagataaactgggctgcaaacagtttgttactcctgcagatgtggtttcaggcaatcctaaacttaatttagcttttgtagctaatttgtttaacacatacccgtgcctgcacaagccgaataataatgacatcgatatgaatttactggaaggagagagcaaggaagagagaacatttcggaactggatgaattccttgggagtcaacccatacattaatcatttgtacagtgaccttgcagatgctttagtgatctttcagctctatgagatgatccgagtgccagtcaactggagccatgtcaacaaacctccttatcctgcccttggagggaacatgaagaagattgaaaactgtaactatgcagtggaacttgggaagaacaaggccaaattctccttggttggcattgctgggcaggacctaaatgaagggaattcaacacttaccctggcattggtatggcagctgatgagaaggtacacattgaatgtgttatcggatcttggagagggtgaaaaagtaaatgatgaaattataattaaatgggtcaatcagactcttaaaagtgcaaacaaaaagacttctatttccagcttcaaggataaatctataagcacaagtttacctgtcctagatttaatagatgccattgcaccaaatgcagttcgtcaagaaatgatcaggagagaaaacttatctgatgaggacaagctgaacaatgctaaatacgccatttcagttgctcgaaagatcggtgcccggatatatgcattacctgatgacctcgtagaagtgaaaccaaagatggttatgacggtgtttgcatgcttaatgggaaaaggactgaacagaataaaataatcatttcatatgattttctgccacattaaacatattgtatgcctcacagtttacaggattctgaaatgtagtgggtgtaaaaccagagattatttgtatgctcaaaatagttatatattcattaatgaattcaatatcctgttcatactagttagagctggtcagcctttttgggtaacacagttaatttaccaactgatacagataatagaatatattcataatcaagctgatacttcatgattaaattatttttgttgcttaaaagtcgtattagacaagactaaatcattcttttttatggttcaaaaaagatgaatacaaacgtttttgcaggttctgctgtgaaatgtggtttgatttttttggtgtgttaattttgatcataaatgcattcatactcataatccagtttaatccttttatttgcttcctccaactatttaaagtggtccaaaaacacttttctgtaagtttctatactgtctaaaaccttatggtgaccagaattgtttattaatatcaaacttttttatatatgagaactaattcttgaataaaccccaaagttcactctcttgtttaagtagcagcagctttttacttaaaatttaattttaactacattgatactttacacatcctagtttggtaacacagctttaactatgtcatgcaacatatatatgttggtaggatgttattagagagatatgtgtgcatatatatttttttgcacctgaatcacccagcttttcataagtggtatgtttaattggtcattcagccaaccatcagtattttccccccacaacatgtgtaacacttttcagtctgtggatatctgatacattaagatttctttttataagtattcattttgaatgtgcatatagttatttgaccccttccaaatacttgtagccaaacattggctagaacatcccaagatatgctgacactgtcctgttagcttcatattatacttgctagtttaggtctctatagaagccctatataatttagaatatgcccactgaatatctttaatagaaagtaacataaagctagtattcaatgtagagtattttcatatgtttttcacagcccgttacaaattggcaatgtttggttaatgtttgtattacttggaaatcgctacagcttggactatttttttctaaatttttagcattagtccatttctgctgctaacaattgaatccagaaatctactttctccatcttccactgttagtgccagtgagcaatactgttgtgcaacaaaaatgtcactttatctcagtgtgaatgagtagtctaaattccctttctaccattgatttaaatatatatattggtaagagagactgcccatgtgtttagaatagaattttttaaatgaaatgatcaacaggtggaatttgaaatatattcttctacaaaagagatttctttcccttttatattttgatgattgttttcttaagattaagatatgttcttgctcttttataagattatttaaattatgtttccctctgattttttttcaccattgtatttactaagttattggatttacatgaaatctggcactttagggtgttctttttctcacagagtatatttaataaaaatgctgtgtatatagaaa

SEQ ID NO: 57732 - DNA, 567 bp, Artificial Sequence
  derived and/or modified sequence
agtggacctgcaggtacttggatctccagtgggagctgccctctcgaaggcaggacagcggtggcggcagccacggtgttggatacacttgtatgaggcttcagctgtgctgcataaatttcttgaagaacctgtgagccagaagcaaaatttcaggacagggggcacacactgaacttgaagaaacattttccaagatgctaaaagtatggcttctactcatttttcccaaaaactgaagtaaaatgctaaaaagaatccatgtcatctgccagatttccaaaggctgtttttgagttcttctctaagatgttttcctccataaatgtgtacagcattaaagaagcccctgcagcatcttggagataatataaagacctgaagatagtcttttctgtccaaagatggaaaacagtactactaccatttctcgggaggagcttgaagaactacaagaggcatttaataaaatagatattgacaatagtgggtatgtcagtgactatgaacttcaagacctgtttaaggaagcaagccttcctctgcctggctacaaggtgcgcgaga

SEQ ID NO: 57733 - DNA, 564 bp, Artificial Sequence
  derived and/or modified sequence
acttggatctccagtgggagctgccctctcgaaggcaggacagcggtggcggcagccacggtgttggatacacttgtatgaggcttcagctgtgctgcataaatttcttgaagaacctgtgagccagaagcaaaatttcaggacagggggcacacactgaacttgaaatataaagacctgaagatagtcttttctgtccaaagatggaaaacagtactactaccatttctcgggaggagcttgaagaactacaagaggcatttaataaaatagatattgacaatagtgggtatgtcagtgactatgaacttcaagacctgtttaaggaagcaagccttcctctgcctggctacaaggtgcgcgagattgtggagaaaattctatcagttgctgacagcaacaaagatggcaaaatcagttttgaagagtttgtgtcactaatgcaagaattaaaaagcaaagatatcagcaaaacattccgaaaaataattaacaagagggaagggattactgctattggaggaacttcaactatttccagtgagggcacacagcattcttatt

SEQ ID NO: 57734 - DNA, 580 bp, Artificial Sequence
  derived and/or modified sequence
gggcgcggagaggtagccgcagagtggacctgcaggtacttggatctccagtgggagctgccctctcgaaggcaggacagcggtggcggcagagacagagtctccctgtgttgcccaggctggtcttgaactcctggcctcaagcaatccacctgccttggcctcccaaagtgctgcaattacagatataaagacctgaagatagtcttttctgtccaaagatggaaaacagtactactaccatttctcgggaggagcttgaagaactacaagaggcatttaataaaatagatattgacaatagtgggtatgtcagtgactatgaacttcaagacctgtttaaggaagcaagccttcctctgcctggctacaaggtgcgcgagattgtggagaaaattctatcagttgctgacagcaacaaagatggcaaaatcagttttgaagagtttgtgtcactaatgcaagaattaaaaagcaaagatatcagcaaaacattccgaaaaataattaacaagagggaagggattactgctattggaggaacttcaactatttccagtgagggcacacagcattctta

SEQ ID NO: 57735 - DNA, 608 bp, Artificial Sequence
  derived and/or modified sequence
gcgggcgcggagaggtagccgcagagtggacctgcaggtacttggatctccagtgggagctgccctctcgaaggcaggacagcggtggcggcagagacagagtctccctgtgttgcccaggctggtcttgaactcctggcctcaagcaatccacctgccttggcctcccaaagtgctgcaattacagggaaggccagcgttggattgtgtaggttgcaaaatgcagtacctcagacttgcaactctgaaaagcactgtttgaaatctctgtaaagagtgaaaaacttcaagttttaaccaatgagtgttttagaggttaaagtttaaactctgacttggaagcacgctgggtaggactcctctgctcactcagactcaagttggatcatcagaatctctcttgtgttgctgtgaatgatttgcattgaaattcccagctagaactggaggaaagaggattacaaaccaggagatataaagacctgaagatagtcttttctgtccaaagatggaaaacagtactactaccatttctcgggaggagcttgaagaactacaagaggcatttaataaaatagatattgacaatagtgggtatgtcagtgact

SEQ ID NO: 57736 - DNA, 574 bp, Artificial Sequence
  derived and/or modified sequence
agccgcagagtggacctgcaggtacttggatctccagtgggagctgccctctcgaaggcaggacagcggtggcggcagggaaggccagcgttggattgtgtaggttgcaaaatgcagtacctcagacttgcaactctgaaaagcactgtttgaaatctctgtaaagagtgaaaaacttcaagttttaaccaatgagtgttttagaggttaaagtttaaactctgacttggaagcacgctgggtaggactcctctgctcactcagactcaagttggatcatcagaatctctcttgtgttgctgtgaatgatttgcattgaaattcccagctagaactggaggaaagaggattacaaaccaggagatataaagacctgaagatagtcttttctgtccaaagatggaaaacagtactactaccatttctcgggaggagcttgaagaactacaagaggcatttaataaaatagatattgacaatagtgggtatgtcagtgactatgaacttcaagacctgtttaaggaagcaagccttcctctgcctggctacaaggtgcgcgagattgtggagaaaa

SEQ ID NO: 57737 - DNA, 2258 bp, Artificial Sequence
  derived and/or modified sequence
aattctccataggaacactatcaagtctttttccataaaagtcagataaaagaaagatcacatttcttgatattctttgaagcaactttatttttattgtcatgcttcatcctgcccgaatactgccaagtctttctcaggcacctggaatctgctcctcagcctctgttgtcctgggtctaatgtagagcaaaaggctgagaggaagctcttctattctccatcatcggtcttcagtggctacctgggaaacaccccttggcttagtcggcagattctctccgatataaagacctgaagatagtcttttctgtccaaagatggaaaacagtactactaccatttctcgggaggagcttgaagaactacaagaggcatttaataaaatagatattgacaatagtgggtatgtcagtgactatgaacttcaagacctgtttaaggaagcaagccttcctctgcctggctacaaggtgcgcgagattgtggagaaaattctatcagttgctgacagcaacaaagatggcaaaatcagttttgaagagtttgtgtcactaatgcaagaattaaaaagcaaagatatcagcaaaacattccgaaaaataattaacaagagggaagggattactgctattggaggaacttcaactatttccagtgagggcacacagcattcttattcagaggaagaaaaagtggcttttgttaactggataaacaaagccctggagaatgaccctgactgtaagcatcttatacccatgaatcccaatgatgatagtcttttcaagtcacttgcagatggcatccttctttgcaaaatgatcaacttatctgaaccagatacaattgatgaaagagccatcaataagaaaaagctcacgccattcactatttctgaaaatttaaacctagctctgaattctgcctcagccattggttgtacagtggtcaacattggtgcatcagatctcaaagaaggaaaacctcacttggtcttgggacttctctggcagatcatcaaagttggcctttttgctgatattgagatttccaggaatgaagctctgattgcattgttaaatgaaggtgaggaactagaggagctgatgaagctttctcccgaggaattactgctgcgatgggtgaactaccatctgaccaatgcaggatggcataccatcagcaacttcagccaagacattaaggactcgagagcctattttcatctgcttaatcagattgcccctaaaggtggggaagatggacctgccattgccattgacctttcaggaattaatgagacaaatgacctgaagcgtgctggactcatgcttcaagaagcagataaactgggctgcaaacagtttgttactcctgcagatgtggtttcaggcaatcctaaacttaatttagcttttgtagctaatttgtttaacacatacccgtgcctgcacaagccgaataataatgacatcgatatgaatttactggaaggagagagcaaggaagagagaacatttcggaactggatgaattccttgggagtcaacccatacattaatcatttgtacagtgaccttgcagatgctttagtgatctttcagctctatgagatgatccgagtgccagtcaactggagccatgtcaacaaacctccttatcctgcccttggagggaacatgaagaagattgaaaactgtaactatgcagtggaacttgggaagaacaaggccaaattctccttggttggcattgctgggcaggacctaaatgaagggaattcaacacttaccctggcattggtatggcagctgatgagaaggtacacattgaatgtgttatcggatcttggagagggtgaaaaagtaaatgatgaaattataattaaatgggtcaatcagactcttaaaagtgcaaacaaaaagacttctatttccagcttcaaggataaatctataagcacaagtttacctgtcctagatttaatagatgccattgcaccaaatgcagttcgtcaagaaatgatcaggagagaaaacttatctgatgaggacaagctgaacaatgctaaatacgccatttcagttgctcgaaagatcggtgcccggatatatgcattacctgatgacctcgtagaagtgaaaccaaagatggttatgacggtgtttgcatgcttaatgggaaaaggactgaacagaataaaataatcatttcatatgattttctgccacattaaacatattgtatgcctcaca

SEQ ID NO: 57738 - DNA, 635 bp, Artificial Sequence
  derived and/or modified sequence
aataggcagaacacttcagtgtggaattgcttcttttctttggtcaaacactaactttggcagaggatagacacagcttaggaagactgaattttaagtcttctgaattgtttttctggacttccaaatctcaagtgataagaccagcagaagcagggaaggccagcgttggattgtgtaggttgcaaaatgcagtacctcagacttgcaactctgaaaagcactgtttgaaatctctgtaaagagtgaaaaacttcaagttttaaccaatgagtgttttagaggttaaagtttaaactctgacttggaagcacgctgggtaggactcctctgctcactcagactcaagttggatcatcagaatctctcttgtgttgctgtgaatgatttgcattgaaattcccagctagaactggaggaaagaggattacaaaccaggagatataaagacctgaagatagtcttttctgtccaaagatggaaaacagtactactaccatttctcgggaggagcttgaagaactacaagaggcatttaataaaatagatattgacaatagtgggtatgtcagtgactatgaacttcaagacctgtttaaggaagcaagccttcctctgcctggctacaaggtgcg

SEQ ID NO: 57739 - DNA, 1890 bp, Artificial Sequence
  derived and/or modified sequence
atggaaaactccactactaccattagtcgggaggaactagaggaactacaggaggccttcaacaagatagacatcgataactccggctatgtgtcagactacgaattacaggaccttttcaaagaagcctccttgcctcttccagggtataaagtccgcgaaatcgtggaaaaaattctgtctgtggctgactccaacaaagacggcaagatatccttcgaggagttcgttagcctcatgcaggagctgaagtcaaaagatatttccaaaacattccggaagattattaacaaaagggaaggcatcacagctatcggagggacaagcacaatctcttcagaaggaactcagcatagctattccgaggaggaaaaggtcgcattcgtgaattggatcaataaagccttggaaaacgaccctgactgcaagcatctcattcctatgaatcctaatgacgactcacttttcaagtccctcgcagatgggattcttctgtgcaagatgataaatctgagtgagccggatactatcgatgaacgcgctataaacaagaagaagctgaccccttttactatatcagagaacctgaatctcgccctgaactcagcatcagcaatcggatgtaccgtcgtcaatattggagctagtgacttgaaggaagggaaaccccatttggtgctgggattattatggcaaatcataaaggtgggcctgtttgccgatattgagatctctcgcaacgaggccctgattgccttgttaaacgaaggggaggaactggaggaactgatgaaactctctccagaagaactgttgctcaggtgggtgaattaccacttgacgaatgccggatggcacaccatcagtaatttctcacaggatatcaaggatagcagagcttattttcacctgctaaatcagatagctcccaaagggggtgaggatgggccagctattgccatcgacctgagcggtattaacgaaacgaacgatcttaagagggccggtctaatgcttcaagaggccgataagctcggatgtaaacagtttgtgacaccagccgatgtggtctctggaaaccccaagttaaatctggctttcgtggctaacctcttcaacacatacccctgtctgcacaaaccaaataataacgatatcgatatgaatctcctggagggcgaaagtaaagaagaaaggactttcaggaattggatgaactcccttggcgttaatccttatataaatcatctgtatagcgacctagcagacgccctcgtaatctttcagctgtacgagatgattagagtgcctgtcaattggtcacacgtcaacaagcccccatatcctgccctcgggggaaatatgaagaaaattgagaactgcaattacgcagttgagttggggaaaaataaggctaagttctcgcttgtcggcattgccggacaggacctgaatgagggaaatagcacccttacactcgccctcgtatggcagctaatgagaaggtatacactcaacgtcctctctgatctcggcgagggggagaaggtaaacgatgagatcataattaagtgggtgaatcagaccctaaagtccgcaaacaaaaaaaccagcatcagttcctttaaggacaaatcaataagcacctccctgccagttctggatcttattgatgcaatagcacccaatgcagtccgccaagagatgatacggcgtgaaaacctgtccgacgaggacaaactcaataatgccaaatacgctatatcagtggcgcgaaaaatcggggcaaggatctacgctctgccggatgacctggtcgaggtgaagcctaaaatggtgatgacagtctttgcctgtctaatggggaagggccttaaccgcatcaagtag

SEQ ID NO: 57740 - DNA, 1890 bp, Artificial Sequence
  derived and/or modified sequence
atggagaactctacaacaactatctctcgcgaggaactcgaggagcttcaggaggctttcaataagatcgatattgacaattccggctacgttagcgactatgagctgcaagatctattcaaagaagcaagcttgcccctgccaggatacaaggtgcgagagatcgtggagaagattttgtctgtggcagactctaataaggacgggaagatcagcttcgaagagtttgtgagcctcatgcaggaactgaagtccaaggatatctctaaaacattccgaaagatcatcaacaagcgtgagggcatcacagctatcggcggaacttctacaattagttctgagggcacacaacattcatattccgaggaggagaaggtagcatttgtgaactggattaacaaggccctggaaaatgatccagactgtaagcatctgattccaatgaaccccaatgatgatagcttattcaagtcgctcgccgacggcattctgctatgcaaaatgatcaatcttagtgaacccgataccatagatgaaagggctatcaacaagaaaaagctgactcctttcacaatctccgagaatcttaatctggcattaaactccgctagcgccattggctgtactgtagttaacataggtgcctcagacctcaaggagggaaaaccccaccttgtacttggtctgctctggcagatcataaaagtcggcttgtttgcagacatcgagatttccagaaacgaggctctcatcgccctccttaacgagggcgaagagctagaggagctcatgaagttgagtcccgaggaactgttattgcgatgggtgaattatcacctgaccaatgcgggttggcacactatctctaacttctcccaagatattaaagatagcagggcatatttccacctgctcaatcaaatcgctcccaaaggaggggaagacggacccgctatcgcaatcgatttgtccggcataaacgagactaacgatctgaagcgggctggcctcatgctgcaggaggcagataaactgggttgcaaacagttcgtgacgcctgcggacgtggtttctgggaatcctaaactgaacctggcattcgttgccaacctttttaacacctatccttgcctccataagcctaataataatgatatcgacatgaatctactggagggggagtccaaggaggagaggactttccgaaactggatgaatagcttgggcgtcaatccttacataaatcacctatacagcgatcttgccgatgccttggtaatctttcagctgtatgaaatgatccgtgtgccagtaaactggtctcacgtaaataaacctccatatccagccctgggcggaaacatgaagaaaattgagaattgcaactacgctgttgagctggggaaaaataaagctaagttctccctggttgggatcgccggacaggacctcaacgagggcaattctacactgactctagcactggtgtggcagctgatgcggaggtatacgctcaacgtgctcagcgatttaggagagggagagaaagtaaacgacgagattatcatcaagtgggtgaaccagactcttaaaagcgcaaataagaagactagtatttcaagttttaaggacaaaagcattagcaccagccttcccgtcttggaccttatcgacgcaattgcgcctaacgctgtgcggcaggagatgatcagacgggaaaacttgtcagacgaggataagctgaataacgccaaatacgcaatctccgtggcaaggaagattggcgctcgtatttatgccctacccgatgatctggtggaggtgaagcccaagatggtcatgactgtttttgcatgtctgatgggcaagggactgaaccggattaaatag

SEQ ID NO: 57741 - DNA, 165 bp, Artificial Sequence
  derived and/or modified sequence
atggagaatagcaccacaaccatttctagggaggaattagaagagctgcaggaggcgtttaacaagattgatattgataatagcggctatgtcagtgactacgaactccaggacctgtttaaagaggcgagcctgccgttgcccggatacaaagtgagagagtag

SEQ ID NO: 57742 - DNA, 363 bp, Artificial Sequence
  derived and/or modified sequence
atggaaaactctacaactaccatctccagggaggagttagaggaactgcaggaggcgttcaacaagatcgatattgataactcaggttacgtgtctgattatgaacttcaggacctgttcaaagaagcgtcccttccccttcccggttataaggtgcgagagattgttgagaagatcctttcggttgccgattccaacaaagacgggaagatcagctttgaggagtttgtgagtttgatgcaggagctgaaatcgaaggacattagcaagaccttccggaagatcattaataagcgcgagggcatcaccgcaatcggcggtaccagcacaatttctagcgagggtacgcagcattcctactag

SEQ ID NO: 57743 - DNA, 360 bp, Artificial Sequence
  derived and/or modified sequence
atggagaatagcacaacaaccattagccgagaggagttagaggagcttcaagaggcctttaataagattgacattgataactctgggtacgtgtcggattacgaactgcaggacctgtttaaggaagctagcctacctctgcctggctacaaggtgcgcgagatcgtagaaaaaatactctcggtagccgacagtaataaggacggcaagatttcatttgaagagtttgtgagtttgatgcaggaactcaagtcaaaagacattagcaagaccttcagaaagattattaataagcgggagggcattacggcaattgggggaacttcaaccataagctccgaagggacgcaacattcctag

SEQ ID NO: 57744 - DNA, 102 bp, Artificial Sequence
  derived and/or modified sequence
atggaaaattctacaaccactatctcccgtgaagagctcgaggagcttcaggaggcattcaacaaaattgatattgacaattcagggtacgttagcgactag

SEQ ID NO: 57745 - DNA, 177 bp, Artificial Sequence
  derived and/or modified sequence
atggagaattcgactacaactatctcccgggaagaacttgaggaacttcaggaggcctttaacaaaatcgacatagacaatagcggatatgtcagcgactacgaacttcaggatctttttaaggaagcttctcttcccctgcccggatacaaagtcagggagattgtcgagaagtag

SEQ ID NO: 57746 - DNA, 1890 bp, Artificial Sequence
  derived and/or modified sequence
atggagaattctacaacgactatttctcgagaggagctggaagaacttcaggaggcgtttaataaaatcgatatagacaacagtggctacgtatcagactatgaactgcaggacctgtttaaagaagcctctctgccgctgccaggctacaaagtccgggaaatagtggagaagatcctctcagtcgccgatagtaacaaggatgggaagatatcttttgaggaattcgtgtcattaatgcaagagctcaaatctaaggacatttcaaagacttttaggaagattattaataaaagggaaggcatcaccgccatcgggggtacttccaccataagttccgagggcacccaacactcatattcggaggaagagaaggtcgcttttgtcaattggattaacaaagctctggagaatgatcccgattgtaaacatctgatccctatgaatcccaatgatgacagcctgttcaaaagtctcgccgacgggatccttctgtgtaaaatgatcaacctctcagagcctgataccatcgacgaaagagccattaataagaaaaagctgacgcccttcactatctccgagaatctgaatctagcgctgaattccgcgtccgcaattggctgcaccgtcgtgaacatcggcgctagtgatctgaaggagggaaagccacacctggtcctgggccttctctggcagatcatcaaagttggactcttcgctgatatcgagatttccaggaatgaggctctcattgccctgcttaatgagggggaggagctggaggaactgatgaagttgtctccagaagagctacttctgcgctgggtgaactatcatttaacaaacgcagggtggcacacgataagcaacttcagtcaggatattaaagactcccgcgcttacttccacctcttaaaccagattgccccaaaaggcggagaggacggaccagccatcgccatagatttaagcgggatcaacgaaacaaatgaccttaaaagagccggtttgatgctccaggaggcagacaagctgggctgcaaacagtttgtgacccccgcagatgttgtgagtggaaaccccaaactgaatctggctttcgtggctaatctgttcaatacttatccctgtctgcataagcctaacaacaacgatatagatatgaatctgctggaaggagagtctaaggaggagcgcacgtttaggaactggatgaacagccttggcgttaatccttatattaaccatctgtacagcgacctggccgacgcgcttgtcatctttcaactctatgaaatgataagggtgcccgtcaactggtcacacgtgaacaaaccaccctatccagctctgggaggtaacatgaaaaagatcgagaactgcaattacgccgtcgaactgggcaagaataaggccaagttttctctggtaggcattgccggtcaggatctcaacgaggggaactccacgctgaccttagcgctagtgtggcagcttatgcgtaggtacaccctcaatgtgctgtcagatctcggcgaaggggaaaaagtgaacgatgaaatcatcatcaagtgggtcaaccagacactgaagagcgcgaataagaagacatcaataagcagcttcaaagataagtcaatctccaccagcctccccgtactcgatctcattgatgccattgcaccgaacgctgtgagacaggagatgataaggcgtgagaacttgagtgacgaagataaattgaataatgccaagtacgccatttctgtggccagaaaaatcggagcgaggatatatgcactcccggacgacttggtagaggtgaagccaaaaatggtgatgaccgtgttcgcttgccttatgggaaaggggctgaataggatcaaatag

SEQ ID NO: 57747 - DNA, 162 bp, Artificial Sequence
  derived and/or modified sequence
atggagaattctacaacgacaatcagccgcgaggagctcgaagaactgcaagaggcctttaataaaatagacattgacaattcaggctatgtgtccgactatgagctccaggacctctttaaggaagcgagcctcccactccctggatacaaagtgaggtag

SEQ ID NO: 57748 - DNA, 1890 bp, Artificial Sequence
  derived and/or modified sequence
atggagaacagcaccaccaccatcagcagagaggagctggaggagctgcaggaggccttcaacaagatcgacatcgacaacagcggctacgtgagcgactacgagctgcaggacctgttcaaggaggccagcctgcccctgcccggctacaaggtgagagagatcgtggagaagatcctgagcgtggccgacagcaacaaggacggcaagatcagcttcgaggagttcgtgagcctgatgcaggagctgaagagcaaggacatcagcaagaccttcagaaagatcatcaacaagagagagggcatcaccgccatcggcggcaccagcaccatcagcagcgagggcacccagcacagctacagcgaggaggagaaggtggccttcgtgaactggatcaacaaggccctggagaacgaccccgactgcaagcacctgatccccatgaaccccaacgacgacagcctgttcaagagcctggccgacggcatcctgctgtgcaagatgatcaacctgagcgagcccgacaccatcgacgagagagccatcaacaagaagaagctgacccccttcaccatcagcgagaacctgaacctggccctgaacagcgccagcgccatcggctgcaccgtggtgaacatcggcgccagcgacctgaaggagggcaagccccacctggtgctgggcctgctgtggcagatcatcaaggtgggcctgttcgccgacatcgagatcagcagaaacgaggccctgatcgccctgctgaacgagggcgaggagctggaggagctgatgaagctgagccccgaggagctgctgctgagatgggtgaactaccacctgaccaacgccggctggcacaccatcagcaacttcagccaggacatcaaggacagcagagcctacttccacctgctgaaccagatcgcccccaagggcggcgaggacggccccgccatcgccatcgacctgagcggcatcaacgagaccaacgacctgaagagagccggcctgatgctgcaggaggccgacaagctgggctgcaagcagttcgtgacccccgccgacgtggtgagcggcaaccccaagctgaacctggccttcgtggccaacctgttcaacacctacccctgcctgcacaagcccaacaacaacgacatcgacatgaacctgctggagggcgagagcaaggaggagagaaccttcagaaactggatgaacagcctgggcgtgaacccctacatcaaccacctgtacagcgacctggccgacgccctggtgatcttccagctgtacgagatgatcagagtgcccgtgaactggagccacgtgaacaagcccccctaccccgccctgggcggcaacatgaagaagatcgagaactgcaactacgccgtggagctgggcaagaacaaggccaagttcagcctggtgggcatcgccggccaggacctgaacgagggcaacagcaccctgaccctggccctggtgtggcagctgatgagaagatacaccctgaacgtgctgagcgacctgggcgagggcgagaaggtgaacgacgagatcatcatcaagtgggtgaaccagaccctgaagagcgccaacaagaagaccagcatcagcagcttcaaggacaagagcatcagcaccagcctgcccgtgctggacctgatcgacgccatcgcccccaacgccgtgagacaggagatgatcagaagagagaacctgagcgacgaggacaagctgaacaacgccaagtacgccatcagcgtggccagaaagatcggcgccagaatctacgccctgcccgacgacctggtggaggtgaagcccaagatggtgatgaccgtgttcgcctgcctgatgggcaagggcctgaacagaatcaagtag

SEQ ID NO: 57749 - DNA, 165 bp, Artificial Sequence
  derived and/or modified sequence
atggagaacagcaccaccaccatcagcagagaggagctggaggagctgcaggaggccttcaacaagatcgacatcgacaacagcggctacgtgagcgactacgagctgcaggacctgttcaaggaggccagcctgcccctgcccggctacaaggtgagagagtag

SEQ ID NO: 57750 - DNA, 363 bp, Artificial Sequence
  derived and/or modified sequence
atggagaacagcaccaccaccatcagcagagaggagctggaggagctgcaggaggccttcaacaagatcgacatcgacaacagcggctacgtgagcgactacgagctgcaggacctgttcaaggaggccagcctgcccctgcccggctacaaggtgagagagatcgtggagaagatcctgagcgtggccgacagcaacaaggacggcaagatcagcttcgaggagttcgtgagcctgatgcaggagctgaagagcaaggacatcagcaagaccttcagaaagatcatcaacaagagagagggcatcaccgccatcggcggcaccagcaccatcagcagcgagggcacccagcacagctactag

SEQ ID NO: 57751 - DNA, 360 bp, Artificial Sequence
  derived and/or modified sequence
atggagaacagcaccaccaccatcagcagagaggagctggaggagctgcaggaggccttcaacaagatcgacatcgacaacagcggctacgtgagcgactacgagctgcaggacctgttcaaggaggccagcctgcccctgcccggctacaaggtgagagagatcgtggagaagatcctgagcgtggccgacagcaacaaggacggcaagatcagcttcgaggagttcgtgagcctgatgcaggagctgaagagcaaggacatcagcaagaccttcagaaagatcatcaacaagagagagggcatcaccgccatcggcggcaccagcaccatcagcagcgagggcacccagcacagctag

SEQ ID NO: 57752 - DNA, 102 bp, Artificial Sequence
  derived and/or modified sequence
atggagaacagcaccaccaccatcagcagagaggagctggaggagctgcaggaggccttcaacaagatcgacatcgacaacagcggctacgtgagcgactag

SEQ ID NO: 57753 - DNA, 177 bp, Artificial Sequence
  derived and/or modified sequence
atggagaacagcaccaccaccatcagcagagaggagctggaggagctgcaggaggccttcaacaagatcgacatcgacaacagcggctacgtgagcgactacgagctgcaggacctgttcaaggaggccagcctgcccctgcccggctacaaggtgagagagatcgtggagaagtag

SEQ ID NO: 57754 - DNA, 162 bp, Artificial Sequence
  derived and/or modified sequence
atggagaacagcaccaccaccatcagcagagaggagctggaggagctgcaggaggccttcaacaagatcgacatcgacaacagcggctacgtgagcgactacgagctgcaggacctgttcaaggaggccagcctgcccctgcccggctacaaggtgagatag

SEQ ID NO: 57755 - DNA, 1617 bp, Artificial Sequence
  derived and/or modified sequence
caccctcaatgagactgtgaacagcatctttgcacagggcgccccaaggagctccctggccgagagcttcttcgtggattatgaggagaacgagggggctggcccttacctgctcaacgggtcctacctggagctgagcagcgacagggttgccaacagctcctccgaggccccattccccaacgttagcaccagcctgctcacctcggccgggaacaggactcacaaggccaggaccaggcccaaggcgcgcaagcaaggcgtgagtcccgcggacatgtaccggtggaagctctcgtcccacgagccctgcagtgccacctgcaccacaggggtcatgtctgcgtacgccatgtgtgtccgctatgatggcgtcgaggtggatgacagctactgtgacgccctgacccgtcccgagcctgtccacgagttctgcgctgggagggagtgccagcccaggtgggagacgagcagctggagcgagtgttcgcgcacctgcggagagggctaccagttccgcgtcgtgcgctgctggaagatgctctcgcccggcttcgacagctccgtgtacagcgacctgtgcgaggcagccgaggccgtgcggcccgaggaacgcaagacctgccggaaccccgcctgcgggccccagtgggagatgtcggagtggtccgagtgcactgccaagtgtggggagcgcagtgtggtgaccagggacatccgctgctcggaggatgagaagctgtgtgaccccaacaccaggcctgtaggggagaagaactgcacgggcccgccctgtgaccggcagtggaccgtctccgactggggaccgtgcagtggaagctgcgggcaaggccgcaccatcaggcacgtgtactgcaagaccagcgacggacgggtagtacctgagtcccagtgccagatggagaccaagcctctggccatccacccctgtggggacaaaaactgtcccgcccactggctggcccaggactgggagcggtgcaacaccacctgcgggcgcggggtcaagaagcggctggtgctctgcatggagctggccaacgggaagccgcagacgcgcagtggccccgagtgcgggctcgccaagaagcctcccgaggagagcacgtgtttcgagaggccctgcttcaagtggtacaccagcccctggtcagagtgcaccaagacctgcggggtgggcgtgaggatgcgagacgtcaagtgctaccaggggaccgacatcgtccgtggttgcgatccgttggtgaagcccgttggcagacaggcctgtgatctgcagccctgccccacggagcccccagatgacagctgccaggaccagccaggcaccaactgtgccctggccatcaaagtgaacctctgcgggcactggtactacagcaaggcgtgctgccgctcctgcaggcccccccactcctaggcccggcagctgcagccccttccagatgaagaccaagcgcccctcctggggctgctgcagcttctggggcctccacagacccccctcctgcggggcacgctggcctaagagacgtggcactgagcctcggctgtcgagaggggacttcccacggcccgtggacctttgtgctcctg

SEQ ID NO: 57756 - DNA, 2856 bp, Artificial Sequence
  derived and/or modified sequence
atggatggccggtggcagtgttcatgttgggcctggttcctgcttgtgctggccgttgtggcgggcgatacagtgtcaactgggagtaccgataactccccgaccagcaatagcctcgaggggggcactgacgccaccgccttctggtggggcgagtggacaaagtggaccgcctgcagtagaagttgtggcgggggggtcaccagccaggagcggcactgtttgcaacagcgtcggaaatccgtgccaggccctgggaatcgtacttgtactggaacctcaaaacgataccagctctgcagggtacaggagtgcccacctgatggaagatcattccgagaagagcagtgcgtcagctttaatagtcacgtttataatggccgaactcaccagtggaagcctctttaccccgacgattacgtgcatatatcttccaagccctgtgatctccactgcacaaccgtggacggccagagacagctaatggtacctgcccgggatggaactagctgtaaattgacagacttaaggggcgtttgtgtatccggcaagtgcgagccaatcggatgcgatggggtgctcttttctacccataccttagataagtgcgggatctgccagggcgatggttcaagctgtacacacgtgactggaaactataggaagggcaacgcccacctcggatactccctggtgacccacatcccagccggcgctagggatattcagatcgtggaacgcaaaaagtctgccgacgtcctggctctggccgacgaggcagggtattacttttttaatggcaattataaggtcgactcgcccaagaacttcaacatcgccggcaccgtggttaaataccgcagacccatggacgtttacgagactggtatcgagtacattgtggctcagggacccacaaaccaggggctgaacgtaatggtttggaaccaaaacgggaagagcccatccatcacattcgagtacacgttgcttcaacctccacatgagagtagaccacagccaatttactacggtttttcagaatcagccgaatcccaagggcttgacggcgcgggcctaatgggattcgtaccacataatgggtccctgtatggacaagcaagttctgaaagactcggcctcgataaccgactttttggccaccccggccttgatatggaactgggtccctcacagggccaggagactaatgaggtgtgtgagcaagctggaggcggggcatgcgaagggcctcccaggggtaaaggatttagagaccgaaacgtcaccggcactcctctgaccggagacaaagacgacgaggaagtagatactcacttcgcttctcaggagttctttagcgcaaacgcaatttccgatcagctgcttggtgccggctcggacctcaaagatttcacactaaacgagacggtcaatagcattttcgcgcagggggccccccggagctcattggctgagtctttttttgtggactacgaggagaacgaaggggcgggcccttatctcctgaacggcagctacttggagctttcttccgaccgggtggcaaattcctcttcagaggccccctttcccaacgtttcgacctctctactcaccagcgccggcaatcgcactcacaaagcaaggacaaggcctaaagcgcgaaagcaaggtgtgtccccagccgacatgtaccgatggaagttgtcctcacacgagccctgcagtgccacctgcaccaccggcgttatgtcagcgtatgctatgtgtgttcgctatgatggcgtggaagttgatgattcatattgtgacgcgctgaccaggcccgagcctgtgcacgaattttgcgcaggaagggaatgccagccgcgctgggaaacctcgtcttggtctgagtgctccagaacatgtggtgaaggctaccaatttcgggtggtgcgttgttggaagatgctatccccaggcttcgactcttctgtgtatagcgatctctgtgaggcagccgaggcggtgcgaccggaagagaggaagacatgccggaaccctgcttgtggcccccagtgggaaatgagcgagtggtcagaatgcactgcgaaatgtggtgagagatccgttgtaacccgggacatcagatgtagcgaagacgagaaactgtgtgatcccaacacacgccccgttggagaaaaaaactgcacaggtccaccttgcgatcgtcagtggactgtgtcggattggggcccatgttctgggagctgcggccagggcaggacaatacgccatgtgtattgcaagacctcagatggccgggtggtcccagaaagccagtgccaaatggagaccaaaccgctggcaatacatccttgcggtgacaaaaattgtccggcgcactggttggcccaagactgggagcggtgtaacactacatgtgggcgaggagtgaagaagcgccttgtgctgtgtatggaattagctaatggcaagcctcaaacacgttcagggcccgaatgcggcttggcaaagaaacctcctgaggaaagcacctgcttcgagcgtccttgctttaagtggtatacgtccccctggtctgaatgcaccaagacttgcggcgtcggagttaggatgcgagacgttaaatgctatcagggaactgacatagtgcggggctgtgaccccctagtgaaacccgttggaagacaagcgtgcgatctgcagccctgccccaccgagccaccggatgatagttgccaggatcagcctggtactaattgcgctcttgcaattaaggtcaatctatgcggacattggtactattcaaaagcatgttgtcggtcttgccgccctccccatagctag

SEQ ID NO: 57757 - DNA, 2856 bp, Artificial Sequence
  derived and/or modified sequence
atggatggccgatggcaatgttcgtgttgggcgtggtttcttctggtccttgctgtcgttgcaggggacactgtaagtaccgggagtacagataacagtcccacctccaattctctcgaaggtggcactgacgccaccgcgttttggtggggcgaatggacaaaatggaccgcctgctctcgatcttgcggaggcggcgttaccagtcaggagcggcactgtctccagcagagacggaagagtgtgccgggaccaggtaataggacatgcactgggacaagtaaaaggtaccagctctgtcgagtccaggagtgccccccagacgggcgctcatttcgggaggagcaatgtgtgagttttaacagccacgtgtataacgggagaacccatcagtggaagcccctgtatccagacgattacgtgcacatcagctccaagccctgcgatctgcactgtactactgtggatgggcagcgccagctaatggtccccgcaagagatgggaccagctgcaagttgacggatctgagaggcgtctgcgtgtccgggaaatgtgagcctatcggttgtgacggggtgcttttcagcacgcatactctggataaatgtggtatctgccaaggcgacgggtcctcctgcacccacgttaccggcaactacaggaaaggtaacgctcatctgggatatagtctagtgacacacatccccgcaggagcccgtgatatccaaatagtggaacggaaaaaaagcgcagatgtgctcgcgctggctgatgaggccggctattactttttcaatgggaactataaggtggactcgccgaagaattttaatatcgccggcaccgtggttaaatacagaagacccatggatgtttatgagaccggcattgaatatattgtcgctcagggaccaactaatcagggcctgaacgtgatggtgtggaatcagaacgggaaatccccttccatcacatttgagtacactctgctccaacccccgcacgagagcagacctcagcctatctactatggtttctctgagagcgcagaatctcagggattagatggggcagggctgatgggctttgtgcctcacaatggcagtctctacggtcaagcttccagcgagagacttggcctggacaaccgactgttcggccatcccggattagatatggagctgggccctagtcagggacaggagaccaacgaagtgtgcgagcaagccgggggcggtgcttgcgagggacctccacgtggtaagggtttccgcgatcggaatgtcactggtactcctctgacgggcgacaaggacgacgaggaggtagacacccattttgcttctcaggaatttttctctgccaatgccatctctgaccagctgctaggtgcagggtctgatctgaaggatttcaccctgaatgagacagtgaacagtatttttgcgcagggcgcccctaggtcttccttagcagagagcttctttgtggactatgaggaaaacgagggagcaggaccatacctgctgaacgggtcatacttggaactgagcagcgacagggtcgccaactcaagctcagaggcgccgtttccaaacgtcagcacaagtctcctcacctccgcagggaaccgaacacataaggccaggacccggcccaaagctaggaagcaaggagtgtctcctgcagatatgtacagatggaagctcagctcccacgagccttgctcggcgacatgcacaacaggagtaatgagcgcttatgccatgtgcgtgcgctatgatggggtggaagttgatgattcttactgtgatgctctcacccgaccggaaccggtgcacgagttctgtgctggccgcgagtgccaaccccggtgggagacatccagctggtctgagtgttctaggacgtgtggggaggggtatcaatttcgcgtcgtgaggtgctggaagatgctttcaccagggttcgactctagtgtttatagtgacctgtgtgaagcagcagaagccgtccgtcccgaagaaagaaagacatgcagaaaccccgcttgtgggccacagtgggagatgagtgaatggtctgagtgcacagctaaatgtggggaacggtccgtcgtaactcgggacattagatgtagcgaggatgagaagctgtgcgacccaaacactcgcccagtgggagaaaagaactgtaccgggcccccatgcgatcggcaatggacagtgtccgattggggaccctgctctggatcgtgcggccagggcaggacaattcgccacgtgtattgtaagacttccgacggacgagtggtgcctgagagtcaatgccaaatggaaactaagcctctcgctattcacccctgcggagataagaactgccccgcacactggctggctcaagattgggagaggtgcaacaccacatgcggtcgaggcgtaaagaaacgcttggtactgtgcatggaattggctaatgggaaaccacagactcggagtgggccagagtgcggcttggcaaaaaaacctccggaggagagcacatgcttcgagagaccatgtttcaagtggtacacgtccccatggtccgagtgcactaaaacttgcggcgtcggagtgcgaatgcgggacgtcaagtgttaccagggcacagatatcgttcgcggatgtgaccccttggtaaaacctgtaggcaggcaggcctgcgacctgcaaccgtgcccaacagaaccccccgatgatagctgccaggatcagcctgggacaaattgcgccctggcgatcaaagtcaacctgtgtggccattggtactatagcaaagcctgttgtcgatcctgtcgcccaccacactcctag

SEQ ID NO: 57758 - DNA, 2856 bp, Artificial Sequence
  derived and/or modified sequence
atggatggccgctggcagtgcagctgctgggcctggttcctgctggtgctggccgtggtggccggggacacagtgtccacaggcagcacagacaacagccccaccagcaacagcctggagggcggcacagatgccacagccttctggtggggcgagtggaccaagtggacagcctgcagccgcagctgtggcggcggcgtgaccagccaggagcggcactgcctgcagcagaggaggaagtctgtgcccggccctggcaacagaacctgcaccggcaccagcaagcgctaccagctgtgccgggtgcaggagtgccccccagatggccgctccttccgggaggagcagtgtgtgtccttcaacagccacgtgtacaacggccgcacccaccagtggaagcccctgtacccagatgattatgtgcacatcagcagcaagccctgtgacctgcactgcaccaccgtggatggccagaggcagctgatggtgcctgccagagatggcaccagctgcaagctgacagacctgcggggcgtgtgtgtgtctggaaaatgtgagcccatcggctgtgatggagtgctcttcagcacccacaccctggacaagtgtggcatctgccagggagatggcagcagctgcacccacgtgactggaaactacagaaaaggaaatgcccacctgggctacagcctggtgacccacatcccagctggggcccgggacatccagatcgtggagaggaagaagtctgcagatgtgctggccctggctgatgaggccggctactacttcttcaacggcaactacaaggtggacagccccaagaacttcaacattgctggcaccgtggtgaagtacagaagacccatggatgtgtatgaaacaggaattgagtacatcgtggcccagggccccaccaaccagggcctgaatgtgatggtgtggaaccagaatggcaagagccccagcatcacctttgagtacaccctgctgcagccccctcatgagagccggccccagcccatctactacggcttcagcgagagcgctgagagccagggcctggatggagctggcctgatgggctttgtgccccacaacggcagcctgtatggccaggccagcagcgagcggctgggcctggacaacagactctttggccaccctggcctggacatggagctgggccccagccagggccaggagaccaatgaggtgtgtgagcaggccggcggcggggcctgtgagggccccccccggggcaagggcttccgggacagaaatgtgacaggcacccccctgactggagacaaggatgatgaggaggtggacacccactttgccagccaggagttcttcagcgccaatgccatcagtgaccagctgctgggcgccggcagtgacctgaaggacttcaccctgaatgaaacagtgaacagcatctttgcccagggcgcccccaggagcagcctggccgagagcttctttgtggactatgaagaaaatgaaggagctggcccctacctgctgaatggcagctacctggagctgagcagtgacagagtggccaacagcagcagcgaggcccccttccccaacgtgtccaccagcctgctgaccagcgctggcaacagaacccacaaggcccggacccggcccaaggccaggaagcagggcgtgtccccagctgacatgtaccgctggaagctgagcagccatgagccctgcagcgccacctgcaccaccggggtgatgtctgcctatgccatgtgtgtgcgctatgatggagtggaggtggatgacagctactgtgatgccctgaccaggcctgagcctgtgcatgagttctgtgccggccgggagtgccagccccgctgggagaccagctcctggagcgaatgttccaggacctgtggggagggctaccagttccgggtggtgcgctgctggaagatgctgagccctggctttgacagctctgtgtacagcgacctgtgtgaggccgctgaggccgtgcggcctgaggagaggaagacctgcagaaatcctgcctgtggcccccagtgggagatgtctgagtggagcgagtgcacagccaagtgtggggagaggtctgtggtgacccgggacatccgctgcagtgaagatgagaagctgtgtgaccccaacaccaggcctgtgggggagaagaactgcaccggccccccctgtgaccggcagtggacagtgtctgactggggcccctgcagcggcagctgtggccagggccgcaccatcagacatgtgtactgcaagaccagtgatggccgggtggtgcctgagagccagtgccagatggagaccaagcccctggccatccacccctgtggggacaagaactgcccagcccactggctggcccaggactgggagcgctgcaacaccacctgtggccggggcgtgaagaagaggctggtgctgtgcatggagctggccaacgggaagccccagaccaggagcggcccagaatgtggcctggccaagaagcccccagaggagagcacctgctttgagcggccctgcttcaagtggtacaccagcccctggagcgagtgcaccaagacctgtggggtgggcgtgaggatgagagatgtgaagtgctaccagggcacagacatcgtgcggggctgtgaccccctggtgaagcctgtgggccggcaggcctgtgacctgcagccctgccccacagagcccccagatgacagctgccaggaccagcccggcaccaactgtgccctggccatcaaggtgaacctgtgtggccactggtactacagcaaggcctgctgccgcagctgccggcccccccacagctag

SEQ ID NO: 57759 - DNA, 2856 bp, Artificial Sequence
  derived and/or modified sequence
atggacggccggtggcagtgcagctgctgggcctggttcctgctggttctagcagtagtggccggcgacactgtgtctacaggatctacagataattccccaacaagcaacagcctggagggcgggaccgatgcaacagcgttttggtggggggaatggaccaaatggacagcttgcagtcgctcctgtggcgggggcgtaaccagccaggagcgacactgtctgcagcagcgccggaagagcgtgccggggcctggtaaccggacttgcacagggacaagtaagcgctatcagctttgcagagtacaggagtgcccacccgatggcagaagcttccgggaagagcagtgtgtgagctttaatagccacgtatataatggaaggacacaccagtggaaaccgctctaccccgacgattatgtccacatctcaagcaagccttgtgatctgcattgcactactgtggacggtcagcgacaactgatggtccccgcccgcgacggaacttcctgtaagctgacagatctacgtggtgtgtgtgttagtgggaaatgtgagccaatcgggtgtgatggcgtgctcttcagcacccacacactggataagtgcgggatatgccaaggggacgggagctcttgcacacacgtcaccgggaattacaggaagggaaacgcacaccttgggtattccctagtgacacacattcccgccggcgctcgagacatccaaatcgtagaaagaaaaaaatcagccgatgttctggcgctggctgatgaggcgggctactatttctttaacgggaattataaagttgacagccccaagaattttaatatcgccggcaccgtggtgaagtaccggcgacctatggacgtctacgagacaggtattgagtatatcgtggcacaggggcctaccaatcagggtctcaacgtgatggtgtggaatcagaacgggaagagccccagtatcacatttgaatacaccctgctgcaacctcctcatgagtctcgaccccagcctatctactacggcttttctgaatccgcagaaagccaagggttagacggcgccggcctcatggggttcgtgcctcataacgggagtctgtatggacaagcttctagcgagcggctagggctggacaacaggctgttcgggcatcctggcttggatatggaactcggaccctcccagggtcaagaaaccaacgaggtgtgtgagcaggctggcgggggagcctgcgagggccctccaagaggcaaggggttccgcgataggaacgtgacagggacgccactgactggtgataaagacgacgaagaggtagacacccacttcgcctcccaagagttcttttccgcgaacgccatctcggaccagctgcttggtgccggatcagaccttaaagacttcacactaaatgagactgtgaattcgatctttgcacaaggtgccccgaggtcttccctggctgagagtttcttcgttgactatgaagaaaatgaaggagctggtccgtacctgctgaatgggagttacttggagttgagcagcgaccgcgttgcaaacagctcttccgaggcgcctttccccaacgtcagtacatccttattaactagtgccgggaatcgaacacataaagcgagaacgcggcccaaggcccggaagcaaggcgtgagtcctgcggatatgtaccggtggaaactttcttcacacgaaccctgctcagcgacttgcacgaccggggtaatgtcagcttatgccatgtgcgtcagatatgacggcgtggaggtcgatgatagctattgtgacgccctaacccgcccggagcctgtccatgaattctgcgccggccgagagtgccagcctcgttgggagaccagtagctggtctgaatgttccagaacttgtggagaaggatatcagtttcgtgttgtgcgatgctggaagatgctgtctcctgggtttgacagctctgtttatagtgacttgtgcgaagctgccgaggctgttcggcctgaagagcgtaagacttgccgcaacccagcgtgtggtccccagtgggaaatgtccgagtggtccgaatgtaccgccaagtgcggtgaacgaagtgtggtcaccagggatattagatgtagcgaagatgaaaaactgtgtgatccgaataccagacccgtgggcgagaagaattgtaccggccctccttgtgacaggcagtggacagtcagtgattggggaccttgcagcggcagctgcggccagggacgcacaattagacacgtctactgtaagactagcgatggccgagtagtgccagagtcccagtgccagatggagactaagccattggctatccatccttgtggagataaaaattgcccagcacattggctggcgcaggattgggaacggtgcaacactacttgcggaagaggcgtgaagaagcgtctcgtcttgtgcatggagttggctaacggcaagcctcagacgaggtcgggccccgagtgtgggctggccaagaagcctcccgaagagagcacttgttttgaaagaccatgcttcaagtggtacacgtccccttggtctgagtgcacaaagacctgcggtgtgggagtccggatgcgggacgtgaagtgctaccaaggcacggacattgtaaggggatgcgaccctctggtgaagccagtgggtcgacaagcctgcgacctccaaccctgtcctactgaaccacccgacgactcatgccaagaccagccgggaaccaactgcgcactggcaatcaaagtcaatctctgtggacactggtactacagcaaggcctgctgtagaagctgtcgtccaccccacagctag

SEQ ID NO: 57760 - DNA, 2856 bp, Artificial Sequence
  derived and/or modified sequence
atggacggccggtggcagtgcagctgctgggcctggttcctgctggtcctggctgtggttgccggggacaccgtctcaaccggcagcaccgacaattctcccacctccaactctctcgagggcggcacggacgcaactgctttttggtggggagagtggaccaagtggacagcatgtagccggtcgtgtggaggtggagtaacgtcccaggagcgtcattgtcttcaacagcggagaaagtcagtacccggcccaggtaacagaacttgcaccggcacctccaagagataccagctgtgtagggttcaggaatgtcccccggacgggaggtcttttcgcgaggagcaatgcgtgtctttcaactcccatgtgtacaatggacgcacacaccagtggaagccactttacccagatgactatgtgcacatctcatccaagccctgcgacctgcactgtaccacagtggatggacaaagacaactgatggtacctgccagggatggcacctcctgcaaactcacagacctgcgaggcgtatgcgtgtctggaaagtgtgagcctatcggttgtgatggggtgttatttagtacccataccctggataaatgcgggatatgccagggtgatggtagcagctgcacacatgtgaccggcaactataggaaaggcaatgcgcatcttggatattcactggtcacccatatcccagccggagcccgtgatatccaaatagtcgagcgcaagaaatctgctgacgttttagctctggccgacgaggcaggctactattttttcaatggcaattacaaagtggattcccccaagaatttcaatattgccggaaccgtggtgaaatacagaaggcctatggacgtatatgagacagggatagagtatatcgtggcacaagggcccactaaccaggggttaaatgtgatggtttggaaccagaacggaaagtctccgtctattaccttcgaatacacgctgctacaaccccctcacgagagcagaccacaaccaatctactatgggttttccgaaagtgcagagagccaaggactggatggcgcaggcctgatgggatttgtaccccacaacgggtctctgtacgggcaggcttcatcagagcgcctcggtctggataatagacttttcgggcacccggggctggatatggagctcgggccaagccagggacaggagacgaacgaagtgtgcgaacaggccggcgggggggcatgcgaggggccgccgcgggggaaaggcttcagggatagaaacgtaacagggactccactgaccggagataaagatgacgaggaagtggatacccactttgcatcccaggagtttttctcggcgaatgccatcagtgatcagctgcttggggccgggagtgacctgaaggatttcacgttgaacgaaaccgttaattctatctttgcacaaggcgccccgcggtcttcactggctgagagctttttcgtggattacgaggaaaatgaaggagccggcccctatcttctgaacggctcctatctagaactcagcagcgatcgggtcgccaatagctcctctgaagccccatttcccaatgtttcaacgtctctgttgacatcagcgggtaatagaacccacaaagctaggacccggcccaaagcgaggaaacagggggttagtccagctgacatgtataggtggaagctgtcctctcacgagccctgttcagctacttgcactacaggagtgatgtcagcctatgcgatgtgcgtaaggtacgacggcgtggaggtagacgactcctattgtgacgccttgactcgcccagaacccgttcatgaattttgtgcgggcagggaatgtcaacctcgatgggagactagtagctggtcggaatgttctagaacctgcggagaggggtatcagttcagggttgtccgctgctggaagatgctatcgccagggttcgatagctcagtgtactcggacctctgcgaggcggctgaagcggtgaggccagaggaaagaaagacttgcagaaaccctgcctgcggcccccagtgggagatgtctgagtggagtgagtgtaccgccaagtgcggcgagcggagcgtcgtcacaagggatatccgttgcagcgaggacgaaaagctgtgtgaccccaatacaagacccgtgggggaaaaaaactgtaccggaccaccttgtgatcggcagtggaccgtgtcagactgggggccatgcagcggatcatgcggccagggccgtacgatcaggcatgtgtattgcaaaacatccgatggacgggtagtgcctgagagccagtgccagatggaaacaaagccccttgccatccacccatgtggagataaaaactgtcctgcccattggctcgcccaggactgggagaggtgtaatactacgtgtgggcgaggagtgaagaagaggctggtgttgtgtatggaactagctaacgggaagccccaaacgagaagtggccctgagtgcgggctcgccaagaaaccacctgaggaatcaacgtgtttcgagaggccgtgtttcaagtggtatacctctccatggtccgaatgtacaaagacttgcggtgtcggtgtgcgaatgcgcgacgttaaatgttatcaggggacagacattgtgcggggatgtgacccactggtcaagccggtaggacggcaggcatgcgaccttcagccatgtcccacagaacctcctgatgactcttgccaggaccagccaggaacgaattgtgctctggccattaaagtaaatctttgtggccattggtactattccaaggcttgttgcagatcgtgtcgacccccccattcctag

SEQ ID NO: 57761 - DNA, 2856 bp, Artificial Sequence
  derived and/or modified sequence
atggacggccgttggcagtgttcttgctgggcatggtttctgctggtgctcgccgtcgtggccggtgataccgtctctaccgggagcactgataactctcctacaagtaacagccttgaggggggtacagacgccaccgccttttggtggggcgaatggaccaaatggacagcctgttccagaagctgtgggggaggagttacctcccaggagcggcattgtctgcaacagcgtaggaagtctgtgccaggcccagggaaccgcacgtgcactggcactagtaagagataccagctgtgtcgcgttcaggaatgcccacccgacggaaggagcttccgcgaagaacagtgtgtgtcttttaactcccatgtgtacaatggtaggacccaccagtggaagcctctgtatcccgatgactacgttcacataagcagcaaaccgtgcgacctgcactgcacgaccgtagacggacaaagacagctgatggtgccagcgagggatgggacgagctgcaagctgacggacctacggggtgtctgcgtgtccggcaagtgcgaacctattgggtgtgacggggtgctgttttcaacacacactctggacaaatgcggcatctgtcagggcgacggctcatcctgtactcacgttaccggcaactaccgcaaaggaaatgcccaccttgggtattcccttgtgacccacatccctgcaggcgcacgcgatatccagatagtggagaggaagaagtccgcagatgtgttagctttagcagacgaagctgggtactacttcttcaatgggaattataaagtggatagccccaagaatttcaatatagctggaacagtggtaaagtaccgcaggcctatggatgtatacgagaccggcattgaatatattgtggctcaggggcctaccaatcaggggctcaatgtgatggtttggaatcagaacggcaagtcaccatctataacattcgagtatacactcctgcagcccccacacgaaagccgcccacaacctatctattatggattctcagagtccgccgagagccaaggacttgatggggctggtcttatgggcttcgtgccgcacaatggctccctctacggccaagcctcgtctgagcgcctggggcttgataaccggctgttcggccaccccggtctggacatggagctgggtccctcccaagggcaggaaactaatgaagtatgcgaacaggccggaggtggtgcctgcgagggaccaccacgcggaaagggattcagggaccgcaacgtcactgggactccactgactggcgacaaggatgacgaagaggtcgacacccacttcgcctctcaggagtttttcagcgctaatgcgatctcagaccagttgctgggggcaggctctgatctgaaggacttcactctgaatgaaactgtgaattctattttcgcccagggcgcaccacgcagctctttggccgaaagcttcttcgtggactacgaggagaacgagggtgcagggccttaccttctaaacggtagttacctcgaactgagctcagatcgcgttgccaattcttcatccgaagccccattccccaatgtgtcaacatctctactcacatcagccggaaatagaactcataaggctaggacaaggcctaaggcccgtaaacagggtgtgagccctgccgatatgtatagatggaagctctcgtcccacgagccctgcagtgctacctgcacaacaggagtgatgtccgcgtacgctatgtgtgttagatacgatggagtagaggttgatgattcctattgtgatgccctcactagacccgagcccgttcacgagttctgtgcgggaagggagtgccaaccacggtgggagacaagctcttggagcgaatgcagccgcacgtgtggtgaggggtaccagtttagagtggttcggtgttggaagatgctgtctcctggatttgattcttccgtatacagtgatctatgcgaagcagccgaggccgtgagaccagaggaacggaaaacatgtcgaaatccagcctgcggccctcagtgggaaatgagcgaatggagtgaatgcaccgcaaagtgtggggagcgcagtgtagtcactagggacatcagatgtagtgaagacgagaagctctgtgatcctaacacacgcccagtgggtgaaaaaaattgcacaggtccaccatgcgacagacaatggacagtgtccgattggggcccatgcagcggatcctgtggccaaggaaggaccatcaggcacgtgtattgcaagaccagcgatgggcgtgtggtaccggaatcccagtgccagatggaaacaaaacctctcgctattcacccatgtggcgacaaaaattgccccgcacattggctggcacaggattgggaaaggtgtaatactacatgcggcagaggagttaaaaagagactggtgttgtgcatggagctggccaatggcaagccccagacacggagcggtccagagtgtggcctcgccaagaagccacccgaggaaagcacctgtttcgagcgcccatgttttaaatggtataccagcccatggagcgagtgcaccaaaacatgtggcgtgggagtgcgcatgagagatgtcaagtgttatcaggggacggatattgttcggggttgtgatcctctcgtgaagcctgtgggaaggcaggcatgtgatttgcagccatgtcctacagaaccacccgacgactcttgccaagaccagcccggaaccaactgcgctttagcaatcaaagtcaacctgtgcggtcattggtattacagcaaggcttgctgccgtagttgtagaccaccccattcttag

SEQ ID NO: 57762 - DNA, 2856 bp, Artificial Sequence
  derived and/or modified sequence
atggacggacgctggcagtgttcttgttgggcttggtttctgctggttctggctgtcgtggcaggcgatacagtctcgaccggcagtacagataatagtccgacttccaactcgttggaaggaggcacagacgctacagctttctggtggggcgagtggactaagtggaccgcgtgctctcgcagttgtggaggaggggtgacatcccaggaacggcactgtttgcagcaaagaaggaagagtgttccaggacccggaaaccgtacctgtacgggaacttcaaagagatatcagctctgccgggttcaggagtgtccccctgatggacgctcttttcgagaggagcagtgtgtatcctttaacagccacgtctacaatggcaggacccaccagtggaagcctctctacccagacgactacgtgcatatatcctccaagccttgtgatctccattgcactaccgtggacgggcagagacagcttatggtgcccgcaagggatggcacatcgtgcaaactcacggatctgagaggagtttgcgtcagcggtaaatgtgagcctatcggatgcgacggtgtgctcttctccactcacacgttggacaagtgcggcatatgccagggcgacggttcctcttgcactcacgtcaccggtaactaccgaaagggcaatgcacatctggggtattctcttgtaacccatattcccgctggggctcgagacatacagattgtcgagagaaagaaatctgcagacgtgctggcacttgccgacgaggcaggttactatttttttaacggcaactataaggtagattctcccaaaaacttcaatatcgctggcaccgtggttaaataccgacgccctatggacgtctacgagactggaatcgagtacatcgttgcacagggacctactaatcaaggattgaacgtgatggtctggaaccagaacggcaagagcccttctatcaccttcgaatataccctccttcaaccaccacacgaatctcgaccccagccaatctactacggattttcagagtcagcagaaagccaaggacttgatggcgctggactgatgggattcgtaccccacaacggatcactttacggtcaagcttcctcagaacgtctcgggcttgacaaccgtctgtttggtcaccctggtcttgacatggagcttggcccttcccagggacaggaaaccaacgaggtgtgcgaacaggctggcggtggggcttgtgagggacccccacgagggaaaggatttcgggataggaatgtcaccggtacccctctgaccggcgataaggacgacgaagaagtggatactcactttgcctcccaggaatttttctccgccaatgccattagcgaccagctcttgggcgcaggcagcgacctgaaagactttactctcaatgagaccgtcaattctatttttgcccaaggagcacccagatctagtttggcagagagctttttcgttgactatgaggaaaacgaaggggctggcccatatttgttgaacgggtcctacctggaactgtcttccgacagggtcgccaactcatcgtctgaggcacccttccccaatgtgtcgactagcctgctcacttctgcagggaacaggacacataaggccagaacaagaccaaaagcacggaaacagggagtctctccagccgatatgtaccggtggaagctctcctcccacgagccctgcagcgccacatgcaccacaggtgtcatgagcgcctacgcaatgtgtgtgagatacgatggagttgaggtcgacgatagctactgtgatgctctgacccggcctgaaccggtccacgagttctgtgctggaagagaatgccagccgagatgggaaaccagctcctggtccgagtgctcccggacatgcggtgaggggtaccagtttagggtcgtgaggtgctggaaaatgttaagccctggattcgattcttcagtctacagcgacctgtgcgaggccgcagaagccgtacgtcccgaggaacggaagacctgcaggaaccctgcctgcggaccccagtgggagatgtctgagtggtctgagtgtaccgctaaatgtggagagcgtagtgtcgtgacaagagacatcagatgtagtgaagatgagaagctgtgcgatcccaatactaggccagttggcgagaagaactgtaccgggccaccctgtgacaggcagtggacagttagcgactggggaccatgcagcggaagctgcggacagggccgaacaatccgccacgtatattgcaagactagtgatgggagagtggtccccgagagtcagtgtcaaatggagactaagcctcttgctattcacccgtgcggcgacaaaaactgtcccgctcactggcttgcccaggattgggagcgctgcaacacaacttgcgggaggggggtaaaaaagcgccttgttctctgtatggaattggcgaatggaaagccccagactcgctcggggcctgaatgtggcctggcaaagaagccacctgaggagtctacctgcttcgagcgcccttgtttcaaatggtacacgtccccatggtctgaatgtactaagacctgtggcgtgggcgtgaggatgcgggatgtgaagtgttatcagggaacagacatcgtgaggggatgcgatcctttggtgaagcctgtgggaagacaagcctgtgaccttcagccctgccccacggagccacctgacgactcatgccaagaccagcctggtaccaactgtgcacttgctattaaagtgaatctatgtggacattggtattactccaaagcctgctgtcgcagctgtcgaccaccacacagctag

SEQ ID NO: 57763 - DNA, 2856 bp, Artificial Sequence
  derived and/or modified sequence
atggacggcagatggcagtgcagctgctgggcctggttcctgctggtgctggccgtggtggccggcgacaccgtgagcaccggcagcaccgacaacagccccaccagcaacagcctggagggcggcaccgacgccaccgccttctggtggggcgagtggaccaagtggaccgcctgcagcagaagctgcggcggcggcgtgaccagccaggagagacactgcctgcagcagagaagaaagagcgtgcccggccccggcaacagaacctgcaccggcaccagcaagagataccagctgtgcagagtgcaggagtgcccccccgacggcagaagcttcagagaggagcagtgcgtgagcttcaacagccacgtgtacaacggcagaacccaccagtggaagcccctgtaccccgacgactacgtgcacatcagcagcaagccctgcgacctgcactgcaccaccgtggacggccagagacagctgatggtgcccgccagagacggcaccagctgcaagctgaccgacctgagaggcgtgtgcgtgagcggcaagtgcgagcccatcggctgcgacggcgtgctgttcagcacccacaccctggacaagtgcggcatctgccagggcgacggcagcagctgcacccacgtgaccggcaactacagaaagggcaacgcccacctgggctacagcctggtgacccacatccccgccggcgccagagacatccagatcgtggagagaaagaagagcgccgacgtgctggccctggccgacgaggccggctactacttcttcaacggcaactacaaggtggacagccccaagaacttcaacatcgccggcaccgtggtgaagtacagaagacccatggacgtgtacgagaccggcatcgagtacatcgtggcccagggccccaccaaccagggcctgaacgtgatggtgtggaaccagaacggcaagagccccagcatcaccttcgagtacaccctgctgcagcccccccacgagagcagaccccagcccatctactacggcttcagcgagagcgccgagagccagggcctggacggcgccggcctgatgggcttcgtgccccacaacggcagcctgtacggccaggccagcagcgagagactgggcctggacaacagactgttcggccaccccggcctggacatggagctgggccccagccagggccaggagaccaacgaggtgtgcgagcaggccggcggcggcgcctgcgagggcccccccagaggcaagggcttcagagacagaaacgtgaccggcacccccctgaccggcgacaaggacgacgaggaggtggacacccacttcgccagccaggagttcttcagcgccaacgccatcagcgaccagctgctgggcgccggcagcgacctgaaggacttcaccctgaacgagaccgtgaacagcatcttcgcccagggcgcccccagaagcagcctggccgagagcttcttcgtggactacgaggagaacgagggcgccggcccctacctgctgaacggcagctacctggagctgagcagcgacagagtggccaacagcagcagcgaggcccccttccccaacgtgagcaccagcctgctgaccagcgccggcaacagaacccacaaggccagaaccagacccaaggccagaaagcagggcgtgagccccgccgacatgtacagatggaagctgagcagccacgagccctgcagcgccacctgcaccaccggcgtgatgagcgcctacgccatgtgcgtgagatacgacggcgtggaggtggacgacagctactgcgacgccctgaccagacccgagcccgtgcacgagttctgcgccggcagagagtgccagcccagatgggagaccagcagctggagcgagtgcagcagaacctgcggcgagggctaccagttcagagtggtgagatgctggaagatgctgagccccggcttcgacagcagcgtgtacagcgacctgtgcgaggccgccgaggccgtgagacccgaggagagaaagacctgcagaaaccccgcctgcggcccccagtgggagatgagcgagtggagcgagtgcaccgccaagtgcggcgagagaagcgtggtgaccagagacatcagatgcagcgaggacgagaagctgtgcgaccccaacaccagacccgtgggcgagaagaactgcaccggccccccctgcgacagacagtggaccgtgagcgactggggcccctgcagcggcagctgcggccagggcagaaccatcagacacgtgtactgcaagaccagcgacggcagagtggtgcccgagagccagtgccagatggagaccaagcccctggccatccacccctgcggcgacaagaactgccccgcccactggctggcccaggactgggagagatgcaacaccacctgcggcagaggcgtgaagaagagactggtgctgtgcatggagctggccaacggcaagccccagaccagaagcggccccgagtgcggcctggccaagaagccccccgaggagagcacctgcttcgagagaccctgcttcaagtggtacaccagcccctggagcgagtgcaccaagacctgcggcgtgggcgtgagaatgagagacgtgaagtgctaccagggcaccgacatcgtgagaggctgcgaccccctggtgaagcccgtgggcagacaggcctgcgacctgcagccctgccccaccgagccccccgacgacagctgccaggaccagcccggcaccaactgcgccctggccatcaaggtgaacctgtgcggccactggtactacagcaaggcctgctgcagaagctgcagacccccccacagctag

SEQ ID NO: 57764 - protein, 359 aa, Artificial Sequence
  derived and/or modified sequence
MRMDSLTEEKLECRLWCCLSDPSPPGLAARCCVLERSIVPSLRQESYPSSSPIWFVDSEDPNLTSVLERLEDTKNNNLLRQQLKWLICELCSLYNLPKHLDVEMLDQPLPTGQNGTTEEVTSEEEEEEEEMAEDIEDLDHYEMKEEEPISGKKSEDEGIEKENLAILEKIRKTQRQDHLNGAVSGSVQASDRLMKELRDIYRSQSYKTGIYSVELINDSLYDWHVKLQKVDPDSPLHSDLQILKEKEGIEYILLNFSFKDNFPFDPPFVRVVLPVLSGGYVLGGGALCMELLTKQGWSSAYSIESVIMQINATLVKGKARVQFGANKNQYNLARAQQSYNSIVQIHEKNGWYTPPKEDG

SEQ ID NO: 57765 - DNA, 1080 bp, Artificial Sequence
  derived and/or modified sequence
atgagaatggacagcctgaccgaggagaagctggagtgcagactgtggtgctgcctgagcgaccccagcccccccggcctggccgccagatgctgcgtgctggagagaagcatcgtgcccagcctgagacaggagagctaccccagcagcagccccatctggttcgtggacagcgaggaccccaacctgaccagcgtgctggagagactggaggacaccaagaacaacaacctgctgagacagcagctgaagtggctgatctgcgagctgtgcagcctgtacaacctgcccaagcacctggacgtggagatgctggaccagcccctgcccaccggccagaacggcaccaccgaggaggtgaccagcgaggaggaggaggaggaggaggagatggccgaggacatcgaggacctggaccactacgagatgaaggaggaggagcccatcagcggcaagaagagcgaggacgagggcatcgagaaggagaacctggccatcctggagaagatcagaaagacccagagacaggaccacctgaacggcgccgtgagcggcagcgtgcaggccagcgacagactgatgaaggagctgagagacatctacagaagccagagctacaagaccggcatctacagcgtggagctgatcaacgacagcctgtacgactggcacgtgaagctgcagaaggtggaccccgacagccccctgcacagcgacctgcagatcctgaaggagaaggagggcatcgagtacatcctgctgaacttcagcttcaaggacaacttccccttcgacccccccttcgtgagagtggtgctgcccgtgctgagcggcggctacgtgctgggcggcggcgccctgtgcatggagctgctgaccaagcagggctggagcagcgcctacagcatcgagagcgtgatcatgcagatcaacgccaccctggtgaagggcaaggccagagtgcagttcggcgccaacaagaaccagtacaacctggccagagcccagcagagctacaacagcatcgtgcagatccacgagaagaacggctggtacaccccccccaaggaggacggctag

SEQ ID NO: 57766 - DNA, 1080 bp, Artificial Sequence
  derived and/or modified sequence
atgcgaatggatagcctaactgaggaaaagctggaatgccggttgtggtgttgtctctcagatccttccccgcccgggctggcagctcggtgctgcgtcttggagcgaagcattgtcccttcactcaggcaggagagctatcctagcagctcccccatctggtttgtcgattctgaagatcccaacttgacaagcgtgctggagcgtctggaagacaccaagaataacaatctcttacgccagcagctcaagtggctgatttgtgagctgtgcagcctgtacaatctacccaagcacctggacgtcgaaatgctggatcagccattaccgacagggcagaacggtaccaccgaagaggtgacatccgaggaagaagaggaagaggaggagatggctgaggacatcgaggatcttgaccattatgagatgaaggaggaggaaccgataagcgggaaaaagtctgaagacgagggcatagagaaagagaatttggccattctggaaaagatacggaaaacgcagcggcaggatcatctcaacggagccgtgtcgggctcggtgcaggccagcgatcggctgatgaaggagctgagagatatctatcgctcccaatcatataaaacaggaatttactcggtagagttaatcaacgactctctttatgactggcacgtgaagcttcagaaggttgatccagatagcccactgcattctgacctgcagatacttaaggaaaaggaaggaatcgagtacattctgcttaatttttcgttcaaggacaactttccgtttgaccctccatttgtgagagtggtgctgcctgtgttgagtggcggatacgtcctgggcggaggagccctttgcatggagctcttaacgaagcaggggtggtcttcggcctacagcatagagagcgtgatcatgcaaattaacgccaccctagttaaaggtaaggctcgcgtccagttcggcgcaaataaaaatcagtataatctggcccgcgcccagcagtcttataactctattgtccaaatccatgaaaagaatggctggtacacgccccccaaggaggacggatag

SEQ ID NO: 57767 - DNA, 1080 bp, Artificial Sequence
  derived and/or modified sequence
atgagaatggacagcctgaccgaagagaagctcgagtgcagactatggtgctgcttgtcagatccctccccccccgggctggcagcaaggtgctgcgtcctggaaaggtctatagttccctccttgcgccaggagagttatccaagctcatccccaatctggtttgtggatagtgaggatcctaatctcacctctgtgctggagcggctggaggataccaagaataacaacttgttgcggcagcaactaaaatggctgatatgcgagctgtgttctctgtataacttacccaaacacctcgacgtggagatgctggaccagcccttgcctaccggacaaaacgggactactgaggaggtcaccagtgaagaagaagaggaagaagaagagatggctgaggatatagaagaccttgaccactatgagatgaaagaggaagagcccatcagcggtaaaaaatccgaggatgaggggattgaaaaagaaaatttggcaatcttagagaaaatccgcaaaacccagaggcaggaccacctgaacggagctgtaagcggcagcgtgcaggccagtgataggctgatgaaagagctcagagacatttacaggagccagagctataagactggcatttattccgtagagctgatcaatgacagcttgtatgattggcacgtcaaattgcagaaagtcgaccccgactctccattgcacagcgacctccaaattctaaaggagaaggagggtattgagtatatcctgctgaacttctcctttaaagacaacttccccttcgacccccctttcgtgcgagtggtcctgccagtgctgtcggggggctatgtactcggcgggggcgccctgtgcatggagttgctgaccaaacagggctggagcagcgcctacagtatagagtcggtgatcatgcagattaatgctacgttggtgaagggaaaagcaagggtgcagttcggagccaataagaaccagtacaaccttgctcgggcccaacaaagttacaactccattgtgcagatccacgagaagaacggctggtacactccgcccaaagaggacggatag

SEQ ID NO: 57768 - DNA, 1080 bp, Artificial Sequence
  derived and/or modified sequence
atgaggatggacagcctgacagaggagaagctggagtgccgcctgtggtgctgcctgagtgaccccagccccccaggcctggccgcccgctgctgcgtgctggagaggagcatcgtgcccagcctgcggcaggagagctaccccagcagcagccccatctggtttgtggacagcgaggaccccaacctgacctctgtgctggagcggctggaggacaccaagaacaacaacctgctgcggcagcagctgaagtggctgatctgtgagctgtgcagcctgtacaacctgcccaagcacctggatgtggagatgctggaccagcccctgcccaccggccagaatggcaccacagaggaggtgaccagcgaggaggaggaggaggaggaggagatggctgaagatattgaggacctggaccactatgagatgaaggaggaggagcccatcagcggcaagaagtcagaagatgagggcatcgagaaggagaacctggccatcctggagaagatcaggaagacccagaggcaggaccacctgaatggagctgtgtctggctctgtgcaggccagtgaccggctgatgaaggagctgcgggacatctaccgcagccagagctacaagacaggcatctacagcgtggagctgatcaatgacagcctgtatgactggcacgtgaagctgcagaaggtggaccctgacagccccctgcacagcgacctgcagatcctgaaggagaaggagggcatcgagtacatcctgctgaacttctccttcaaggacaacttcccctttgaccccccatttgtgcgggtggtgctgcctgtgctgagcggcggctacgtgctgggcggcggggccctgtgcatggagctgctgaccaagcagggctggagcagcgcctacagcattgaatctgtcatcatgcagatcaatgccaccctggtgaagggcaaggcccgggtgcagtttggagccaacaagaaccagtacaacctggcccgggcccagcagagctacaacagcatcgtgcagatccacgagaagaatggctggtacaccccacccaaggaggatggatag

SEQ ID NO: 57769 - DNA, 1080 bp, Artificial Sequence
  derived and/or modified sequence
atgcggatggacagcctgaccgaggagaagctggagtgccggctgtggtgttgcttgagcgatccctctccacctggtctggctgcaagatgctgtgtgctggagagatcaattgtcccatccctgcgacaggagtcgtatccatcttctagtcccatatggtttgtggactctgaagaccccaacctcacgtctgttctggagcgccttgaagatacaaagaataacaacttacttaggcagcagctgaagtggcttatctgcgaattgtgcagcctgtataaccttccgaaacatctggacgtagagatgctggaccaacctctgcccacaggtcagaacggcacaactgaggaggtcacctccgaggaagaagaggaggaagaagaaatggctgaagacatagaggacctggatcactacgagatgaaggaggaagaaccgataagcgggaaaaaatcagaagatgagggaatcgaaaaggaaaacctggctatactggagaagatccgcaagacacagagacaggaccacttgaatggggcggtaagtggaagcgtgcaggcttccgaccgactcatgaaagagcttcgggatatctaccggagtcaaagctacaagactggcatctattccgtggagttaatcaacgacagcttatacgactggcatgtaaagttacagaaagtcgatccagatagccctctgcacagcgatcttcagatcttaaaggagaaagaaggtatcgagtacattttgttgaacttcagctttaaggataattttcctttcgatccgcccttcgttcgggtcgtgctgcccgtcctttcaggtggatacgtacttgggggaggcgccctgtgtatggagctgctgaccaagcaagggtggtctagtgcttatagcatagagagcgtaattatgcagattaacgccaccctggttaaaggtaaggcaagagtccagttcggggccaataagaaccagtacaatctcgcgcgggcgcaacagtcctacaacagcatcgtccagatccacgaaaagaatggatggtacacacccccaaaagaagacggctag

SEQ ID NO: 57770 - DNA, 1080 bp, Artificial Sequence
  derived and/or modified sequence
atgcggatggacagcctgaccgaggagaagctggagtgccggctgtggtgctgccttagcgacccctcaccacccgggttagccgctaggtgttgtgtgttggaaagatcaatcgtgccgtctctgcgacaagagtcttatccatcttccagcccgatttggttcgtggatagcgaagatcccaacctgaccagcgtcctcgagaggctggaggacaccaagaataataatctgctgcgccaacagctcaaatggctgatttgtgagctctgcagtctgtacaacctgccgaagcatctggatgttgagatgttggatcaaccccttcccaccgggcaaaacggcacaactgaggaggtgacgtccgaggaggaggaggaggaagaggaaatggcagaagatatagaggacctcgaccattacgaaatgaaagaagaggagcccatcagtggtaagaagtcagaagatgaagggatcgagaaggaaaaccttgccatcctggagaagatccgcaagacacagaggcaggatcatcttaacggtgcagtgagcgggagcgtacaagcctcggacagacttatgaaggagctgcgagacatctacagatcccagtcttacaagaccggtatatatagcgtggagcttatcaacgactctctatacgactggcatgttaaactgcagaaagtagatccggactctccactccactcagatctgcagatcctgaaggagaaggagggcatagagtatatcttgctgaacttctcatttaaagacaactttccctttgatccacctttcgtacgggtggtcctgcctgtgctgtcagggggctatgttctcggtggcggcgcactgtgcatggagttgcttacgaaacaggggtggagttccgcttattccattgaatcagtcattatgcaaatcaacgcaacacttgtaaaaggaaaagctagagtccagttcggagccaataagaatcagtataacctggccagagcccagcaatcttacaatagtatcgtgcagattcacgagaaaaatgggtggtacaccccgcctaaagaggatgggtag

SEQ ID NO: 57771 - DNA, 1080 bp, Artificial Sequence
  derived and/or modified sequence
atgcgtatggactccctaacagaagaaaaactggaatgccggctttggtgctgtctatctgatccatcccctcccggactggccgctcgctgctgcgtcctggaacgatcaatcgtgccctcattaaggcaggagtcctacccctcttcaagcccgatctggtttgtggactctgaggacccaaatctaaccagcgtgctcgaacgtctggaggataccaagaataacaatctgctgcgacagcaactgaaatggttgatttgcgaactgtgttctctgtacaatttgcccaagcatcttgacgtcgaaatgctggatcagcccttgcccacgggacagaacggcaccaccgaggaagtgacgtcagaggaggaggaggaggaagaggaaatggctgaagacattgaggatctggaccattatgaaatgaaggaggaagagcccatctcaggaaagaagtccgaggacgaaggaattgaaaaggagaatctggctatactggaaaagattaggaagacacaacggcaggaccaccttaatggtgccgtgagtgggagcgtgcaggctagcgatcgcttgatgaaagagctcagggacatttatcgttcacagtcctataaaaccggtatctacagcgtggagcttatcaacgacagcctttacgattggcatgtaaagttacagaaagttgacccagacagtcctctccatagtgatcttcagattctgaaggaaaaggaagggattgagtatattctgcttaacttctctttcaaggacaattttccgttcgatcctccctttgtccgggtcgtgctccctgtactctcagggggatatgtattgggtgggggagccttgtgcatggagctgcttactaagcaggggtggtctagtgcctatagtatcgagtccgtgatcatgcagatcaacgcgactctggtaaaggggaaggcccgagtgcagttcggagctaacaagaaccagtataatctggctcgagcccagcagagctacaactccatcgttcagattcatgagaagaatgggtggtatacacccccaaaagaagatggatag

SEQ ID NO: 57772 - DNA, 1080 bp, Artificial Sequence
  derived and/or modified sequence
atgaggatggattccctgaccgaagaaaagttggagtgccgtttatggtgctgtttgtctgatccgtcgccccctggcttagctgctcggtgctgtgtgctggagcgctcgattgtgccgtctctcagacaggaatcctatccgtcatccagccctatttggttcgtagactctgaggatcccaatctgacatccgtcctggaaagattagaggacacaaagaacaataatctgttaaggcagcaactgaagtggctgatatgcgaactctgtagcctgtacaaccttcccaagcatcttgacgtcgaaatgttggatcaacccctgccgacagggcagaacggaactaccgaggaggtcactagtgaggaagaagaggaagaggaggaaatggccgaggatatcgaggatttagatcattacgagatgaaagaggaagaacctataagtgggaagaagtccgaggacgaggggatcgaaaaggagaatttggccattctggaaaagatccgtaagacacagaggcaagatcacctgaatggcgcagtgtccgggtccgtgcaagcttcagataggctgatgaaggagttaagagacatctaccgctctcagtcctacaagaccggaatctactcagtagagcttatcaatgactctctgtacgattggcatgtgaaactgcagaaggtcgatcccgatagccctctgcactccgatctgcaaatattgaaagagaaggaagggatcgaatacattttacttaactttagtttcaaagacaatttcccctttgaccctcctttcgttagggttgtcctgccggtgctgtccggtggatacgtgctggggggaggggcactgtgcatggaattacttaccaaacagggctggagcagcgcctattcaatcgaatctgtgattatgcagatcaatgcaaccctggtcaagggcaaggctagagttcagtttggcgctaacaagaaccagtacaaccttgccagggcccaacagagctataatagcatagtgcagatccatgagaaaaacgggtggtatactcctcccaaggaagacggctag

SEQ ID NO: 57773 - DNA, 2971 bp, Artificial Sequence
  derived and/or modified sequence
gcgtctttccggcttctcgccaggggctggcttgggggcttctggcccatctcggtccccgtctcctagccccgaggggggagtccgcggcggcccaagcccttgtggggtccatggccgccctcagccggcctgctcccgggaccggggcggggcggggcggggcggcgcagctccggctgttgtttgagcccaggccggcaaggggaacggcccttaagttttaacgcctcatttttcagtcggattttccttcttcccgcttgttcagccaattgtttttaagtttgcgtttaaggagaaactgacaatgagaatggactcgttgacggaggaaaagttggaatgcagactctggtgctgtttgagcgacccctctcccccgggcctggctgcgcgctgctgtgttctggaaaggagcatagtaccgtcgttgcggcaggaatcctatccatcttcttcaccgatatggtttgtggattctgaagacccaaatctgacatcagttctggaacgtctagaagatactaagaacaacaatttgcttcgtcagcaattgaagtggttgatatgtgaactctgcagtttatataaccttcctaagcacctggatgttgagatgctagatcaaccactacccacgggtcagaatgggacaacagaagaagtgacttcagaagaagaggaagaagaagaagagatggctgaagatatagaagacttagatcactatgagatgaaggaagaagagcctattagtgggaaaaagtcagaggatgaaggaattgaaaaagaaaatttggcaatattagagaaaattaggaagactcaaaggcaagaccatttaaatggtgcagtgtctgggtcagtgcaagcttcagatagacttatgaaagagctcagggacatatacagatcacagagttataaaacagggatttattcagtggaactcataaatgacagtttatatgactggcatgttaaactgcagaaggttgaccctgatagtcctttgcacagtgatcttcagatcttaaaagaaaaagaaggcatagaatatattttgcttaacttctcttttaaggataactttccatttgatcctccatttgttcgagtggtgttacctgttctctcaggagggtatgtattgggtggaggagcattatgtatggaacttctcacaaaacagggctggagcagtgcctactcaatagaatcggtcatcatgcaaataaatgccaccttagtcaaaggcaaagccagagtgcagtttggagcaaataagaatcaatataatctagcaagagcccaacaatcctataattccattgtacagatacatgagaaaaatggctggtacacccctccaaaggaagatggctaaatgtgttgactgttgtatgtttggactaatgttgctttaaagaaaatctttctaacatgcagacaaaagctttgagtgcccctattacagcagtaccgaagatgttagttaatagatattttagtggataatctgtcatctgacatccagtataagttacagcctttgcattttgctcattttagatatcttggactgagcagtggggcctttactgtatttttcctgataaatacacatactggccactccttatctctttttcttgaaaagtgaactttttaaagcagccaagtcaacatcaggctactgaagttgaggctttagggtaactttcctatattgagcccatgggttacaaggatttgcaatatattgttccatttacagccaatacaggtttaatcgatgttcaatattggtttaggaaatttaaggccttctaaatcataatagctctttcatgtctaaaaccattttatgatattgccaaaatgtgataggaaacctactcattaaattgttaaactttttaatgactatgtgaagatatgaattgtttcctgaagataatactcttaattgagttgtattgtacttcttaggcaaagcagtgtaaaactgtatcaattaaggcttgtgagtagtgatttccactggggcatcagagtcttggctgggctgaatctgctgcttgttggttcagtgtttcttatgaacaagagccacagtacagagcttcaagttatttaaaatactaagtcatcttacgtttccattttattaacgggatgttgcaatcgtttgtaaactaataaacttataaagtgattggcacaaagactccttgagcaaaagctgtgcagttaagtacaaaaagatacttaatttggagactcttacagtaatttttgccatgtcaaaacaatggcttttacattgaaagattaatagaaactctacatatgttaatttttttatagaacctgactcaaatcaaggtactctccattttattgccttacctgaatcagtcctttttggttggtaatagatttttttatacacccacgtttgatttaaaagtaaattctagttcttaagcacttttaacaaatccagaagcacatttttctgcacaaacaagttacaaagttcaaaagtgtttcttgtgcattagctttgagattcagtttttaactttgtaaaccacatctgagagacttgtcatttctacattgtgtgtgtttaatttcttttgattccattttggttaagagagcagtaaatagattttctggtattcttgttcacttgattacatttgtataaagttctgattgccagttgctcagataacaagtgacaaggcagaattctttaaatcagtaaagttccttaagcctaaggctaaatcttgaatacattgttgaattctttaatatcctgatggcaagcagactgatagctgcacatttggcatgctttgtttaatggattttatttttaattgcagatttatttggcaatgtacagtaaattttgtaaacttgcatcaagtttatgaataaagaaccattt

SEQ ID NO: 57774 - DNA, 1582 bp, Artificial Sequence
  derived and/or modified sequence
gcgtctttccggcttctcgccaggggctggcttgggggcttctggcccatctcggtccccgtctcctagccccgaggggggagtccgcggcggcccaagcccttgtggggtccatggccgccctcagccggcctgctcccgggaccggggcggggcggggcggggcggcgcagctccggctgttgtttgagcccaggccggcaaggggaacggcccttaagttttaacgcctcatttttcagtcggattttccttcttcccgcttgttcagccaattgtttttaagtttgcgtttaaggagaaactgacaatgagaatggactcgttgacggaggaaaagttggaatgcagactctggtgctgtttgagcgacccctctcccccgggcctggctgcgcgctgctgtgttctggaaaggagcatagtaccgtcgttgcggcaggaatcctatccatcttcttcaccgatatggtttgtggattctgaagacccaaatctgacatcagttctggaacgtctagaagatactaagaacaacaatttgcttcgtcagcaattgaagtggttgatatgtgaactctgcagtttatataaccttcctaagcacctggatgttgagatgctagatcaaccactacccacgggtcagaatgggacaacagaagaagtgacttcagaagaagaggaagaagaagaagagatggctgaagatatagaagacttagatcactatgagatgaaggaagaagagcctattagtgggaaaaagtcagaggatgaaggaattgaaaaagaaaatttggcaatattagagaaaattaggaagactcaaaggcaagaccatttaaatggtgcagtgtctgggtcagtgcaagcttcagatagacttatgaaagagctcagggacatatacagatcacagagttataaaacagggatttattcagtggaactcataaatgacagtttatatgactggcatgttaaactgcagaaggttgaccctgatagtcctttgcacagtgatcttcagatcttaaaagaaaaagaaggcatagaatatattttgcttaacttctcttttaaggataactttccatttgatcctccatttgttcgagtggtgttacctgttctctcaggagggtatgtattgggtggaggagcattatgtatggaacttctcacaaaacagggctggagcagtgcctactcaatagaatcggtcatcatgcaaataaatgccaccttagtcaaaggcaaagccagagtgcagtttggagcaaataagaatcaatataatctagcaagagcccaacaatcctataattccattgtacagatacatgagaaaaatggctggtacacccctccaaaggaagatggctaaatgtgttgactgttgtatgtttggactaatgttgctttaaagaaaatctttctaacatgcagacaaaagctttgagtgcccctattacagcagtaccgaagatgttagttaatagatattttagtggataatctgtcatctgacatccagtataagttacagcctttgcattttgctcattttagatatctt

SEQ ID NO: 57775 - protein, 256 aa, Artificial Sequence
  derived and/or modified sequence
MCNTNMSVPTDGAVTTSQIPASEQETLVRPKPLLLKLLKSVGAQKDTYTMKEVLFYLGQYIMTKRLYDEKQQHIVYCSNDLLGDLFGVPSFSVKEHRKIYTMIYRNLVVVNQQESSDSGTSVSENRCHLEGGSDQKDLVQELQEEKPSSSHLVSRPSTSSRRRAISETEENSDELSGERQRKRHKSDSISLSFDESLALCVIREICCERSSSSESTGTPSNPDLLLGVYQVTVYQAGESDTDSFEEDPEISLAHYL

SEQ ID NO: 57776 - protein, 256 aa, Artificial Sequence
  derived and/or modified sequence
MCNTNMSVPTDGAVTTSQIPASEQETLVRPKPLLLKLLKSVGAQKDTYTMKEVLFYLGQYIMTKRLYDEKQQHIVYCSNDLLGDLFGVPSFSVKEHRKIYTMIYRNLVVVNQQESSDSGTSVSENRCHLEGGSDQKDLVQELQEEKPSSSHLVSRPSTSSRRRAISETEENSDELSGERQRKRHKSDSISLSFDESLALCVIREICCERSSSSESTGTPSNPDLDAGVYQVTVYQAGESDTDSFEEDPEISLADYW

SEQ ID NO: 57777 - DNA, 771 bp, Artificial Sequence
  derived and/or modified sequence
atgtgcaacaccaacatgagcgtgcccaccgacggcgccgtgaccaccagccagatccccgccagcgagcaggagaccctggtgagacccaagcccctgctgctgaagctgctgaagagcgtgggcgcccagaaggacacctacaccatgaaggaggtgctgttctacctgggccagtacatcatgaccaagagactgtacgacgagaagcagcagcacatcgtgtactgcagcaacgacctgctgggcgacctgttcggcgtgcccagcttcagcgtgaaggagcacagaaagatctacaccatgatctacagaaacctggtggtggtgaaccagcaggagagcagcgacagcggcaccagcgtgagcgagaacagatgccacctggagggcggcagcgaccagaaggacctggtgcaggagctgcaggaggagaagcccagcagcagccacctggtgagcagacccagcaccagcagcagaagaagagccatcagcgagaccgaggagaacagcgacgagctgagcggcgagagacagagaaagagacacaagagcgacagcatcagcctgagcttcgacgagagcctggccctgtgcgtgatcagagagatctgctgcgagagaagcagcagcagcgagagcaccggcacccccagcaaccccgacctgctgctgggcgtgtaccaggtgaccgtgtaccaggccggcgagagcgacaccgacagcttcgaggaggaccccgagatcagcctggcccactacctgtag

SEQ ID NO: 57778 - DNA, 771 bp, Artificial Sequence
  derived and/or modified sequence
atgtgcaacaccaacatgagcgtgcccaccgacggcgccgtgaccaccagccagatccccgccagcgagcaggagaccctggtgagacccaagcccctgctgctgaagctgctgaagagcgtgggcgcccagaaggacacctacaccatgaaggaggtgctgttctacctgggccagtacatcatgaccaagagactgtacgacgagaagcagcagcacatcgtgtactgcagcaacgacctgctgggcgacctgttcggcgtgcccagcttcagcgtgaaggagcacagaaagatctacaccatgatctacagaaacctggtggtggtgaaccagcaggagagcagcgacagcggcaccagcgtgagcgagaacagatgccacctggagggcggcagcgaccagaaggacctggtgcaggagctgcaggaggagaagcccagcagcagccacctggtgagcagacccagcaccagcagcagaagaagagccatcagcgagaccgaggagaacagcgacgagctgagcggcgagagacagagaaagagacacaagagcgacagcatcagcctgagcttcgacgagagcctggccctgtgcgtgatcagagagatctgctgcgagagaagcagcagcagcgagagcaccggcacccccagcaaccccgacctggacgccggcgtgtaccaggtgaccgtgtaccaggccggcgagagcgacaccgacagcttcgaggaggaccccgagatcagcctggccgactactggtag

SEQ ID NO: 57779 - DNA, 771 bp, Artificial Sequence
  derived and/or modified sequence
atgtgtaataccaacatgtcagtgccaacagacggggcggtgaccaccagtcaaatccccgcttcagagcaagagactctcgtgaggccaaaacccctcctactgaagctgctaaagagcgtcggtgcccagaaagatacatacactatgaaagaggtgctgttctatctgggccagtacattatgaccaaacgactttacgacgagaaacagcagcatatcgtatactgttcaaacgatctgttgggagatctctttggagttccgagcttctctgtgaaggaacaccgcaaaatctatactatgatttaccgaaatctcgtagtggtaaatcagcaggagagttccgatagtggcacctccgtttcggagaataggtgtcatctcgaaggtggaagcgatcagaaggacctggtgcaagagctccaggaggaaaagccctcctccagccatcttgtgtctcgcccttccaccagtagcaggaggcgggctatatccgagaccgaagagaactctgatgagctcagtggcgagcgacaaagaaagcgacataagagcgatagcatttctctttccttcgacgagagtctcgcgctctgtgtgattcgggaaatatgctgcgagcgatcttcgagttctgaaagcaccggaactccctcgaaccccgatttgttgcttggggtgtaccaagtaactgtgtaccaagccggagagtcagacacggacagtttcgaggaggatcccgaaattagcttggcacattacctctag

SEQ ID NO: 57780 - DNA, 771 bp, Artificial Sequence
  derived and/or modified sequence
atgtgcaatactaacatgtcagtgcccaccgacggggccgtaaccacctctcagataccagctagtgaacaggagacgctggtgcgcccaaaaccactgttactgaaactgttaaaatctgtcggtgctcagaaggacacttacaccatgaaggaagtgttattctatctgggtcagtacataatgacaaagagactctacgacgagaagcagcaacatatcgtctattgcagcaacgacctgttaggagacctgttcggcgtgcccagtttttctgtgaaggagcatcgaaaaatctacactatgatctaccgcaatcttgtcgtggtgaatcaacaggagtcttccgactctgggacatcagttagcgagaaccgttgccacctcgagggcggttctgaccaaaaagacctcgtgcaggagctgcaggaggagaagccgagctcttctcatttagtgtcacgcccctctacatcatcaagaagacgtgccatcagtgaaaccgaagaaaattcggatgagctatccggggaacgccagaggaaaagacataaatccgatagcatctcactctcctttgacgagtctctggctctatgcgtaattcgtgaaatctgctgtgagagaagctccagttccgagagcacaggaacaccatctaaccctgatctggacgctggcgtgtatcaagtgacggtttaccaagccggcgaatctgacacagacagcttcgaagaggaccctgagattagtttagccgattattggtag

SEQ ID NO: 57781 - DNA, 771 bp, Artificial Sequence
  derived and/or modified sequence
atgtgcaacaccaacatgtctgtgcccacagatggagctgtgaccaccagccagatcccagccagcgagcaggagaccctggtgcggcccaagcccctgctgctgaagctgctgaagtctgtgggcgcccagaaggacacctacaccatgaaggaggtgctcttctacctgggccagtacatcatgaccaagaggctgtatgatgagaagcagcagcacatcgtgtactgcagcaatgacctgctgggggacctgtttggagtgcccagcttctctgtgaaggagcacaggaagatctacaccatgatctacagaaacctggtggtggtgaaccagcaggagagcagtgacagcggcacctctgtgtctgagaaccgctgccacctggagggcggcagtgaccagaaggacctggtgcaggagctgcaggaggagaagcccagcagcagccacctggtgtcccggcccagcaccagcagcagaagaagagccatcagcgagacagaggagaacagtgatgagctgagcggggagcggcagaggaagaggcacaagagtgacagcatcagcctgagctttgatgagagcctggccctgtgtgtgatccgggagatctgctgtgagaggagcagcagcagcgagagcacaggcacccccagcaacccagacctgctgctgggcgtgtaccaggtgacagtgtaccaggccggggagagtgacacagacagctttgaggaggaccctgagatcagcctggcccactacctgtag

SEQ ID NO: 57782 - DNA, 771 bp, Artificial Sequence
  derived and/or modified sequence
atgtgcaacaccaacatgtctgtgcccacagatggagctgtgaccaccagccagatcccagccagcgagcaggagaccctggtgcggcccaagcccctgctgctgaagctgctgaagtctgtgggcgcccagaaggacacctacaccatgaaggaggtgctcttctacctgggccagtacatcatgaccaagaggctgtatgatgagaagcagcagcacatcgtgtactgcagcaatgacctgctgggggacctgtttggagtgcccagcttctctgtgaaggagcacaggaagatctacaccatgatctacagaaacctggtggtggtgaaccagcaggagagcagtgacagcggcacctctgtgtctgagaaccgctgccacctggagggcggcagtgaccagaaggacctggtgcaggagctgcaggaggagaagcccagcagcagccacctggtgtcccggcccagcaccagcagcagaagaagagccatcagcgagacagaggagaacagtgatgagctgagcggggagcggcagaggaagaggcacaagagtgacagcatcagcctgagctttgatgagagcctggccctgtgtgtgatccgggagatctgctgtgagaggagcagcagcagcgagagcacaggcacccccagcaacccagacctggatgctggggtgtaccaggtgacagtgtaccaggccggggagagtgacacagacagctttgaggaggaccctgagatcagcctggccgactactggtag

SEQ ID NO: 57783 - DNA, 1076 bp, Artificial Sequence
  derived and/or modified sequence
gcaccgcggcgagcttggctgcttctggggcctgtgtggccctgtgtgtcggaaagatggagcaagaagccgagcccgaggggcggccgcgacccctctgaccgagatcctgctgctttcgcagccaggagcaccgtccctccccggattagtgcgtacgagcgcccagtgccctggcccggagagtggaatgatccccgaggcccagggcgtcgtgcttccgcgcgccccgtgaaggaaactggggagtcttgagggacccccgactccaagcgcgaaaaccccggatggtgaggagcaggcaaatgtgcaataccaacatgtctgtacctactgatggtgctgtaaccacctcacagattccagcttcggaacaagagaccctggttagaccaaagccattgcttttgaagttattaaagtctgttggtgcacaaaaagacacttatactatgaaagaggttcttttttatcttggccagtatattatgactaaacgattatatgatgagaagcaacaacatattgtatattgttcaaatgatcttctaggagatttgtttggcgtgccaagcttctctgtgaaagagcacaggaaaatatataccatgatctacaggaacttggtagtagtcaatcagcaggaatcatcggactcaggtacatctgtgagtgagaacaggtgtcaccttgaaggtgggagtgatcaaaaggaccttgtacaagagcttcaggaagagaaaccttcatcttcacatttggtttctagaccatctacctcatctagaaggagagcaattagtgagacagaagaaaattcagatgaattatctggtgaacgacaaagaaaacgccacaaatctgatagtatttccctttcctttgatgaaagcctggctctgtgtgtaataagggagatatgttgtgaaagaagcagtagcagtgaatctacagggacgccatcgaatccggacttattactaggagtatatcaagttactgtgtatcaggcaggggagagtgatacagattcatttgaagaagatcctgaaatttccttagctcattatttatag

SEQ ID NO: 57784 - DNA, 842 bp, Artificial Sequence
  derived and/or modified sequence
tgtgttcagtggcgattggagggtagacctgtgggcacggacgcacgccactttttctctgctgatccaggcaaatgtgcaataccaacatgtctgtacctactgatggtgctgtaaccacctcacagattccagcttcggaacaagagaccctggttagaccaaagccattgcttttgaagttattaaagtctgttggtgcacaaaaagacacttatactatgaaagaggttcttttttatcttggccagtatattatgactaaacgattatatgatgagaagcaacaacatattgtatattgttcaaatgatcttctaggagatttgtttggcgtgccaagcttctctgtgaaagagcacaggaaaatatataccatgatctacaggaacttggtagtagtcaatcagcaggaatcatcggactcaggtacatctgtgagtgagaacaggtgtcaccttgaaggtgggagtgatcaaaaggaccttgtacaagagcttcaggaagagaaaccttcatcttcacatttggtttctagaccatctacctcatctagaaggagagcaattagtgagacagaagaaaattcagatgaattatctggtgaacgacaaagaaaacgccacaaatctgatagtatttccctttcctttgatgaaagcctggctctgtgtgtaataagggagatatgttgtgaaagaagcagtagcagtgaatctacagggacgccatcgaatccggatcttgatgctggtgtatatcaagttactgtgtatcaggcaggggagagtgatacagattcatttgaagaagatcctgaaatttccttagctgactattgg

SEQ ID NO: 57785 - DNA, 771 bp, Artificial Sequence
  derived and/or modified sequence
atgtgcaacaccaacatgagcgtgcccaccgacggcgccgtgaccacctctcaaattccagcatccgaacaggagacactggtccgccccaaaccccttcttctcaaattgctcaaaagcgtgggagcccagaaagatacttacacaatgaaagaggtcctgttctacttaggccagtacataatgaccaaacggttatatgatgaaaaacagcaacatatcgtctactgttctaatgatctactgggcgacctgtttggcgtgccgtcattcagcgtcaaggaacataggaagatctatactatgatctaccgtaatttggttgtggtcaaccaacaggagtcctctgacagtgggactagcgtatccgaaaataggtgccacctcgaaggaggatcagatcagaaagatctggtgcaggaacttcaggaagagaaaccatcatcctcgcatcttgttagtcgtcctagcacatcctctagacgtagggcaatttctgaaacagaggagaactccgacgaattgagtggcgaacgacaaagaaaacgtcacaagtctgatagcatttcactcagctttgacgaatctctggccctatgcgtgatcagagagatttgctgtgaacgatcctcctcctccgagtcaacaggtacaccttccaaccccgatctactccttggcgtgtaccaggtcacggtgtatcaggcgggtgagtcagacaccgactcattcgaggaagaccctgaaattagcctggcacactatctgtag

SEQ ID NO: 57786 - DNA, 771 bp, Artificial Sequence
  derived and/or modified sequence
atgtgcaacaccaacatgagcgtgcccaccgacggcgccgtgaccacaagtcagatccctgccagcgagcaggagacgctcgtgagacccaagccactccttctgaagctactgaagtctgtcggagcccagaaagatacttacacaatgaaggaagtgcttttctatctgggccagtacataatgacgaaacgactatatgacgaaaaacagcagcacatcgtctattgcagtaacgaccttctcggcgatctgttcggagttcccagtttttccgtcaaggagcacagaaaaatctacaccatgatctaccgcaacttggtggtggttaatcagcaggagagcagcgattcaggtacaagcgtgagtgagaaccgatgccacctggaaggtggcagcgatcagaaggatctggtgcaggaattacaggaggagaagcctagttcttcgcacttggtgtcacgtcccagcacatcttccagaagacgggccatcagcgaaactgaagagaactctgacgagctgtccggtgagcgccagaggaaacgtcacaagagtgattctatctctctttcattcgacgagagtttagctctgtgtgtgatacgagagatttgctgcgaacgaagttcaagtagcgaatcaacaggcacaccaagtaaccctgatctcgacgccggcgtgtaccaggtgacagtctaccaggcaggcgaatccgacactgatagtttcgaggaggatccggagatctccttagccgactactggtag

SEQ ID NO: 57787 - DNA, 771 bp, Artificial Sequence
  derived and/or modified sequence
atgtgcaacactaatatgtctgttccaacagacggcgctgtcacaaccagtcagatacctgccagcgagcaagaaaccctcgtccgccctaaacctttattactcaagcttctgaagtcagtcggcgcacagaaggacacctacaccatgaaggaagtgctattctatctcgggcaatacataatgacaaaaaggctctatgatgagaagcaacagcacatagtgtattgtagcaacgatctgctaggcgacctcttcggggtgccctcgttttccgttaaggagcaccgaaaaatctacacaatgatttacagaaacctcgttgtggttaatcagcaagaaagcagtgattccggtacctcagtgagcgagaaccgctgtcacttagagggtggcagtgatcagaaggatttggttcaagagctccaggaggaaaaacccagctcttcccatcttgtaagccgaccttccacatcaagcagaaggcgagctattagcgaaacggaggaaaactccgatgagctgtctggcgagagacaacgtaaacggcacaagagtgacagcatcagtttgagcttcgatgagtccttggccctttgtgtgatcagagaaatatgttgtgaacgatcatcctcctctgagtctacaggcaccccctctaaccctgatctcttgctgggagtgtatcaggtcacagtttaccaggctggggaatcagatactgattctttcgaagaagatcctgagatctctcttgcccactacctgtag

SEQ ID NO: 57788 - DNA, 771 bp, Artificial Sequence
  derived and/or modified sequence
atgtgtaatacaaatatgagcgtgcctactgatggagctgtaacgacctctcaaatccccgcttcagagcaggagacactggtgcggccaaagcctctgctgctgaagctgctaaagagtgtgggcgctcaaaaggacacttacacaatgaaagaggttctgttctatctggggcagtatatcatgaccaagagactctacgatgaaaaacagcagcatattgtgtactgttccaacgatctgctgggcgacctttttggcgtgcctagctttagcgtgaaagagcacaggaaaatctacaccatgatctaccgtaacttggtggtcgttaatcaacaggagagctcagattctggaacaagcgtctctgagaatcggtgtcacctcgagggtgggtcggatcaaaaagacctagtccaagagctgcaggaagagaaaccctcatctagtcatctcgtttcgagaccctcaacaagctcaaggcgcagggcaattagcgaaactgaggagaacagtgatgagttgtccggagaaaggcagaggaagcggcataagtctgatagcatatcattgtctttcgatgagagtttggcgctttgtgttatccgggaaatctgttgtgagcggtcatccagttcagaatccacaggcaccccatcaaaccctgacctagacgctggagtttatcaagtgacagtgtaccaagctggcgagtcggatacagattccttcgaggaggaccctgaaatcagcctcgctgattactggtag

SEQ ID NO: 57789 - protein, 634 aa, Artificial Sequence
  derived and/or modified sequence
MEPSPLSPSGAALPLPLSLAPPPLPLPAAAVVHVSFPEVTSALLESLNQQRLQGQLCDVSIRVQGREFRAHRAVLAASSPYFHDQVLLKGMTSISLPSVMDPGAFETVLASAYTGRLSMAAADIVNFLTVGSVLQMWHIVDKCTELLREGRASATTTITTAAATSVTVPGAGVPSGSGGTVAPATMGSARSHASSRASENQSPSSSNYFSPRESTDFSSSSQEAFAASAVGSGERRGGGPVFPAPVVGSGGATSGKLLLEADELCDDGGDGRGAVVPGAGLRRPTYTPPSIMPQKHWVYVKRGGNCPAPTPLVPQDPDLEEEEEEEDLVLTCEDDEDEELGGSSRVPVGGGPEATLSISDVRTLSEPPDKGEEQVNFCESSNDFGPYEGGGPVAGLDDSGGPTPSSYAPSHPPRPLLPLDMQGNQILVFPSSSSSSSSQAPGQPPGNQAEHGAVTVGGTSVGSLGVPGSVGGVPGGTGSGDGNKIFLCHCGKAFSHKSMRDRHVNMHLNLRPFDCPVCNKKFKMKHHLTEHMKTHTGLKPYECGVCAKKFMWRDSFMRHRGHCERRHRLGGVGAVPGPGTPTGPSLPSKRESPGVGGGSGDEASAATPPSSRRVWSPPRVHKVEMGFGGGGGAN

SEQ ID NO: 57790 - protein, 149 aa, Artificial Sequence
  derived and/or modified sequence
MEPSPLSPSGAALPLPLSLAPPPLPLPAAAVVHVSFPEVTSALLESLNQQRLQGQLCDVSIRVQGREFRAHRAVLAASSPYFHDQVLLKGMTSISLPSVMDPGAFETVLASAYTGRLSMAAADIVNFLTVGSVLQMWHIVDKCTELLRE

SEQ ID NO: 57791 - protein, 634 aa, Artificial Sequence
  derived and/or modified sequence
MEPSPLSPSGAALPLPLSLAPPPLPLPAAAVVHVSFPEVTSALLESLNQQRLQGQLCDVSIRVQGREFRAHRAVLAASSPYFHDQVLLKGMTSISLPSVMDPGAFETVLASAYTGRLSMAAADIVNFLTVGSVLQMWHIVDKCTELLREGRASATTTITTAAATSVTVPGAGVPSGSGGTVAPATMGSARSHASSRASENQSPSSSNYFSPRESTDFSSSSQEAFAASAVGSGERRGGGPVFPAPVVGSGGATSGKLLLEADELCDDGGDGRGAVVPGAGLRRPTYTPPSIMPQKHWVYVKRGGNCPAPAPLVPQDPDLEEEEEEEDLVLTCEDDEDEELGGSSRVPVGGGPEATLSISDVRTLSEPPDKGEEQVNFCESSNDFGPYEGGGPVAGLDDSGGPTPSSYAPSHPPRPLLPLDMQGNQILVFPSSSSSSSSQAPGQPPGNQAEHGAVTVGGTSVGSLGVPGSVGGVPGGTGSGDGNKIFLCHCGKAFSHKSMRDRHVNMHLNLRPFDCPVCNKKFKMKHHLTEHMKTHTGLKPYECGVCAKKFMWRDSFMRHRGHCERRHRLGGVGAVPGPGTPTGPSLPSKRESPGVGGGSGDEASAATPPSSRRVWSPPRVHKVEMGFGGGGGAN

SEQ ID NO: 57792 - DNA, 2681 bp, Artificial Sequence
  derived and/or modified sequence
cgcaagatggcggcgggaggggcccaggttgctgctctggccgccgagtgaggggcggggggggcccgggggcgcgcggcccgagacccccccggccgccctcctcctttctttgttcctgtggctgggggggtatcccctccctccacaacatggagccatctcctctgtctcccagtggggcagcacttcccctgccgctgtcgctggctccgcccccactacccctgccagcagctgcagtggtacatgtgtccttccctgaggtgaccagtgccctcttggagtccctcaatcagcagcgtctgcagggccagctctgcgatgtatctatcagagtgcagggccgggagttccgggctcatcgggctgtcctggctgcctcctccccttacttccatgatcaggtcctactcaaaggcatgacctccatctcgctgcccagtgtcatggacccaggcgcctttgagactgtcctagcctccgcttacactggccgcctcagcatggctgctgctgacattgtcaacttccttacagtggggtctgtgctccaaatgtggcacattgtggacaagtgcactgaactactccgagaaggccgggcctcagctaccaccaccatcactactgctgcagccacctctgtcactgtccctggtgctggggtgccatccgggagtgggggcactgtggcccctgctaccatgggctctgcgcgctcccatgcctccagccgggccagtgagaatcaatctcccagcagcagcaactacttcagccccagggagtccactgatttctcatcttcctcccaagaggcatttgcagcttctgcagtgggcagtggggagcgtcgaggaggtggccctgtattcccagcccctgtcgttggcagtggaggggccacatctggaaagctgctgctggaggcagatgagctgtgcgatgatggtggggatgggaggggggcagtggttcctggggctgggctccggagacccacctacacaccccctagcatcatgccacagaaacactgggtatacgtgaagcgaggtggtaattgcccagcgccaacacccctggttccccaagacccagatctggaggaggaagaggaggaggaagatctggtgttgacctgtgaggatgatgaagatgaagaactagggggtagctccagggttccagtggggggagggcctgaggctaccctcagcataagtgatgtccgtaccctgagtgagcccccagacaagggggaggagcaggtcaacttctgtgagtcctccaatgactttggcccatatgagggtgggggtcctgtggcaggtcttgatgactcaggggggccaactccctcttcctatgccccctcccaccctcctcgaccgctccttcccttggacatgcagggcaaccagatcctggtcttcccgtcgtcgtcttcatcctcatcctcacaggctcctggccaaccaccagggaaccaagcagaacacggggcagtgaccgtggggggcacgtcggtggggagcctgggtgtgccgggtagcgttggtggggtccctggagggactggcagtggggacgggaataagatctttctgtgccattgtgggaaggccttctcccacaagagcatgcgggaccggcacgtgaacatgcacctcaatctgcggccgtttgactgccccgtgtgcaacaaaaagttcaagatgaagcaccatctgactgagcacatgaagacgcacacaggtctcaagccctacgagtgcggagtctgcgccaagaagttcatgtggcgagacagcttcatgcgccaccgaggacactgtgagcgccggcaccgcctgggcggggtcggggccgtacctgggcctgggactcccacggggccatccttgccgtccaagagagagtctcccggagtgggcgggggcagcggcgacgaagcgagtgcggccacgcccccgtccagcagacgtgtctggtccccacccagagtccacaaggtggagatgggcttcggtggaggtggaggagcaaactgaaggggcaggctactggggtggggtagctttcgggaaagggaataaggagcacgatgcaagggcgctgtggcccccgggtgatctcccaccacacttactgtcttcctttatctctgtggacttgtatatattctggaaggggaaccacagtttcaccatcgcccgcccattctactactcaacccctcccccccaaggtatttccagaactaaacccttcctttccctctgatgggtacactgaagcccctgctccacagagtagattgcacatggagggagggagagggggcgtgttgaacatcctgcagtcacagggtcaggggtcaggtggttgtagtctgtgcctgaagtctgtgtttgtgttgtcgtggagacaaggcctttgagccccacccttgtcctagaacctaccccctctcaaggatgcgctctttatttctaccctgtctctccccgccacccccgacttcccgtggaaattcccaactcggttctcatggaggagtgggtggagacaaggagggagtaagtcgtaggagtacaaggtttttattttttttaacagtgattaaaatatttattggtcatttacttggcttcccgaaaaaaaaaaaaaaaaaa

SEQ ID NO: 57793 - DNA, 1905 bp, Artificial Sequence
  derived and/or modified sequence
atggagcccagccccctgagccccagcggcgccgccctgcccctgcccctgagcctggcccccccccccctgcccctgcccgccgccgccgtggtgcacgtgagcttccccgaggtgaccagcgccctgctggagagcctgaaccagcagagactgcagggccagctgtgcgacgtgagcatcagagtgcagggcagagagttcagagcccacagagccgtgctggccgccagcagcccctacttccacgaccaggtgctgctgaagggcatgaccagcatcagcctgcccagcgtgatggaccccggcgccttcgagaccgtgctggccagcgcctacaccggcagactgagcatggccgccgccgacatcgtgaacttcctgaccgtgggcagcgtgctgcagatgtggcacatcgtggacaagtgcaccgagctgctgagagagggcagagccagcgccaccaccaccatcaccaccgccgccgccaccagcgtgaccgtgcccggcgccggcgtgcccagcggcagcggcggcaccgtggcccccgccaccatgggcagcgccagaagccacgccagcagcagagccagcgagaaccagagccccagcagcagcaactacttcagccccagagagagcaccgacttcagcagcagcagccaggaggccttcgccgccagcgccgtgggcagcggcgagagaagaggcggcggccccgtgttccccgcccccgtggtgggcagcggcggcgccaccagcggcaagctgctgctggaggccgacgagctgtgcgacgacggcggcgacggcagaggcgccgtggtgcccggcgccggcctgagaagacccacctacaccccccccagcatcatgccccagaagcactgggtgtacgtgaagagaggcggcaactgccccgcccccacccccctggtgccccaggaccccgacctggaggaggaggaggaggaggaggacctggtgctgacctgcgaggacgacgaggacgaggagctgggcggcagcagcagagtgcccgtgggcggcggccccgaggccaccctgagcatcagcgacgtgagaaccctgagcgagccccccgacaagggcgaggagcaggtgaacttctgcgagagcagcaacgacttcggcccctacgagggcggcggccccgtggccggcctggacgacagcggcggccccacccccagcagctacgcccccagccacccccccagacccctgctgcccctggacatgcagggcaaccagatcctggtgttccccagcagcagcagcagcagcagcagccaggcccccggccagccccccggcaaccaggccgagcacggcgccgtgaccgtgggcggcaccagcgtgggcagcctgggcgtgcccggcagcgtgggcggcgtgcccggcggcaccggcagcggcgacggcaacaagatcttcctgtgccactgcggcaaggccttcagccacaagagcatgagagacagacacgtgaacatgcacctgaacctgagacccttcgactgccccgtgtgcaacaagaagttcaagatgaagcaccacctgaccgagcacatgaagacccacaccggcctgaagccctacgagtgcggcgtgtgcgccaagaagttcatgtggagagacagcttcatgagacacagaggccactgcgagagaagacacagactgggcggcgtgggcgccgtgcccggccccggcacccccaccggccccagcctgcccagcaagagagagagccccggcgtgggcggcggcagcggcgacgaggccagcgccgccaccccccccagcagcagaagagtgtggagcccccccagagtgcacaaggtggagatgggcttcggcggcggcggcggcgccaactag

SEQ ID NO: 57794 - DNA, 450 bp, Artificial Sequence
  derived and/or modified sequence
atggagcccagccccctgagccccagcggcgccgccctgcccctgcccctgagcctggcccccccccccctgcccctgcccgccgccgccgtggtgcacgtgagcttccccgaggtgaccagcgccctgctggagagcctgaaccagcagagactgcagggccagctgtgcgacgtgagcatcagagtgcagggcagagagttcagagcccacagagccgtgctggccgccagcagcccctacttccacgaccaggtgctgctgaagggcatgaccagcatcagcctgcccagcgtgatggaccccggcgccttcgagaccgtgctggccagcgcctacaccggcagactgagcatggccgccgccgacatcgtgaacttcctgaccgtgggcagcgtgctgcagatgtggcacatcgtggacaagtgcaccgagctgctgagagagtag

SEQ ID NO: 57795 - DNA, 1905 bp, Artificial Sequence
  derived and/or modified sequence
atggagccctcccccctgagccccagcggagcggctttgcctctgccattgtcactggcaccgcctcccctgcccctgccggctgccgccgtggtgcacgtgtcctttccagaggttacatctgccctgcttgaatctctcaaccagcagagacttcaggggcagttgtgcgatgtgagcataagggtacagggccgtgaatttagggcacaccgcgctgtgttagcagcctcctcgccatactttcatgatcaggttctgctgaaggggatgacctctatcagcctgccttcagtgatggatccgggtgctttcgagactgtcctagcgtccgcttatactggccgactcagcatggcagcagcggatatcgttaacttcctgactgttggatctgtgctgcagatgtggcacatcgtcgacaagtgtacagagctcctgagggagggccgtgcaagcgctaccaccactattaccactgctgccgctacctccgtcactgtcccaggagcaggcgtaccatccggctccggcggaaccgtagcacccgcaactatgggaagcgcccgctctcacgctagctcaagagcatcagaaaatcagtccccatcttccagcaactatttttcccccagagaatcgactgactttagtagcagcagtcaggaggcattcgcagcgagtgccgtcggatcgggcgagcgaagggggggaggtccggtgttcccggcaccagtggtgggaagcggtggagccacatcaggcaagttactcttagaagcagacgagctttgtgacgacggaggggacggccgaggcgcggtagttccgggtgctgggctacgacgtcctacatacacccccccaagcatcatgccacaaaagcactgggtatatgtgaagcgaggcggtaattgcccggctcctacacccctagttccacaggaccctgatctggaagaagaggaggaagaagaggatctggtcctgacttgtgaggacgacgaggatgaggagctggggggttccagccgggtacctgtcgggggaggccctgaggcaactctctctatctctgacgtgagaaccctgtctgaacctcctgataaaggcgaggaacaagtgaatttttgtgaatctagcaatgatttcggcccttacgagggcggaggccctgtggctggactcgatgatagtgggggccctacaccctcaagctacgcccctagtcatccccctcggcccttgctgcccctggacatgcagggcaaccagatcctggtctttccgtcctccagttcttcctcttcctctcaagcccccggtcagccaccaggaaaccaagcagaacacggagccgtcaccgtgggaggaacatcagtgggctcactcggtgtgccagggtctgtaggtggagtgcccggaggtacggggtcgggagacgggaacaaaatcttcctttgtcattgtggaaaggccttcagccacaaaagcatgagggatcgacacgtgaacatgcaccttaacttgaggcctttcgactgtccagtctgtaataagaagtttaagatgaaacatcatctgaccgagcatatgaagactcacacaggcttgaagccatacgaatgcggggtctgcgccaaaaagttcatgtggcgcgatagctttatgaggcaccggggacattgcgagcggcgccatcgcttgggaggggttggcgccgtgcctggacctggaactcccactggaccatctctgccatcgaagcgcgagagtccaggggtcggcggcggatccggcgacgaagctagcgctgctaccccaccgagtagccgtagggtgtggtcaccccccagggtgcataaagtggagatgggttttggaggagggggaggggcaaactag

SEQ ID NO: 57796 - DNA, 1905 bp, Artificial Sequence
  derived and/or modified sequence
atggaaccctctccccttagtccctcaggggcagctctacccctcccgctgagccttgcgcctcctcctctgcccctccccgctgcagcagtagtgcatgtctcctttcctgaggtgacctctgcactactggagtcgctcaatcagcagcggttgcaaggccaattgtgcgacgtctccattagagtgcagggacgggaattcagagcgcacagagcggtattggctgcatcctctccatacttccacgaccaagttctgctcaagggtatgacaagcatttccctgccatccgtgatggaccccggtgccttcgagaccgtacttgctagcgcctacacaggccgactttcgatggccgcggcagacatcgtcaacttcctcacagttgggagcgtcctgcagatgtggcacatcgtggataaatgcaccgaactgctaagagagggcagggcatctgcaactactactatcacaaccgccgccgctaccagcgttactgtcccaggcgcgggcgttccttctgggagcggtggaaccgtggcaccagcgacaatggggtcagctaggagccacgcctcctcacgggccagcgagaaccagtccccaagctcgtcaaattatttctctcctcgtgaatccacagactttagttctagcagccaggaagcttttgcagcttccgccgtagggagcggagagcgcagggggggtgggccagtatttcccgcacccgtcgttggatccggcggggctacaagtggcaagcttcttctggaagccgacgagctttgcgatgacggtggagacgggaggggtgctgtggttccaggcgcaggcctcagaagacccacatacacacccccctctattatgcctcaaaagcactgggtgtatgttaagcgcggagggaactgtcccgcgcccactccattggtccctcaggacccggacttggaagaggaggaggaggaggaggatctggtgctaacatgcgaagatgacgaggacgaggagctagggggctcgtcccgagtccctgtcgggggcggcccagaagcaacgttatctatttcagatgttcggaccctgagcgagcccccagacaagggcgaagagcaggtgaacttttgcgagtcatcgaacgacttcggaccttatgaaggcggcgggcccgttgcaggcctggacgactctggcgggcccactccgtccagctatgccccatcgcacccacctagaccgctgttgccccttgacatgcagggtaatcagatcctggtttttccctcctctagcagttctagctccagccaagccccagggcagccgcccggcaatcaggcggaacatggcgccgtgactgtgggagggaccagtgtagggagcctcggcgtccccgggagtgtcgggggggtgcccggggggactggtagtggcgatggaaataaaatcttcctatgccactgtggtaaggccttttctcacaaatctatgcgagatcggcatgtcaatatgcacttgaatcttcgcccgttcgattgccccgtatgcaacaagaagtttaagatgaagcaccacctcaccgaacacatgaagacgcatacagggttaaaaccgtatgaatgtggcgtttgcgccaagaagttcatgtggagggactcttttatgagacatcgaggccactgtgaacgcaggcacaggcttggcggggttggagccgtacccggcccaggtacgcccaccggcccatcacttcccagtaaaagggagtcccccggcgtgggtggaggctccggggatgaggctagcgccgccacacctccaagttctagacgtgtttggagcccgcccagggttcataaagtggagatgggattcggaggtggtggaggcgcaaactag

SEQ ID NO: 57797 - DNA, 450 bp, Artificial Sequence
  derived and/or modified sequence
atggagccttccccgctttcaccctctggcgccgcattgcccttgccattgagcttggcaccgccgccccttcctctccctgcagctgccgtggtccacgtgtcatttcctgaggtgaccagtgctctcctggagagtttaaaccagcagcggcttcaggggcagctgtgtgatgtgtccatcagagtgcagggccgcgagttcagggctcatagagccgtgcttgccgccagctcaccatattttcacgatcaggtgctgctgaaagggatgacgtcgatatctttgccttcagtgatggatcctggcgccttcgaaaccgtcctggccagcgcttatacaggtaggttgagtatggccgcagccgacatcgtgaattttttgacggtaggatccgtgttgcagatgtggcacatcgtggataagtgtacagagttgcttcgggagtag

SEQ ID NO: 57798 - DNA, 450 bp, Artificial Sequence
  derived and/or modified sequence
atggagcctagccctctttctcccagtggtgctgccttgcctctgcccctctccttggctcctcccccattaccgctccccgcagcggctgtggtacatgtttcatttccagaggtcacatccgcactactcgaaagcttaaatcaacaacgactgcaaggacaactctgtgacgtttctatccgcgtgcagggacgcgaattccgagcacaccgggcagtcttggctgctagctctccctattttcatgaccaggttctgttgaaggggatgacttccattagcctgccttcagtcatggatccgggcgctttcgagaccgtcctcgcctccgcctatactggcagactgtcaatggctgccgccgacatagtgaatttcctcaccgtcggaagcgtcttacaaatgtggcacatagtggacaaatgcaccgagctgcttcgcgagtag

SEQ ID NO: 57799 - DNA, 1905 bp, Artificial Sequence
  derived and/or modified sequence
atggagccttctcctctgagtccatctggtgcagccctgcctctcccccttagtctggcccccccacccctcccactgcccgctgccgcagtcgttcatgtgtccttccctgaggttacctcagccttgctcgagtctttaaatcagcagagactccagggccagttatgcgacgtttccattcgcgtccagggacgtgagttcagagcacaccgggctgtcttggccgctagttcgccgtactttcatgaccaagtcctgctgaagggcatgacatcaattagcctgccatccgtgatggaccctggcgccttcgaaacagtactggccagcgcctataccgggaggttaagtatggcagcagcagatatcgtaaactttttaactgtcggttctgttctacagatgtggcacatcgtagataaatgcaccgagctgctgcgcgaaggaagggcctccgctaccacaaccatcacgaccgccgctgccacgtccgtgactgtgccaggcgccggtgtgcccagcggttcaggcggcaccgttgctccggcgacaatgggttccgcccgcagtcacgcctcatcgagagccagtgagaaccaaagcccctcatcctcgaattactttagtcctcgggagtccacagatttttcatccagctcccaggaggcttttgccgcctccgcagtgggatctggcgaaagaaggggtggcggtcctgtattccccgcaccagtggtgggaagcgggggagccacatctggtaagcttttgctggaggctgacgagctctgtgatgatggcggggatggccggggcgcagtggtacctggcgccggtctccgccgcccgacttacacaccaccgagcattatgcctcagaagcactgggtgtatgtgaagaggggggggaattgtccagccccaacacccctcgtgccccaggaccctgacctcgaggaagaagaagaggaggaggatttggtgctgacatgcgaggatgacgaagatgaggaactaggaggaagctcccgggtgccagtgggcggaggacccgaggccactttgagtatatcggacgtccggacgttgtctgagccacctgataagggggaggaacaggtcaacttttgtgaaagcagcaacgattttggtccatacgaaggcggtggccccgttgcgggactggatgattcagggggacctacacccagctcctacgcaccttcacacccccctaggccactgctgcctctggatatgcaagggaaccaaatactcgtgttcccctcctctagttcttcctctagcagccaggcaccaggacagcctcccggaaatcaggccgaacatggcgcagtcaccgtcggggggacaagtgtgggcagcttgggtgtgcctggatcagtgggtggcgttccaggaggcactgggagcggggatggcaacaagatttttctgtgccattgcggcaaggcctttagccacaaaagcatgagggatcggcacgtcaatatgcatctgaatctgcgtccatttgattgtccggtatgtaataaaaagttcaaaatgaagcatcacctaacagagcacatgaagacacataccgggctcaaaccctacgagtgtggtgtttgcgctaagaaattcatgtggagagacagcttcatgaggcacagagggcactgcgaacggcggcacagactgggtggagtcggtgccgtgcccgggccggggacccccactgggccctctctccctagtaagagagaaagccccggagtcggcgggggctctggggacgaagcgtctgcagcgacaccaccctcatctcgaagagtttggagtccccctagggtgcacaaagtggagatgggatttggtggtggcgggggagccaactag

SEQ ID NO: 57800 - DNA, 1905 bp, Artificial Sequence
  derived and/or modified sequence
atggagccttcccctctaagtccctcaggggccgccctgcccctacctctgagtttggccccacctccgcttcctctgcctgccgctgccgtggtgcacgtttcttttcccgaggtcacaagcgccctgttggagagcctgaaccagcagcggctccaggggcagttgtgcgacgtaagtattcgtgttcaggggagggagtttcgagcacacagagctgtgttggctgctagttctccttatttccacgaccaggtgctgctgaagggcatgacgtccatcagtctcccctctgttatggatccaggggccttcgagacggtgctggcttctgcttatacaggtaggttgagcatggccgccgccgacatagtgaatttcctgacagttggctccgttctacagatgtggcacatagtggacaaatgcacagaactgttgagagaaggacgtgcgtccgcaacgacaactatcacgaccgctgctgcaacgagtgttacagtacccggtgccggagtgcccagcggctctggcgggactgtggcccctgccacaatgggctcagcgcgcagccatgcctcaagtagagcctcagagaaccagtcaccatcctcctccaactacttctctcctcgcgaatccacggacttttcttcctcttctcaagaagccttcgctgccagtgcagtggggagcggcgagcgcagggggggcggacctgtgttcccagctcccgtggtcggatccggaggggcaaccagcggtaaactgctgctggaagccgatgagctctgcgacgacggaggcgacggcaggggggccgtcgtaccaggagcaggcctcaggcggcccacatacactcctcccagcattatgccacagaaacattgggtgtatgttaagcggggtggaaattgtccagcaccaacacccctggtgcctcaggatcctgacctggaggaagaggaggaggaggaggacctggtgctgacctgcgaggacgacgaagacgaggaactcggaggctcatcccgcgtacccgtaggggggggtccagaggcgaccttaagcattagtgatgtcagaaccctgtccgaaccccctgataagggggaagaacaggtgaacttctgcgagtcaagtaacgattttggcccctatgagggaggaggccctgtcgctggattagacgactcagggggcccaacaccctcctcttacgcaccttctcaccccccccgaccacttctgccactcgatatgcagggaaatcagatattggtcttcccctcttcgtcttcttctagcagttcgcaggcaccaggccagccccctggaaatcaagccgagcatggggccgttaccgtcgggggtacgtctgtcggttctctgggggtaccaggtagcgtcggaggcgttcctggggggactggatcgggtgacggcaataaaatcttcctttgccattgcggtaaggcatttagccacaaatcaatgagggatcggcacgtgaatatgcacctgaaccttcggccgttcgattgtcccgtctgcaacaagaaatttaagatgaagcaccaccttaccgaacatatgaagacccacacaggactgaagccttatgagtgcggtgtctgcgccaagaagtttatgtggcgggattcctttatgcgccacagaggccattgcgaaaggcggcaccggctcggcggcgtgggggcggtccctggaccagggacccccacagggccatcactgccttccaagcgtgaatcacctggagttggtggaggttcaggcgatgaggcttcggccgccacccctccaagctccagacgggtgtggagtcctccgagggtgcacaaagtagagatgggctttggaggaggcgggggagcaaattag

SEQ ID NO: 57801 - DNA, 1905 bp, Artificial Sequence
  derived and/or modified sequence
atggagcccagccccctgagccccagcggggccgccctgcccctgcccctgagcctggcccccccacccctgcccctgcctgctgctgctgtggtgcacgtgtccttccctgaggtgaccagcgccctgctggagagcctgaaccagcagaggctgcagggccagctgtgtgatgtgtccatccgggtgcagggccgggagttccgggcccacagagctgtgctggccgccagcagcccctacttccatgaccaggtgctgctgaagggcatgaccagcatcagcctgcccagcgtgatggaccccggggcctttgaaacagtgctggccagcgcctacacaggccgcctgtccatggctgctgctgacatcgtgaacttcctgactgtgggctctgtgctgcagatgtggcacatcgtggacaagtgcacagagctgctgcgggagggccgggccagcgccaccaccaccatcaccacagctgctgccacctctgtgacagtgcctggagctggggtgcccagcggcagcggcggcaccgtggccccagccaccatgggcagcgcccggagccacgccagcagccgggccagcgagaaccagagccccagcagcagcaactacttcagcccccgggagagcacagacttcagcagcagcagccaggaggcctttgctgccagcgctgtgggcagcggggagaggagaggaggcggccctgtgtttcctgcccctgtggtgggcagcggcggggccaccagcggcaagctgctgctggaggctgatgagctgtgtgatgatggaggagatggccgcggggctgtggtgcctggagctggcctgcggcggcccacctacaccccacccagcatcatgccccagaagcactgggtgtatgtgaagagaggaggcaactgcccagcccccacccccctggtgccccaggaccctgacctggaggaggaggaggaggaggaggacctggtgctgacctgtgaagatgatgaagatgaggagctgggcggcagcagccgggtgcctgtgggcggcggccctgaggccaccctgagcatcagtgatgtgaggaccctgtctgagcccccagacaagggggaggagcaggtgaacttctgtgagagcagcaatgactttggcccctatgaaggaggcggccctgtggccggcctggatgattctgggggccccacccccagcagctatgcccccagccaccccccccggcccctgctgcccctggacatgcagggcaaccagatcctggtgttccccagcagcagcagcagcagcagcagccaggcccctggccagcccccaggcaaccaggccgagcacggggctgtgacagtgggcggcacctctgtgggcagcctgggcgtgcccggctctgtgggcggcgtgcctgggggcactggaagtggagatggcaacaagatcttcctgtgccactgtgggaaggccttcagccacaagtccatgagggacagacatgtgaacatgcacctgaacctgcggccctttgactgccctgtgtgcaacaagaagttcaagatgaagcaccacctgacagagcacatgaagacccacacaggcctgaagccctatgaatgtggggtgtgtgccaagaagttcatgtggagggacagcttcatgaggcaccggggccactgtgaaagaagacaccggctgggcggcgtgggcgctgtgcccggccctggcacccccaccggccccagcctgcccagcaagcgggagagccctggggtgggcggcggcagcggagatgaggccagcgctgccaccccacccagcagccggcgggtgtggagccccccccgggtgcacaaggtggagatgggctttggaggcggcggcggggccaactag

SEQ ID NO: 57802 - DNA, 450 bp, Artificial Sequence
  derived and/or modified sequence
atggagcccagccccctgagccccagcggggccgccctgcccctgcccctgagcctggcccccccacccctgcccctgcctgctgctgctgtggtgcacgtgtccttccctgaggtgaccagcgccctgctggagagcctgaaccagcagaggctgcagggccagctgtgtgatgtgtccatccgggtgcagggccgggagttccgggcccacagagctgtgctggccgccagcagcccctacttccatgaccaggtgctgctgaagggcatgaccagcatcagcctgcccagcgtgatggaccccggggcctttgaaacagtgctggccagcgcctacacaggccgcctgtccatggctgctgctgacatcgtgaacttcctgactgtgggctctgtgctgcagatgtggcacatcgtggacaagtgcacagagctgctgcgggagtag

SEQ ID NO: 57803 - DNA, 1905 bp, Artificial Sequence
  derived and/or modified sequence
atggagcccagccccctgagccccagcggcgccgccctgcccctgccactgtcactcgcccctcctccattacctctgcccgcagcagccgttgtgcacgtttctttccctgaggtgacttcagctctgctggagtcgctcaaccaacaacggttacagggccaactgtgcgacgtgtccatccgggtgcagggccgggagtttagggcccaccgtgcggtgctggctgcttcatcgccgtactttcacgaccaagtgctgctgaaagggatgacatccattagcctgccgtccgtcatggatccgggtgcattcgagactgtactcgcctcagcatatacaggcaggctgagcatggccgcagcagacatcgtgaattttttgaccgtaggatcagttttacagatgtggcacattgtggacaaatgtaccgagctcctgcgggaaggaagagccagtgctacaacaaccatcactactgccgccgccacttctgttaccgtgcctggtgccggtgttccgtcaggctcaggaggtaccgtggcgccagcaacaatggggagtgcgcgtagccatgcttcctctcgcgcttcagagaaccagtcacccagcagtagtaattacttttcccccagagagtcaactgacttctcctcatcttcacaggaagcattcgccgcttctgccgttggctccggggaaagacgcgggggtgggcccgtgtttcccgctcctgtcgtggggtctgggggggcaacctccggaaaactgctacttgaagctgatgagctctgcgatgatgggggtgacggaaggggcgcagtcgtcccgggggccggcctccgaagacccacatataccccacccagcattatgcctcagaaacattgggtatacgtcaagcgtggaggcaattgccccgctcctacgccacttgtgccacaggatcctgacctcgaagaggaggaggaagaggaggacctagtgttgacgtgcgaggacgatgaggatgaagaactgggcggctcctctagggtgcccgttggcggaggacctgaagcgactctgtccatctcggacgttcgaacgttaagcgaaccccctgataaaggggaagaacaggtgaacttctgcgaatctagcaacgacttcggaccttacgagggaggaggcccggtggcaggactcgatgactccggcggccccacaccctcctcctatgcaccaagtcatccaccgcggccgctgctccccctggacatgcaggggaaccagattctagtgttcccctccagtagttcctctagctcctcccaggcccccgggcagccccctggcaaccaggctgagcacggcgcggtaaccgtcggcggaacttccgtgggttccctgggggttcccggatcagtgggaggagttcctggcgggaccgggtctggggacggcaataagatttttctgtgccactgcgggaaggcatttagccacaagtcaatgagggatagacatgtgaacatgcatctgaacctgcgcccattcgactgcccagtctgtaataaaaaatttaagatgaaacaccacctgaccgaacacatgaagacacacacaggtttaaaaccttatgaatgtggtgtttgcgccaaaaagttcatgtggagagatagctttatgcggcaccgtggtcactgcgaacggagacaccggcttgggggggtgggcgccgtgcccggtcccggaacccctacagggccgtccctcccaagcaaacgtgagtctcctggagtgggggggggctcaggggacgaggcatctgctgccacaccccccagctcacgtcgagtatggagcccccctagggtacacaaggtcgagatgggctttggagggggtggtggagccaactag

SEQ ID NO: 57804 - DNA, 1905 bp, Artificial Sequence
  derived and/or modified sequence
atggagcccagccccctgagccccagcggcgccgccctgcccctgccgctatccctggcacctcctccgttaccgctgcccgcagcagccgtcgtacacgtgtcttttcctgaagtaacgagcgcattactggagagcctgaaccagcagcgcctgcagggccaactctgcgatgtgtcaattagggtgcagggtcgggagttccgagctcatcgggcagtactcgccgcaagttctccatacttccatgaccaagttcttctgaagggaatgacatctatctctttacctagtgtgatggaccctggtgctttcgagacagtgttggcttccgcctacaccggacgcctctctatggcagcagccgacatagtgaattttctcacggtgggatcggtacttcaaatgtggcacatcgtagacaaatgcaccgaactcctgcgtgaaggccgggcctcggcgaccactacaatcacgaccgccgccgccactagcgtgactgtgcccggggcaggtgtgccctcaggttctggcgggactgtggccccagcgacaatgggctccgcgcggagtcacgctagttcccgagcctcggaaaatcagtcacccagctccagtaattacttcagcccacgagagtctacagacttttcaagcagctcccaagaagcttttgcagccagcgctgtgggatcaggagaaagacgaggaggaggacccgtcttcccggcgcccgttgtgggctctggaggagctacttctggaaaattactcctggaggcggacgagctctgtgacgatgggggtgatggtagaggcgctgtggtgccaggcgctgggctcagacgacccacttatacacccccttccattatgcctcagaagcattgggtgtacgtgaagaggggaggaaactgccccgcacccactcctctcgtgccacaggatcccgatctggaagaagaggaggaagaggaagacctggtgttgacctgtgaggacgatgaggacgaggaactcggaggatccagcagggttcccgtaggaggagggcccgaggcgacactgtccatctcggacgtgagaaccctgtcagaaccccccgacaagggagaagagcaagtgaacttctgtgagtccagcaatgattttggcccctacgagggtggcggccccgtggctgggctcgacgatagcgggggtcccacaccttccagctacgctccatctcacccgcctagaccgctcctgccactggacatgcagggcaatcagatcctggtctttcccagcagctctagtagttcctccagtcaagcaccaggacagccccctggcaatcaggctgagcatggagccgttaccgtgggaggaacctccgtggggtcactgggagtgccaggtagcgtgggaggggttcccggaggcaccggttcaggtgatgggaataaaattttcctgtgtcactgcggaaaagcgttttctcataagtcaatgagggataggcatgttaatatgcacttgaacttgaggccttttgactgtcccgtatgcaacaaaaagtttaaaatgaagcaccacttgactgagcacatgaaaacgcatacgggactgaagccatacgagtgcggagtttgcgccaaaaagttcatgtggcgcgattctttcatgaggcaccgaggccattgtgaacggagacaccggcttggcggtgtcggcgcagtccccggacccggaaccccaactgggccctctcttccttccaagagggagtccccaggcgtgggaggtggctccggtgatgaggcatccgccgcgacccccccatctagtcggcgcgtgtggagcccacctcgggtgcacaaggtggagatgggattcggagggggaggtggcgccaactag

SEQ ID NO: 57805 - DNA, 450 bp, Artificial Sequence
  derived and/or modified sequence
atggagcccagccccctgagccccagcggcgccgccctgcccctgccgctgtcgcttgcccccccacctctgcccctcccagccgctgcagttgttcatgtttcatttcccgaagtaacttcagccctgttggagagtctcaatcagcagcggctgcaggggcagctttgcgacgtttcaattcgagtgcagggtcgggaatttcgcgcacaccgcgcagttctggcagcctcatcaccttatttccacgaccaggtgttattgaagggtatgacctctatctctctcccgtccgtgatggatcccggggcattcgagacagtgctcgcttcagcttatactggccggcttagtatggccgctgccgatatcgtgaactttttaactgtcggtagcgtcttgcaaatgtggcacatagtggataagtgcacagagttgctgcgcgaatag

SEQ ID NO: 57806 - DNA, 450 bp, Artificial Sequence
  derived and/or modified sequence
atggagcccagccccctgagccccagcggcgccgccctgcccctgcccctgtctctggctccgcctcctttacctctgcccgccgcggctgtggtacacgtctcctttccagaagtcacttcagcccttttagaatccttgaaccaacagaggcttcagggccaattgtgcgacgtttctatccgtgtgcaagggcgcgaattcagagcccatcgcgctgttctagctgcgagcagcccttattttcacgatcaggtgctgttaaaaggcatgacttccattagtctgccttcggttatggaccccggcgccttcgagactgtgctggcctccgcttacaccggccgcctgagcatggcggccgcagacatcgtgaacttccttacagtcggtagcgtcctccaaatgtggcatatcgtggataagtgtactgagctgttgcgtgagtag

SEQ ID NO: 57807 - DNA, 1905 bp, Artificial Sequence
  derived and/or modified sequence
atggagcccagccccctgagccccagcggcgccgccctgcccctgcctctctcactggcgcccccaccactccccctacccgctgctgcagtggtgcacgttagttttcctgaggttacaagcgcgttgttggagagccttaatcagcagcggcttcaggggcagttgtgtgatgtgtcgatccgggttcaaggcagggagtttagggcgcacagagccgtactggctgccagcagtccttacttccacgaccaagtgctgttaaagggcatgacctctatctcgctgccttcagtgatggatcctggcgcttttgagactgtattagcctcagcatatactgggcgcctctccatggctgctgctgatatcgttaattttctgaccgtggggtccgtgcttcagatgtggcacattgtggacaaatgtaccgagctattgcgcgaggggcgggccagtgccaccacgacaataaccactgccgctgcaaccagcgtgacagtcccaggcgccggcgttccatcaggcagcggcggaactgtcgctcccgctacaatggggtcagcccgctcacacgctagcagccgagcctctgaaaaccagagtccatcaagctctaattatttcagtcctcgagagtcaacagatttttctagtagttcacaggaggccttcgcagcgtcagcagttggttccggggaacgtcgaggaggcggccccgtcttcccggcccctgttgtagggtcaggcggcgcaacatctggcaagctgctactggaggcagacgaattgtgtgatgacggaggggacggacgtggagcggtggtgcccggggcaggtctgcgcaggccgacctacactccaccctccattatgcctcagaagcactgggtatacgtgaaacggggtggaaattgcccagcccccacccccctggtgccacaagatcccgacctggaagaggaagaggaggaagaggatttagtgctgacctgcgaggacgacgaagacgaagagctcggcggatcaagtcgagtgccagtaggcgggggaccagaggcaaccctttccatttccgatgtgcgcacactttcggagccgcctgacaaaggagaggagcaggtgaatttctgtgagagttctaacgactttggaccttatgagggaggagggcccgtcgccgggctggatgactcgggcgggccaacaccgtctagctacgccccttctcaccctcccaggcccttattgccgctggacatgcaggggaaccagatcctggttttcccttcaagttctagctccagttcgtctcaggcccctggtcagcccccgggaaatcaagccgaacacggcgcggttaccgtaggcggaactagcgttggaagccttggcgtgccgggatctgttggaggcgtccccggaggaacagggagcggcgacggaaacaagatttttttgtgccactgcggaaaggctttttcccataagagcatgcgggatagacacgtcaatatgcatctgaatctgcgtcccttcgactgtcctgtgtgcaataaaaaatttaagatgaaacaccacctgaccgagcacatgaaaacccatacggggctaaagccttatgagtgcggtgtttgcgcaaagaagttcatgtggagagattcattcatgcggcatcgtggtcactgcgagcggcggcacagactcggaggcgtcggcgctgtgccgggtcccggtaccccaacaggtccatcattgccgtcaaaaagggagtcgccaggggtgggcgggggttcaggtgacgaggctagcgctgcaaccccacccagtagcagacgagtgtggtctccacccagggttcacaaggttgaaatggggtttggcggaggtggcggcgccaattag

SEQ ID NO: 57808 - DNA, 1905 bp, Artificial Sequence
  derived and/or modified sequence
atggagcccagccccctgagccccagcggcgccgccctgcccctgccgttgtccctggccccacccccgcttcccctcccagccgccgctgtagtgcacgtgtcatttcccgaggtgacgagcgcactcttggaaagcctcaatcaacagcggctgcagggccaactctgcgatgtctccatccgggtgcagggcagggaattcagagcccatagagcggttctggcagcatcaagcccatatttccacgatcaagtgttgctgaagggcatgacaagtatctcacttccatccgtcatggaccctggagcttttgaaacagtcctggctagcgcttatacagggaggctcagcatggcagcagctgatattgtgaattttctcaccgtgggttcggtgctacagatgtggcacatagtcgataaatgcaccgagcttctgagagagggacgcgcgtccgcaacaaccaccatcaccacagcagctgccactagtgtaaccgtgcctggggccggcgtgccttcaggttcaggcggcacagtcgccccagccacaatggggagcgctaggtctcacgcgagttcccgtgccagcgaaaaccaatccccgagttccagcaattatttctctccccgcgagtctacggattttagtagtagcagtcaggaagcatttgctgcctcagcagtgggcagtggtgaacgtaggggtggcgggcccgttttccctgcccctgtggtgggctctggcggggccacttctggaaaactcttgctggaagccgatgagctgtgcgatgatggcggcgacggaagaggggccgttgtgcccggagccggcttaagaaggcccacatacacccccccctccatcatgcctcagaagcattgggtgtacgtgaaacgcggcgggaattgccccgcgccaactccactcgtaccccaagaccctgacctggaagaggaagaggaggaagaggatctggttctcacttgcgaggatgatgaggatgaggagcttggtggaagttcacgcgtcccagtaggtggtgggcccgaggcgaccctatccatttctgatgtgcggaccttgtcagaaccacccgataagggagaggagcaagttaacttttgcgagtcaagtaatgactttggcccttacgagggcggcggacctgtggcaggactggacgattccggtgggcctactccatcttcttatgcaccatcgcacccaccacggccactccttccgctggacatgcaggggaatcaaatactagtctttccaagttctagctcgagcagttcctcccaggctccaggccaacctcccggaaatcaggccgaacatggagcggtaacagttggcgggacttcagtcggatccctcggtgtgccgggcagtgtgggaggtgtgcctggtggcaccggcagcggagatgggaacaaaattttcctgtgtcactgtgggaaggccttttcacataagagcatgagggataggcatgtcaatatgcacttaaacctgaggccattcgactgccccgtttgcaataaaaaatttaaaatgaaacatcatctgactgagcatatgaaaacacacactggcctgaagccctacgagtgtggggtgtgtgccaaaaaatttatgtggcgtgactcatttatgagacaccgggggcattgcgagcgacggcataggttaggaggtgtcggcgctgttcccgggcccggaactcctacgggtcccagcctccctagcaaaagggagagccctggcgtgggcgggggctcaggtgatgaagcttccgccgctactcccccttccagccgacgcgtctggtctccgcctagggtccacaaggtggagatgggcttcgggggtgggggaggggcaaattag

SEQ ID NO: 57809 - DNA, 1905 bp, Artificial Sequence
  derived and/or modified sequence
atggagcctagtcctctgtccccttccggtgcggctttaccgctgcctctgtccctcgcaccaccgcctttgccactgcctgcagctgccgtggtccacgttagttttccagaagtgacatcagcactactagagtcccttaaccagcaaagattacaagggcagctctgcgacgtttctatccgcgtgcagggccgtgagttcagggcccaccgtgccgttctcgctgccagctcaccatacttccacgaccaggtacttctgaagggaatgacttcaatttcactgccctcggtgatggaccccggagcatttgaaacagtcctagctagtgcctatactggtaggttgtccatggctgccgctgatattgtgaacttcctgacggtgggctctgttcttcaaatgtggcacattgtagataagtgtacggagctcctgcgcgagggcagggcatcagccaccactaccattaccactgcagcagccacgagcgtgaccgtgcccggtgcaggcgttccctccggcagcggcggtactgtggcaccagcgacaatgggtagcgcacggtctcatgcttcgagtcgcgcatccgagaaccagtcgccatcatcatccaactatttctccccacgggagtcgactgacttctccagctcaagccaggaagccttcgcagccagcgcagtggggtcgggtgaacgccgaggtggaggtccagtatttcccgctccagtggtaggttcaggcggtgccaccagcggcaagctcttgctggaggctgacgagctgtgtgacgacggtggcgatggaaggggggctgtagtgccaggcgcaggactgagacgcccaacttataccccgccatcgataatgccccagaaacattgggtttacgtcaaaaggggaggaaactgtcccgcacctacaccattagtgccccaagatccagacctcgaagaggaagaggaggaggaggatttagtcttgacatgcgaagatgacgaggacgaggagctgggcggatcaagtcgagttccggtaggtggcggtccagaagctaccctgtcaatttccgatgtgagaaccctgtcagaaccgcctgacaagggagaggaacaagtgaacttttgtgaatcatccaatgatttcggcccttatgaaggaggaggaccagtggcaggattggacgatagtgggggacccacaccatcttcatacgctccctcccatccgcctcggcctctccttcccctcgatatgcagggaaatcagatcttagtgtttcccagcagttcatcgagcagctcaagccaggccccaggacagcccccaggaaaccaggcagagcacggtgccgtgactgtgggcggaacctctgtgggcagcctgggcgtcccaggcagtgtaggaggggtccctgggggtacgggtagcggcgatggaaataagatctttctgtgccattgtggcaaggctttctcgcataagtccatgcgagacagacacgtcaatatgcacctgaacctcaggccgtttgattgtcctgtgtgtaataagaaattcaaaatgaagcaccatctgaccgagcacatgaaaactcatacaggcctgaagccatacgaatgcggtgtgtgcgcaaagaaattcatgtggagggactctttcatgcgtcataggggccattgcgagagaaggcacaggcttggcggagtcggggcagtacccggtcccggaacaccaaccgggccatccctgccaagcaagagggagagccctggcgtgggcggtgggtccggggatgaagcaagtgcagctactccccctagcagccgcagagtctggtctccaccaagagtgcacaaggtagaaatgggtttcggagggggtgggggagcgaattag

SEQ ID NO: 57810 - DNA, 1905 bp, Artificial Sequence
  derived and/or modified sequence
atggaaccgtcacctctgtccccctccggagctgccttgcctctgcccttgagcctcgcacctcctcctctcccactccccgctgcagcggttgtccacgtgagctttcccgaagtcacatctgcacttctcgaaagcttaaaccaacagcgactgcaaggacagttgtgtgacgtaagcatccgtgtacaaggacgcgagtttcgagctcaccgtgctgtgctggcagccagctctccatatttccatgatcaggtcttgctgaagggaatgacctctattagcttgccttctgtgatggatcctggggctttcgagactgtgctggcatcagcctatactggcagacttagcatggcagccgctgacattgtaaatttcttgactgtcggcagcgtgctgcagatgtggcatatcgtggataagtgcactgagctgctgagagaaggaagggcctcggcgacgaccacgattactacggctgcggctactagcgtgaccgtgccgggagctggagttccctcagggtcaggcggtacagtcgcacccgctacaatgggatccgctagatcccatgcatcctcaagggcttccgaaaatcagtctccatcctcctctaattattttagtccacgagaatcaaccgatttttcttctagctctcaagaggccttcgccgcatccgctgtgggttcgggcgagcgcagaggcggagggccagtctttcccgcacccgtggttggatccggaggcgcaaccagtggtaagctgctactcgaggccgatgaactgtgcgatgacggaggcgacggcaggggggctgtggtcccaggagcaggactccggaggccaacatatacacccccttccatcatgccccagaagcactgggtttatgtgaagagaggaggtaactgtcccgcacctacaccactggtgccacaggatcctgatctggaggaggaagaggaagaagaggatttggttctcacatgcgaagacgacgaagacgaagagctgggcggaagcagcagggtgcctgttggaggtgggcctgaagctacactgtcgatttctgatgtccgaacactatcagaacctccagataaaggggaagaacaggtgaacttttgtgaatcctccaatgactttggcccttacgaaggcggaggacccgtggcagggcttgacgattccgggggacccacgccaagttcctacgcccctagtcacccccctcggcctcttctccccttggatatgcagggaaatcagatcctggttttccctagctcctcttcttccagttcatctcaagctccgggtcagccccctgggaaccaggcggagcatggcgcagtgaccgtaggcggtacaagcgttgggagcctgggtgtgcctggaagcgtcggaggcgtgccagggggtacgggctcaggagacgggaacaaaatatttctgtgccattgcggtaaagcattcagccacaagtccatgcgtgaccgtcacgtcaatatgcacctcaatctccgcccattcgactgtcccgtttgtaataagaagtttaaaatgaagcaccatctgacagagcatatgaagacccacaccggtctgaaaccctatgaatgtggagtgtgtgccaagaaattcatgtggagggattcattcatgaggcataggggccactgtgaacgacgacatcggttgggaggggtaggtgccgtgcccggtccaggtacacctaccggaccttccctgccgtcaaaacgcgagtcaccaggcgtgggaggaggatccggcgacgaggccagtgccgctacaccgcctagctcacggagagtgtggtcgccaccgagggttcacaaagttgagatgggttttgggggaggtggcggagccaactag

SEQ ID NO: 57811 - DNA, 450 bp, Artificial Sequence
  derived and/or modified sequence
atggagccttcgcctcttagcccttcgggggctgctctgccccttcctctaagtttggccccacccccactgcctctccctgcagctgcggtggtgcacgtgtctttcccggaagtaacttcagccttgctggagagtctgaaccagcaaagactgcaggggcagctgtgtgacgtcagcattagagttcaaggtagagaattcagggcacatagagctgtgctagctgccagctcaccgtactttcacgaccaggtcctccttaagggaatgacttccatctcacttccaagcgtaatggatccaggggcatttgagaccgtgctggcaagcgcctatactggtcggttgagcatggccgcagcggatattgttaacttcttgaccgttggctcggtactccagatgtggcatattgtggataaatgcacagaactcctccgggagtag

SEQ ID NO: 57812 - DNA, 450 bp, Artificial Sequence
  derived and/or modified sequence
atggagcccagccctctgtcaccatcgggcgctgctctgcctctgccactcagcttagcacctccgccattgccactgccggctgccgcagtggtccacgtgtcattccccgaagtgacttcggcccttctggaatccctgaaccaacagcggctgcaggggcagctgtgtgatgtgagcattagggttcagggtagggaatttcgagcacaccgagctgtgttggctgccagctccccgtatttccatgaccaagtgctgttaaaaggaatgacatccatctccttaccatccgtgatggatcccggagcttttgaaacagtacttgcatctgcatacacaggcagactgtctatggcagccgctgacattgtgaacttccttaccgtgggttcagtcctccagatgtggcacatcgtggacaaatgtacagagctgctaagagaatag

SEQ ID NO: 57813 - DNA, 1905 bp, Artificial Sequence
  derived and/or modified sequence
atggagccatcgcctctctctccatcgggcgctgcgttgccacttccactgagcctggcccctcccccactgccgttgcccgctgccgcagtagtgcacgtgagctttcctgaagtgacctcagctctgcttgaatccctgaatcagcagcgacttcagggacaactgtgcgacgtttctataagggtgcaaggtcgcgagttccgagcccatagagccgtgctggctgccagctctccttacttccatgaccaagtgctgctgaaggggatgacttccatatcactgccgtctgtcatggatccgggagcgtttgaaactgttcttgccagcgcttacacaggtaggctgtcaatggcagctgctgacatcgtaaacttcctcaccgttggatcagttctccaaatgtggcatatcgtggataagtgcactgaactgttgcgtgagggcagagctagcgcaaccactacgataacaactgccgcagctacatccgttaccgttcctggcgctggcgttcctagcggttctgggggaaccgtggccccagcgaccatgggtagtgcgcgttcccacgcttctagccgggcaagtgaaaaccaaagccccagttcatccaattatttttctccacgggagtcgacagatttttcaagctctagccaagaagcctttgcagccagcgctgtgggttccggagagagaagaggtggaggtccagtttttcccgctcctgtggtggggtccggtggggctacttccggcaaactactcttagaagcggacgaactgtgcgatgatgggggagacgggaggggagctgtcgtacctggcgctgggcttcggagacctacttacacaccgccttccatcatgcctcagaagcactgggtgtacgttaaaagaggcggaaattgccctgctcctaccccgctcgtcccccaggatcccgatctggaggaggaagaggaagaggaggacctggtgttaacttgcgaggatgatgaggatgaggagcttggaggctcttcccgagtgccagtgggaggaggaccagaggccacactaagtatctcagacgtgagaaccctcagcgagcccccagacaagggtgaggagcaagtaaacttttgcgaaagttcgaatgattttggcccatatgaaggaggaggtcccgtggcaggacttgatgactcaggaggtccgaccccctcaagctacgccccttctcaccctccgaggcccctgctgcctctagacatgcaaggtaaccagattctggtgtttccctccagcagctcctcatcctcctcccaagccccaggccagcccccaggaaatcaggctgagcatggggctgtcacagtcgggggaacatctgtgggctcattaggggtgccaggctcagtaggaggcgtacctggagggacagggagtggagacggaaataaaattttcttgtgccactgtggaaaggcattctctcacaagagcatgcgggataggcacgtcaatatgcaccttaatctgcggcctttcgattgtcccgtgtgtaataagaaattcaaaatgaagcaccacttgacggagcacatgaagacccacactgggctgaagccttatgagtgcggagtctgtgccaaaaagttcatgtggagagatagtttcatgcgtcatcggggacactgcgagcgccgacacagattgggcggagtcggcgcagtgcctgggccaggcactcctacaggaccttcactgccctcaaaaagggagtcaccgggagtgggcggaggaagtggtgatgaagcctctgcggctacgcctccttccagtagaagagtttggtcacccccacgtgtgcacaaggtagaaatgggattcgggggaggtggaggggctaactag

SEQ ID NO: 57814 - DNA, 1905 bp, Artificial Sequence
  derived and/or modified sequence
atggagccatcccctctttcacctagtggggcagcccttcccctaccattgagcttggccccacccccactgcctctcccagccgcagctgttgtacacgtttcatttcccgaggtgactagcgctctgttggagtctctaaatcagcaaagattacaggggcagctttgcgatgtctctatccgcgtgcaggggagggaattccgagcccacagagcggttctcgccgcatcctcaccctacttccacgaccaagtattgctaaagggtatgaccagcatttccttgccttctgtgatggatcccggagcttttgagaccgtactggccagcgcttacactggaagactctctatggccgctgccgatattgtgaacttcctcacagtaggatctgtgctgcaaatgtggcacatcgtggacaaatgtaccgaacttcttcgtgaggggagggcatccgctacaacgaccatcacgaccgccgctgcaactagtgtgacagttcctggcgctggcgtcccaagtggttccggagggactgttgcacctgcaaccatggggtctgccaggtctcatgccagctcaagggcatctgagaatcagtccccctctagctctaactacttctcaccaagagaaagcactgacttctcctcatctagtcaggaagcattcgcagcaagtgctgtcggatccggagagcgcagaggaggcggtcccgtattcccagcccctgtcgttggaagcggaggcgcaacctccggcaaactgctactggaggccgacgaactatgcgacgatggcggagatggacggggagctgtcgtaccaggggcagggctccgcaggcctacatatacaccgccttcaataatgcctcagaagcactgggtgtacgtgaagcgcggaggcaactgtcctgctccgacaccactggtgcctcaggaccctgatctggaagaagaggaggaagaggaagaccttgtcctgacctgtgaggacgacgaagacgaagaactgggcggatctagcagggtacctgttgggggagggcctgaagcaactctgagcatctctgatgtcaggaccctgtccgagccacccgataaaggcgaggagcaggtgaatttttgtgaatccagcaatgatttcggcccatatgagggcggaggacccgtggcaggactggacgatagtgggggtccaacccctagttcctatgcgccatcacaccccccaaggcccttgctgccgctggacatgcagggaaatcaaatcctcgtgtttccatccagttcctcaagctcctcctcccaggcacctggtcaaccaccaggaaaccaggctgagcatggcgcagttactgtgggcggaactagtgtagggtccctgggtgttcccggatctgtgggaggtgtccctggaggtaccggctccggcgatgggaataagatcttcctttgccactgcggaaaagcattcagtcacaagtccatgagagatcggcacgtgaacatgcacctcaacctccgaccatttgactgtcccgtctgtaacaagaagtttaaaatgaagcaccatctgaccgagcacatgaagacacatacagggctcaagccttatgaatgtggtgtctgcgccaagaagttcatgtggcgtgactcattcatgaggcaccggggacactgcgaacgcagacataggcttggtggggtgggcgcagttcctggcccaggtactcctactgggccttcactcccaagtaagcgtgaatcccccggtgtcggtgggggatctggtgacgaggcatctgccgctacaccccctagcagtaggcgggtttggagtcccccacgagtgcataaagttgaaatgggattcggcggagggggtggagccaactag

SEQ ID NO: 57815 - DNA, 2645 bp, Artificial Sequence
  derived and/or modified sequence
gaataaatgcttcggccgaaccaagtcctgagctcccagcggaggaggggacctgatcttttaagagacccccccggccgccctcctcctttctttgttcctgtggctgggggggtatcccctccctccacaacatggagccatctcctctgtctcccagtggggcagcacttcccctgccgctgtcgctggctccgcccccactacccctgccagcagctgcagtggtacatgtgtccttccctgaggtgaccagtgccctcttggagtccctcaatcagcagcgtctgcagggccagctctgcgatgtatctatcagagtgcagggccgggagttccgggctcatcgggctgtcctggctgcctcctccccttacttccatgatcaggtcctactcaaaggcatgacctccatctcgctgcccagtgtcatggacccaggcgcctttgagactgtcctagcctccgcttacactggccgcctcagcatggctgctgctgacattgtcaacttccttacagtggggtctgtgctccaaatgtggcacattgtggacaagtgcactgaactactccgagaaggccgggcctcagctaccaccaccatcactactgctgcagccacctctgtcactgtccctggtgctggggtgccatccgggagtgggggcactgtggcccctgctaccatgggctctgcgcgctcccatgcctccagccgggccagtgagaatcaatctcccagcagcagcaactacttcagccccagggagtccactgatttctcatcttcctcccaagaggcatttgcagcttctgcagtgggcagtggggagcgtcgaggaggtggccctgtattcccagcccctgtcgttggcagtggaggggccacatctggaaagctgctgctggaggcagatgagctgtgcgatgatggtggggatgggaggggggcagtggttcctggggctgggctccggagacccacctacacaccccctagcatcatgccacagaaacactgggtatacgtgaagcgaggtggtaattgcccagcgccaacacccctggttccccaagacccagatctggaggaggaagaggaggaggaagatctggtgttgacctgtgaggatgatgaagatgaagaactagggggtagctccagggttccagtggggggagggcctgaggctaccctcagcataagtgatgtccgtaccctgagtgagcccccagacaagggggaggagcaggtcaacttctgtgagtcctccaatgactttggcccatatgagggtgggggtcctgtggcaggtcttgatgactcaggggggccaactccctcttcctatgccccctcccaccctcctcgaccgctccttcccttggacatgcagggcaaccagatcctggtcttcccgtcgtcgtcttcatcctcatcctcacaggctcctggccaaccaccagggaaccaagcagaacacggggcagtgaccgtggggggcacgtcggtggggagcctgggtgtgccgggtagcgttggtggggtccctggagggactggcagtggggacgggaataagatctttctgtgccattgtgggaaggccttctcccacaagagcatgcgggaccggcacgtgaacatgcacctcaatctgcggccgtttgactgccccgtgtgcaacaaaaagttcaagatgaagcaccatctgactgagcacatgaagacgcacacaggtctcaagccctacgagtgcggagtctgcgccaagaagttcatgtggcgagacagcttcatgcgccaccgaggacactgtgagcgccggcaccgcctgggcggggtcggggccgtacctgggcctgggactcccacggggccatccttgccgtccaagagagagtctcccggagtgggcgggggcagcggcgacgaagcgagtgcggccacgcccccgtccagcagacgtgtctggtccccacccagagtccacaaggtggagatgggcttcggtggaggtggaggagcaaactgaaggggcaggctactggggtggggtagctttcgggaaagggaataaggagcacgatgcaagggcgctgtggcccccgggtgatctcccaccacacttactgtcttcctttatctctgtggacttgtatatattctggaaggggaaccacagtttcaccatcgcccgcccattctactactcaacccctcccccccaaggtatttccagaactaaacccttcctttccctctgatgggtacactgaagcccctgctccacagagtagattgcacatggagggagggagagggggcgtgttgaacatcctgcagtcacagggtcaggggtcaggtggttgtagtctgtgcctgaagtctgtgtttgtgttgtcgtggagacaaggcctttgagccccacccttgtcctagaacctaccccctctcaaggatgcgctctttatttctaccctgtctctccccgccacccccgacttcccgtggaaattcccaactcggttctcatggaggagtgggtggagacaaggagggagtaagtcgtaggagtacaaggtttttattttttttaacagtgattaaaatatttattggtcatttacttggcttcccg

SEQ ID NO: 57816 - DNA, 2651 bp, Artificial Sequence
  derived and/or modified sequence
cgcaagatggcggcgggaggggcccaggttgctgctctggccgccgagtgaggggcggggggggcccgggggcgcgcggcccgagacccccccggccgccctcctcctttctttgttcctgtggctgggggggtatcccctccctccacaacatggagccatctcctctgtctcccagtggggcagcacttcccctgccgctgtcgctggctccgcccccactacccctgccagcagctgcagtggtacatgtgtccttccctgaggtgaccagtgccctcttggagtccctcaatcagcagcgtctgcagggccagctctgcgatgtatctatcagagtgcagggccgggagttccgggctcatcgggctgtcctggctgcctcctccccttacttccatgatcaggtcctactcaaaggcatgacctccatctcgctgcccagtgtcatggacccaggcgcctttgagactgtcctagcctccgcttacactggccgcctcagcatggctgctgctgacattgtcaacttccttacagtggggtctgtgctccaaatgtggcacattgtggacaagtgcactgaactactccgagaaggccgggcctcagctaccaccaccatcactactgctgcagccacctctgtcactgtccctggtgctggggtgccatccgggagtgggggcactgtggcccctgctaccatgggctctgcgcgctcccatgcctccagccgggccagtgagaatcaatctcccagcagcagcaactacttcagccccagggagtccactgatttctcatcttcctcccaagaggcatttgcagcttctgcagtgggcagtggggagcgtcgaggaggtggccctgtattcccagcccctgtcgttggcagtggaggggccacatctggaaagctgctgctggaggcagatgagctgtgcgatgatggtggggatgggaggggggcagtggttcctggggctgggctccggagacccacctacacaccccctagcatcatgccacagaaacactgggtatacgtgaagcgaggtggtaattgcccagcgccaacacccctggttccccaagacccagatctggaggaggaagaggaggaggaagatctggtgttgacctgtgaggatgatgaagatgaagaactagggggtagctccagggttccagtggggggagggcctgaggctaccctcagcataagtgatgtccgtaccctgagtgagcccccagacaagggggaggagcaggtcaacttctgtgagtcctccaatgactttggcccatatgagggtgggggtcctgtggcaggtcttgatgactcaggggggccaactccctcttcctatgccccctcccaccctcctcgaccgctccttcccttggacatgcagggcaaccagatcctggtcttcccgtcgtcgtcttcatcctcatcctcacaggctcctggccaaccaccagggaaccaagcagaacacggggcagtgaccgtggggggcacgtcggtggggagcctgggtgtgccgggtagcgttggtggggtccctggagggactggcagtggggacgggaataagatctttctgtgccattgtgggaaggccttctcccacaagagcatgcgggaccggcacgtgaacatgcacctcaatctgcggccgtttgactgccccgtgtgcaacaaaaagttcaagatgaagcaccatctgactgagcacatgaagacgcacacaggtctcaagccctacgagtgcggagtctgcgccaagaagttcatgtggcgagacagcttcatgcgccaccgaggacactgtgagcgccggcaccgcctgggcggggtcggggccgtacctgggcctgggactcccacggggccatccttgccgtccaagagagagtctcccggagtgggcgggggcagcggcgacgaagcgagtgcggccacgcccccgtccagcagacgtgtctggtccccacccagagtccacaaggtggagatgggcttcggtggaggtggaggagcaaactgaaggggcaggctactggggtggggtagctttcgggaaagggaataaggagcacgatgcaagggcgctgtggcccccgggtgatctcccaccacacttactgtcttcctttatctctgtggacttgtatatattctggaaggggaaccacagtttcaccatcgcccgcccattctactactcaacccctcccccccaaggtatttccagaactaaacccttcctttccctctgatgggtacactgaagcccctgctccacagagtagattgcacatggagggagggagagggggcgtgttgaacatcctgcagtcacagggtcaggggtcaggtggttgtagtctgtgcctgaagtctgtgtttgtgttgtcgtggagacaaggcctttgagccccacccttgtcctagaacctaccccctctcaaggatgcgctctttatttctaccctgtctctccccgccacccccgacttcccgtggaaattcccaactcggttctcatggaggagtgggtggagacaaggagggagtaagtcgtaggagtacaaggtttttattttttttaacagtgattaaaatatttattggtcattta

SEQ ID NO: 57817 - DNA, 581 bp, Artificial Sequence
  derived and/or modified sequence
aataaatgcttcggccgaaccaagtcctgagctcccagcggaggaggggacctgatcttttaagagacccccccggccgccctcctcctttctttgttcctgtggctgggggggtatcccctccctccacaacatggagccatctcctctgtctcccagtggggcagcacttcccctgccgctgtcgctggctccgcccccactacccctgccagcagctgcagtggtacatgtgtccttccctgaggtgaccagtgccctcttggagtccctcaatcagcagcgtctgcagggccagctctgcgatgtatctatcagagtgcagggccgggagttccgggctcatcgggctgtcctggctgcctcctccccttacttccatgatcaggtcctactcaaaggcatgacctccatctcgctgcccagtgtcatggacccaggcgcctttgagactgtcctagcctccgcttacactggccgcctcagcatggctgctgctgacattgtcaacttccttacagtggggtctgtgctccaaatgtggcacattgtggacaagtgcactgaactactccgagaag

SEQ ID NO: 57818 - DNA, 1905 bp, Artificial Sequence
  derived and/or modified sequence
atggagcccagccccctgagccccagcggcgccgccctgcccctgcccctgagcctggcccccccccccctgcccctgcccgccgccgccgtggtgcacgtgagcttccccgaggtgaccagcgccctgctggagagcctgaaccagcagagactgcagggccagctgtgcgacgtgagcatcagagtgcagggcagagagttcagagcccacagagccgtgctggccgccagcagcccctacttccacgaccaggtgctgctgaagggcatgaccagcatcagcctgcccagcgtgatggaccccggcgccttcgagaccgtgctggccagcgcctacaccggcagactgagcatggccgccgccgacatcgtgaacttcctgaccgtgggcagcgtgctgcagatgtggcacatcgtggacaagtgcaccgagctgctgagagagggcagagccagcgccaccaccaccatcaccaccgccgccgccaccagcgtgaccgtgcccggcgccggcgtgcccagcggcagcggcggcaccgtggcccccgccaccatgggcagcgccagaagccacgccagcagcagagccagcgagaaccagagccccagcagcagcaactacttcagccccagagagagcaccgacttcagcagcagcagccaggaggccttcgccgccagcgccgtgggcagcggcgagagaagaggcggcggccccgtgttccccgcccccgtggtgggcagcggcggcgccaccagcggcaagctgctgctggaggccgacgagctgtgcgacgacggcggcgacggcagaggcgccgtggtgcccggcgccggcctgagaagacccacctacaccccccccagcatcatgccccagaagcactgggtgtacgtgaagagaggcggcaactgccccgcccccgcccccctggtgccccaggaccccgacctggaggaggaggaggaggaggaggacctggtgctgacctgcgaggacgacgaggacgaggagctgggcggcagcagcagagtgcccgtgggcggcggccccgaggccaccctgagcatcagcgacgtgagaaccctgagcgagccccccgacaagggcgaggagcaggtgaacttctgcgagagcagcaacgacttcggcccctacgagggcggcggccccgtggccggcctggacgacagcggcggccccacccccagcagctacgcccccagccacccccccagacccctgctgcccctggacatgcagggcaaccagatcctggtgttccccagcagcagcagcagcagcagcagccaggcccccggccagccccccggcaaccaggccgagcacggcgccgtgaccgtgggcggcaccagcgtgggcagcctgggcgtgcccggcagcgtgggcggcgtgcccggcggcaccggcagcggcgacggcaacaagatcttcctgtgccactgcggcaaggccttcagccacaagagcatgagagacagacacgtgaacatgcacctgaacctgagacccttcgactgccccgtgtgcaacaagaagttcaagatgaagcaccacctgaccgagcacatgaagacccacaccggcctgaagccctacgagtgcggcgtgtgcgccaagaagttcatgtggagagacagcttcatgagacacagaggccactgcgagagaagacacagactgggcggcgtgggcgccgtgcccggccccggcacccccaccggccccagcctgcccagcaagagagagagccccggcgtgggcggcggcagcggcgacgaggccagcgccgccaccccccccagcagcagaagagtgtggagcccccccagagtgcacaaggtggagatgggcttcggcggcggcggcggcgccaactag

SEQ ID NO: 57819 - DNA, 1905 bp, Artificial Sequence
  derived and/or modified sequence
atggaaccgtctcctctgagccctagcggggccgcgctcccactcccactgtcactggccccccctcccctgcctcttcctgcagccgcagtcgtccatgtgtcattcccggaggtgacgtcagccctattggagtctctgaatcaacagcgtctgcagggccagctgtgcgacgtcagtattagggtgcagggccgagaattccgggctcatagagccgtgctggcagctagttccccatattttcacgaccaagtgctgctgaaggggatgacttccatctcgctacccagcgtgatggatcctggggcctttgagactgtgctggcctccgcttacacaggaagactgagcatggccgcagcagacattgtgaacttcttaacagtggggagcgtcttgcaaatgtggcatatcgtggataagtgcacagagctgctccgcgagggtagagcgagcgctaccacgacaataactaccgcggccgccacttcagtgaccgtgcccggggcaggagtccccagcggctctggcgggaccgttgcaccagctaccatgggatctgcccgcagccacgctagtagccgtgcttcagagaatcaatcccctagttcaagcaactatttctccccccgcgagagtacagacttctcttccagctctcaggaggcctttgccgccagcgcggttggtagtggcgagcgcagaggaggcggtcccgttttccccgcccctgtagtgggatccgggggcgccaccagcgggaagctgctgctcgaagctgatgagctatgtgacgacggaggcgacggtcgcggagccgtggtcccaggcgccgggctccgacgtcctacatacacccccccgagcatcatgccgcaaaaacattgggtgtacgtgaaacggggcggtaactgtcccgcgcctgctccccttgtgccccaggatccggacttggaggaggaagaggaggaggaggacctcgtgttgacttgcgaggatgatgaagatgaagagctcggcggttcctcccgcgtgcctgtgggcggcgggccagaggccacccttagcatttccgatgtcagaacgctctccgaacccccggacaagggagaagaacaagttaatttttgtgaatctagcaatgattttgggccttacgaagggggcggacccgtcgcaggcctcgatgacagtggtggacctacaccatcgtcatacgccccctctcatccaccacgacctctcttgcccctggacatgcagggtaatcagattctggtgttcccatctagttcatcaagcagtagttcacaggccccaggacagcccccaggtaatcaggccgagcacggcgccgtaaccgtggggggcacgagcgttgggtccttgggcgtgcctggatcagtgggaggtgtccccggtggaactggcagcggagacgggaacaagatctttttgtgtcattgcggcaaggcattcagccataaatctatgagagacagacacgtcaatatgcacctgaacctgaggccatttgactgtcctgtctgcaataaaaagttcaaaatgaagcatcatttgaccgaacacatgaaaactcacacgggcctaaagccctacgagtgcggagtttgtgccaagaaatttatgtggagagatagctttatgcgccatcggggccactgcgaaagaaggcatcgtcttgggggcgtgggagctgttcctggtcctggaacgcccaccggtccatccctgcctagtaaaagagaaagtccaggcgtgggcgggggatctggggacgaagcctccgctgcaacccccccatcttcaaggagggtatggtctcctcccagagtgcacaaagttgagatggggtttggcggaggggggggcgccaattag

SEQ ID NO: 57820 - DNA, 1905 bp, Artificial Sequence
  derived and/or modified sequence
atggaaccctcccccctatctcctagcggtgccgccttgcccctacccttgagccttgctcccccccccttgcctcttccggcagcggctgtggtgcacgtcagcttccccgaggttacttccgcattgctcgaaagcctaaatcaacagaggctgcaggggcagctgtgtgatgtcagcattagggttcagggccgcgagttccgcgcacatagggccgtcctggctgctagttcgccttattttcacgatcaggtcctgctgaaggggatgacatcaatctcactccctagcgtgatggaccctggcgcatttgagaccgttttagctagtgcctatacaggaagactatcaatggccgccgcagacatagtgaacttccttactgtcggttctgtcttgcagatgtggcacatagttgataagtgcactgagctcctgagagaagggcgcgcctcagccacaaccactatcaccactgctgctgccacctctgtcaccgttccaggcgctggggtgcctagcggctcaggcggtaccgtggccccggcgacaatgggttcggcaaggagccacgccagctctagggcctccgagaaccagagccccagtagttctaattacttcagccctagagagtccactgacttttccagttccagccaggaagccttcgcagcgagtgcagtcggctcaggagaaaggcgcgggggcggccctgtctttcccgcccccgtcgtcggatctggcggtgcgacgtctggtaaacttttgttggaagccgacgagttgtgtgatgatggtggcgatggaagaggggcagttgttccaggagcaggcctgaggaggccaacctacaccccaccttccatcatgcctcagaagcattgggtgtacgttaaacggggtggaaactgccccgcacccgcgccactggtcccacaggaccctgacctggaggaggaggaggaagaagaagatctggtcctgacctgcgaggatgacgaagatgaagagctcggaggcagctctagggtgccggtcgggggcgggcccgaggccaccctgtccatcagtgacgtgcgcaccctctcagaacctcccgataagggggaggagcaggtcaatttctgcgagtcgtctaacgattttggcccctatgagggcgggggtcctgtggctggactagacgattccggcggtccaacaccatcatcctacgcaccctcccacccccctaggcctctgttgcctctggatatgcagggcaatcagatcctggtgtttcctagcagcagttctagctcctcctcccaggcacctggacaacctccaggcaatcaggcggaacacggagctgtaacggtcggcgggaccagcgtcggtagcctgggggttcccgggagcgttggcggtgttcccggcgggaccggctcaggagatggcaacaaaattttcctgtgccactgcggcaaggctttctcgcacaaaagcatgagagatcggcacgtcaatatgcatttgaatctcaggcccttcgactgtcccgtctgtaacaagaaattcaagatgaagcatcatctgactgagcacatgaagactcacaccggcttgaagccctacgagtgcggggtgtgcgccaaaaagtttatgtggcgtgactcatttatgcgccacagggggcactgcgagcgccggcatcggctcggcggtgtgggtgcagtccccggcccaggaacccctactggaccatctctgcccagtaaaagagaatcacccggtgtgggcgggggatcaggggatgaagctagcgctgcaacgcctccttcctctcgacgcgtgtggagtcctcccagagtgcacaaagtggagatgggctttgggggcggcggcggcgcgaattag

SEQ ID NO: 57821 - DNA, 1905 bp, Artificial Sequence
  derived and/or modified sequence
atggaaccgagtcctctttcaccgagtggggccgccctacccctgcccctctctctagccccccccccccttcccctcccggctgctgccgttgtacatgtgtcattccctgaggttactagcgccctcctggagagcctcaaccagcaacggctgcagggtcagctgtgtgacgtctccattcgtgtgcagggccgcgagtttagagcccatagagcagtgctagctgcctcaagcccctattttcatgaccaagtgctcttaaaaggaatgacctccatctccctgccctcagttatggatcctggcgcctttgagaccgttctggcttccgcatacactggtagactaagtatggctgctgccgacattgtaaattttttaacagtgggcagcgtcttgcagatgtggcatatcgtcgataagtgcaccgagctgttaagagaggggcgtgcgagcgccacaaccacgatcaccaccgccgcagccacctctgtgaccgtccctggcgctggagtgccaagcggtagcggtggcacagtcgctcccgcaacgatggggagcgcccggtcgcacgcttcttctcgagcatctgaaaatcagtcaccttcgagcagcaactattttagcccaagggaatcaacagacttttcgtcaagttcacaggaggcattcgcggcaagcgctgtgggctcgggggagcggcgcggtgggggccctgtgttcccggcccctgtcgtcggttcaggcggcgccacgagtggaaaactgctgttggaagccgacgaactctgtgacgacggaggtgatggccgcggcgcagtcgtccccggagccgggctgagacgtcctacatacaccccgccaagcattatgcctcaaaagcattgggtctacgtcaagaggggcgggaactgcccagctcctgctcccctggtgccacaggaccctgacctggaagaagaggaagaggaggaagatttagtgttgacctgcgaagacgacgaggacgaagagctgggcggctcgagcagggtgcctgtggggggaggccccgaagctacactcagtatctcggatgtcaggaccctctctgagccacccgataagggagaagaacaggtgaacttttgcgaatcctcaaatgacttcgggccttatgaaggcggcggcccggtggcaggacttgacgactcgggcggccccacaccaagttcgtacgcccccagccatcctccacgcccactgctccccctcgacatgcagggcaaccagatcttggtctttccctcgagttcctccagctcgagctcgcaggcacccggacaacctccaggcaatcaggccgagcacggggctgtgactgtagggggaactagcgtcggtagcctgggggttcccggctctgtaggaggcgtcccagggggaactggatccggagacggcaacaagattttcctttgccattgcgggaaggcattttcacataagtccatgagggacaggcacgtcaacatgcacttgaatctccgcccctttgactgtccagtttgtaataagaaattcaaaatgaagcatcaccttaccgagcacatgaagacacacactgggcttaagccttacgagtgtggggtgtgtgcgaagaagttcatgtggcgcgattcatttatgcgccaccgcggccactgtgaaagaagacacaggctgggaggcgtgggagcagtgccaggtcctggcacccccactggaccaagcctgcccagtaaacgcgagtcaccgggcgtgggtggtggatctggcgatgaagcctctgccgcaacacctcccagttccagacgtgtgtggtcgcctccccgggtgcataaggtggagatgggatttgggggtggaggcggcgcgaactag

SEQ ID NO: 57822 - DNA, 450 bp, Artificial Sequence
  derived and/or modified sequence
atggagccctcccccctgtcgcccagcggagcagctctgccactccctttgtcccttgcaccaccgcccctgccgctcccagcggccgcagtggtccacgttagctttcccgaggttacctccgcgttgttagagagtctcaaccagcagcgcctccagggccagctgtgcgatgtgagcattagggtacaagggcgtgagttcagagcacacagggctgtccttgccgcatcttctccgtacttccacgatcaggtcctgctgaagggaatgacctctatctctttgccatcagtcatggacccgggcgccttcgagacagtgctcgcctccgcttacaccggtagattatccatggcagccgcggatatcgtgaatttcctgacagtcggtagtgttcttcagatgtggcacatcgtggataaatgcactgaactgctcagagaatag

SEQ ID NO: 57823 - DNA, 450 bp, Artificial Sequence
  derived and/or modified sequence
atggagcctagtccgctcagcccatccggcgccgccctgcctttgccgcttagcctggcaccgccccccttgccgctgcccgccgccgcggtggtccacgtgagctttcccgaggtgacatcagctctcctcgagagtcttaatcagcaacgcctccaggggcagctctgcgatgtctcaattagagtgcaggggcgagaattcagagcccatcgggcagttctggcagctagttcgccatatttccacgaccaagttcttctgaagggcatgacctcaatctctctcccaagcgtgatggacccaggtgctttcgaaaccgtgctcgctagtgcctatacagggagactgagtatggcagccgctgatattgtgaattttttaacagtgggaagcgtactgcagatgtggcatatagttgacaagtgtactgaactacttcgcgaatag

SEQ ID NO: 57824 - DNA, 450 bp, Artificial Sequence
  derived and/or modified sequence
atggagccgagtccactgtctccaagcggggcggctttacccctacctctgtcgctcgctccaccccctctgccattacctgcagccgccgttgttcacgtgtccttccccgaggtgaccagcgcactgctcgagtctcttaaccagcagaggcttcagggacagctgtgtgatgtaagcatccgggtacagggccgcgaattcagggcccacagggctgtgcttgccgcgtcttccccgtacttccacgaccaggtattgctcaagggtatgacctctattagtctcccctccgttatggaccccggcgccttcgaaactgtcctcgccagcgcatacacaggacggttgtcaatggcagctgctgatatcgtgaacttccttaccgtcggcagcgttctgcagatgtggcacattgtggacaaatgcacagaattgctgagagagtag

SEQ ID NO: 57825 - DNA, 1905 bp, Artificial Sequence
  derived and/or modified sequence
atggagcccagtcctctctcacccagtggagccgcactcccattgccactatccttggctcctccacctctcccattgccggctgccgctgttgtgcacgtgtccttccctgaggtgacatccgccctcctggagtccctgaaccagcaaagacttcagggccagctgtgcgacgtctcaatcagagtgcagggccgcgaatttagagctcacagagcggtgctggcagcatcaagcccgtatttccacgatcaggttctgttaaagggcatgaccagtattagtctgccgtcagttatggaccccggagccttcgagaccgtgctcgccagcgcctatactggtcggctgtctatggccgcggctgacatcgtaaatttcctgactgtcggctccgttttgcagatgtggcacattgttgacaaatgcactgaattactccgcgagggacgggcaagcgctaccacaaccatcaccaccgccgctgcaacaagcgttaccgtccccggggccggggtcccatccggttctggcggcaccgttgcgccagctaccatgggcagtgctcggtcacacgcaagttcccgcgcctccgagaatcagagccctagctctagtaactattttagccctcgagagtccacagacttcagctctagtagccaagaggcgttcgcggcgtctgcggttggcagcggtgaacggagaggtggtggacccgtctttcctgctccagtcgttggctccgggggagcgacctccgggaaattactgctcgaagctgatgaattatgtgacgacggtggggacggtcggggcgctgtagttcctggagccggcctgcgccgaccaacttacactccccccagcatcatgccacagaagcactgggtttatgtgaagcgaggtggcaactgtccggctcccgcccccttggtcccccaggatcccgacctggaagaggaggaagaggaggaagatctggtgctgacctgcgaagatgacgaagacgaagaattggggggttcctccagggtaccagtcgggggcggtcccgaggcaaccctgtctatctcagatgtgcgaactttgagtgagccccctgacaagggcgaggaacaggttaatttttgcgagtccagcaatgatttcggcccatatgaagggggagggcccgtagctgggctcgatgactccggagggcccaccccgtcgagttacgccccaagccatcccccacgaccactgcttccactcgatatgcaaggaaaccagatcctggtgttcccatctagttccagcagctctagctctcaggcccccggccagccacccggcaaccaggcagagcacggtgccgtgactgttggaggcacctccgtaggaagtctcggcgtgcccggctccgtgggcggagttccaggaggcactggaagcggcgacggcaacaagatcttcttgtgccattgtgggaaagctttcagccataaaagcatgcgagacagacacgtcaacatgcatctgaatttgcggccttttgattgccctgtgtgcaacaaaaaatttaagatgaagcatcacctaacagagcacatgaaaactcacaccggattgaagccttacgaatgcggggtttgtgccaaaaagttcatgtggagagattcttttatgaggcatcggggacattgtgaacgaagacatcgcttgggcggggtgggggctgtccctggccctggtacacccacagggccaagcttaccatcaaagcgagaatcgcccggcgtgggcgggggcagcggggacgaggcctctgccgcaactcctcctagcagccggagagtgtggtcgccaccgagagttcacaaggttgaaatgggcttcggagggggtggaggtgctaactag

SEQ ID NO: 57826 - DNA, 1905 bp, Artificial Sequence
  derived and/or modified sequence
atggaaccctctcccttgagcccttctggtgccgcccttcctcttcctctctcactggctccccctcccctgcctctccccgccgctgccgtagtacacgtatcctttccggaagtcacctctgctctactggagagtctgaatcaacagaggctccaaggtcaactctgcgatgtgagcattcgtgtacaaggtcgcgagttcagagcacacagagccgtccttgcagcatcaagcccatacttccacgaccaggtgctactcaaaggcatgacatctatatctctcccctcagtcatggatcctggagcatttgagacagtactcgcctcagcctatacaggacggctgtctatggcagcggctgatatcgtgaacttcttgacagtcggctctgtactccaaatgtggcacatcgtggacaagtgtaccgagcttctgagggaggggagagcttccgccaccacaacaataacaacagctgccgcaaccagtgtcactgtgcctggtgccggggtgccttccgggtctgggggaaccgtagctccagcgacaatgggctctgcccgctctcacgcttcttccagagcgtccgagaaccagtctcccagttcaagcaattacttctcacctcgagaatccaccgatttttctagttcaagccaggaagcctttgccgccagtgctgtggggtctggggaaaggcggggtggcggtccagtgtttcccgctccagtcgtaggctcgggcggagccaccagcgggaagctgctcctggaagccgacgagctttgtgatgatggtggcgatggccgcggcgcagttgtgcccggcgccggactcagacgccccacttacacccctcccagcatcatgcctcagaaacattgggtctacgtgaagaggggcggcaattgcccagcccctgcccctctggtgccccaggacccagaccttgaagaagaggaggaagaggaagacctcgtgctcacatgtgaagatgatgaagacgaggagcttggaggctcctcccgggtccctgttgggggcggtccagaggccactctgtctatttccgacgtccgcaccctgtccgaaccacctgataagggtgaagagcaggtgaacttttgtgaaagttccaacgacttcggcccttacgaagggggcggtcccgttgccggcctggatgacagcggaggccctaccccaagctcatacgctccgagtcatccgcctcggcctctgctcccactggatatgcaggggaaccagatcttggtgttcccctcaagctctagctctagctctagccaggcacctggacagccccccggcaatcaggctgaacatggcgctgtgacggttggtgggactagcgtaggatctttgggtgtacctgggtcagtgggcggtgttcccggagggacaggcagcggggacggcaataaaatttttctctgtcactgcggcaaagcatttagccacaagagtatgagagatagacacgtgaacatgcacctcaatctgagaccctttgattgtccagtctgcaataaaaagttcaaaatgaagcaccacctgaccgaacacatgaagacacacaccggcttgaaaccgtatgagtgcggcgtgtgtgccaagaagttcatgtggagagattccttcatgagacacagaggccactgcgagagaagacaccgtctgggaggagtgggcgctgtccctggtcctggaacacctacagggccttctctccctagtaaacgcgaaagcccgggcgtgggaggaggtagcggtgatgaggcctccgctgccacacctccatccagccggagagtatggtcaccccccagagtccacaaggttgagatgggattcggaggggggggaggtgccaactag

SEQ ID NO: 57827 - DNA, 1905 bp, Artificial Sequence
  derived and/or modified sequence
atggagccttctcctttatcaccatcaggcgccgccctgccactgcctcttagcttggctccccccccactgcctttgcctgcagctgcagtcgtgcatgtgtcatttccggaagtgactagtgctctgttggaatccttgaaccagcaacgcctacagggacaactgtgcgacgtgagcatccgcgtccaggggagggagttccgtgctcatcgggccgtcctggcggctagtagcccatacttccacgaccaggtcttgcttaaaggcatgacgagcattagcctgcctagtgtcatggaccctggcgcttttgagacggtcttggcttcggcctacacagggaggctgtccatggccgccgccgacattgtgaacttcctgaccgtcggtagtgtgctgcaaatgtggcatatcgtggacaagtgtacggagcttctcagagaggggcgcgcatccgccaccaccaccattaccacagcggcagcgacctctgtgactgtccccggtgccggcgtgccatcaggatcaggcggcacagtagctccagccactatgggttctgcccggtcacacgcctccagtagagcctccgagaatcagagcccttcttcatctaactactttagtcctcgagagtcaactgacttcagctcgtctagccaggaagcgtttgcagcatccgcggtcggatctggtgagagacgcggaggcgggcccgtgtttccggcccctgtagtagggagcggaggcgcgacgagtggcaaactgttactggaggctgatgaactgtgtgacgacggcggggatggtagaggcgccgtcgttcctggtgcagggctcagacgtcctacctacactcccccctctattatgcctcagaaacattgggtttacgtgaagagggggggaaattgccctgccccagcacctctggtcccacaggaccctgacctggaggaagaagaggaagaggaggacttggtgcttacgtgcgaggatgacgaggacgaagagctgggagggtcctctagagtacctgttgggggtgggccggaagccacactatccatttctgacgtgcggactctgagtgaacctcccgataaaggggaagagcaggttaatttctgcgagagcagcaacgacttcggtccttacgaagggggtggcccagttgctgggctggacgactccggcgggccgaccccttccagttatgcaccttcacaccccccgcgccccctcctgcccctggacatgcaggggaaccagatactcgtgtttccaagcagctcaagtagttcttccagccaggcccctgggcagccaccaggaaatcaggccgagcacggagccgtgaccgtcggtggcacctcagtgggctccctgggagtgccagggagcgtgggcggagtccctggtgggaccgggtctggcgacggtaacaagattttcctctgccactgcggcaaggcatttagtcacaaatccatgagagatcggcacgtgaacatgcacctcaatctcagacccttcgactgccctgtctgtaacaaaaaattcaagatgaaacaccatctaacagagcacatgaagacccacacaggactgaaaccctatgaatgtggcgtctgtgcaaagaagtttatgtggcgtgacagtttcatgcgccatagaggccattgcgagcggcgtcaccgcttagggggggtgggcgctgttcccggcccaggtactcccaccggcccctccctgcccagcaagagggagagccccggcgtcggcggaggctctggggacgaggcatccgccgcgactccacccagctctaggagagtgtggtctcctcctcgagtacacaaggtggaaatgggatttggcgggggcggcggcgcaaattag

SEQ ID NO: 57828 - DNA, 1905 bp, Artificial Sequence
  derived and/or modified sequence
atggagcccagccccctgagccccagcggggccgccctgcccctgcccctgagcctggcccccccacccctgcccctgcctgctgctgctgtggtgcacgtgtccttccctgaggtgaccagcgccctgctggagagcctgaaccagcagaggctgcagggccagctgtgtgatgtgtccatccgggtgcagggccgggagttccgggcccacagagctgtgctggccgccagcagcccctacttccatgaccaggtgctgctgaagggcatgaccagcatcagcctgcccagcgtgatggaccccggggcctttgaaacagtgctggccagcgcctacacaggccgcctgtccatggctgctgctgacatcgtgaacttcctgactgtgggctctgtgctgcagatgtggcacatcgtggacaagtgcacagagctgctgcgggagggccgggccagcgccaccaccaccatcaccacagctgctgccacctctgtgacagtgcctggagctggggtgcccagcggcagcggcggcaccgtggccccagccaccatgggcagcgcccggagccacgccagcagccgggccagcgagaaccagagccccagcagcagcaactacttcagcccccgggagagcacagacttcagcagcagcagccaggaggcctttgctgccagcgctgtgggcagcggggagaggagaggaggcggccctgtgtttcctgcccctgtggtgggcagcggcggggccaccagcggcaagctgctgctggaggctgatgagctgtgtgatgatggaggagatggccgcggggctgtggtgcctggagctggcctgcggcggcccacctacaccccacccagcatcatgccccagaagcactgggtgtatgtgaagagaggaggcaactgcccagccccagcccccctggtgccccaggaccctgacctggaggaggaggaggaggaggaggacctggtgctgacctgtgaagatgatgaagatgaggagctgggcggcagcagccgggtgcctgtgggcggcggccctgaggccaccctgagcatcagtgatgtgaggaccctgtctgagcccccagacaagggggaggagcaggtgaacttctgtgagagcagcaatgactttggcccctatgaaggaggcggccctgtggccggcctggatgattctgggggccccacccccagcagctatgcccccagccaccccccccggcccctgctgcccctggacatgcagggcaaccagatcctggtgttccccagcagcagcagcagcagcagcagccaggcccctggccagcccccaggcaaccaggccgagcacggggctgtgacagtgggcggcacctctgtgggcagcctgggcgtgcccggctctgtgggcggcgtgcctgggggcactggaagtggagatggcaacaagatcttcctgtgccactgtgggaaggccttcagccacaagtccatgagggacagacatgtgaacatgcacctgaacctgcggccctttgactgccctgtgtgcaacaagaagttcaagatgaagcaccacctgacagagcacatgaagacccacacaggcctgaagccctatgaatgtggggtgtgtgccaagaagttcatgtggagggacagcttcatgaggcaccggggccactgtgaaagaagacaccggctgggcggcgtgggcgctgtgcccggccctggcacccccaccggccccagcctgcccagcaagcgggagagccctggggtgggcggcggcagcggagatgaggccagcgctgccaccccacccagcagccggcgggtgtggagccccccccgggtgcacaaggtggagatgggctttggaggcggcggcggggccaactag

SEQ ID NO: 57829 - DNA, 1905 bp, Artificial Sequence
  derived and/or modified sequence
atggagcccagccccctgagccccagcggcgccgccctgcccctgcccctaagcctggccccccccccactgcctctacctgccgctgcggtcgtgcacgtgtctttccctgaggttacctctgccctgctggaatcactcaaccagcagcggttgcagggacaattatgtgatgtgtctatcagagtccagggtcgggaatttagagcgcaccgggctgtgctggccgccagttccccttacttccacgatcaggtactcttgaaagggatgacatctatcagtcttccttctgtgatggatcctggtgcatttgagaccgtgctcgctagcgcgtacaccggacgactctctatggcagcagccgatatcgtgaattttctcaccgtcgggagcgtcttacagatgtggcacatcgtcgataagtgtaccgaacttctcagggagggcagggctagcgccacaaccactatcacaaccgccgcggccaccagcgtgacagtccccggtgctggtgtcccatctgggagtggagggacagtagcaccggctaccatggggtcagcccgcagccacgccagttcacgagcctctgagaaccaaagcccttctagttcaaactacttcagtccccgcgagtccactgatttttcaagcagctcccaggaggcctttgcagcttcggctgtgggtagcggtgagcgtcgtgggggtggccctgtgttccccgccccagtggtggggtccggtggtgccacaagcggcaaactcctgcttgaggcagacgagctgtgtgacgatggaggagatggaagaggagccgttgttccgggcgcaggactgaggcggcccacctacactccaccatccattatgccgcagaaacattgggtctatgttaaacgcggaggcaattgccctgcccccgcccccttggtgccccaggaccccgacctggaggaggaggaggaggaggaagatctggtcctgacttgtgaagatgacgaagacgaagagctgggtgggtccagtagagtgccagtcggaggaggacccgaggccactctgagtatcagcgacgtccgaactttaagcgaaccccccgacaagggagaggaacaggttaatttctgcgagtcttccaacgacttcggcccatatgagggagggggccccgtggccggtcttgacgactccgggggccccacccctagctcctatgctccttcacaccccccacggcccctgcttcccctagacatgcagggcaaccagatactcgtgttcccaagcagttcttcatcctccagctctcaggcccccggccagccccccgggaaccaggctgaacacggagctgtcaccgtcggtgggacgtcagtgggaagtttgggtgtcccagggagtgtggggggagtgccaggaggcacaggatctggggatggtaacaaaatattcctgtgccactgcggtaaagccttttcacacaagagcatgcgggaccggcacgtgaatatgcacctgaacctgcgcccgtttgactgccctgtatgtaataagaaatttaaaatgaagcaccatctcactgagcatatgaagacacacacgggactgaaaccctacgaatgtggggtgtgcgcaaagaaattcatgtggagggacagtttcatgagacacaggggccattgtgaaagaagacaccgcctgggcggcgtgggagccgtgccaggccctgggacacccacaggaccttcccttccaagcaaaagggagtcgccgggggtagggggcggctccggtgacgaagcctccgccgctaccccgccctcgagccggagagtctggtcccccccccgggtccacaaggtggaaatggggttcggaggcggtggcggcgcgaactag

SEQ ID NO: 57830 - DNA, 1905 bp, Artificial Sequence
  derived and/or modified sequence
atggagcccagccccctgagccccagcggcgccgccctgcccctgcctttgagcctggcccctccacccttgccccttccagccgccgctgtcgtgcatgtgtcgttccctgaggtcacatccgcactcctggagtcgctgaatcagcagagacttcaaggccagctgtgcgacgtcagcatccgggtgcaaggccgagagtttcgggcccatcgggcagtccttgccgcttcgtcaccttattttcacgatcaggtgcttctcaagggtatgacatcaatctcactccctagcgtaatggatcctggcgcgttcgaaacagtgctcgcatcagcctatacaggaaggttgtccatggccgcagccgatatcgtgaactttctaacggtcggctcggtcctgcagatgtggcatattgttgataagtgcacagagctacttagggagggtcgtgccagcgctacgaccactattacaacagccgcagccaccagtgtgaccgtccctggagcaggcgtgccctcaggaagcggaggcacagtagcgcccgcaacaatgggatctgcccggagccatgcatcctccagagcttcagagaaccaatcacctagttcttctaattatttttccccaagggagtcaaccgatttcagttctagcagccaggaggcatttgccgctagtgcagtaggaagtggggaacgcaggggagggggacccgtgtttcctgctcccgtggtcggatccggtggagctacatctggcaaactgcttcttgaagccgacgagctgtgcgatgatggtggagacgggaggggggccgtagtaccaggagccggcctgaggcgccctacctatacccccccgagcattatgccacagaaacattgggtgtacgtgaagagagggggtaactgtccggcccctgcccccctggtgccacaggatcctgatctggaagaagaggaggaagaagaagacttggtgctgacttgtgaggacgatgaggatgaggaacttgggggaagttctcgtgtcccagtcggaggtggtcccgaggcaactctgtctatctcagatgtgcgcacgctctctgagccacccgataaaggcgaagagcaggtcaatttttgcgagtcctcaaacgattttggtccgtacgaagggggcgggcccgtggcggggcttgatgattctggaggacccacaccctcatcctacgccccaagtcaccccccgaggccattacttccactggatatgcaggggaatcagatactggtttttccctccagctcttccagtagcagctcccaggctccaggccagccaccaggaaaccaggccgagcatggcgcagtcacagttgggggaaccagtgtgggcagtctcggggtgccaggcagtgttgggggggtcccagggggaacaggcagcggcgacgggaataagatcttcttgtgccactgcggaaaggccttctcccacaaatcaatgcgggaccggcacgtcaacatgcatttgaacctgcgccccttcgactgtcccgtgtgcaacaaaaagttcaagatgaaacaccatcttacggagcatatgaaaactcacactggattaaaaccatatgagtgtggagtgtgcgcaaagaagtttatgtggcgggatagcttcatgcggcacaggggacattgcgaaagacgacaccggcttggtggcgtgggagccgtgccgggtcccggaaccccaaccggtccttctctgccgagtaagagagaatcacctggggtcggtgggggcagcggggatgaggcctctgcagccaccccaccatcatcaaggcgggtgtggtccccgccaagagtacataaggtagagatgggattcggcgggggcgggggtgcgaattag

SEQ ID NO: 57831 - DNA, 1905 bp, Artificial Sequence
  derived and/or modified sequence
atggagcccagccccctgagccccagcggcgccgccctgcccctgccactctccctcgcaccaccccccctccccctcccagcagctgcagtggtccacgtctcgttcccagaggtgacaagcgcccttcttgagtcccttaatcagcagcggctgcaaggccagctgtgcgatgtctccatccgggtgcaggggcgtgagttccgcgctcacagggctgtattagcggctagctccccttacttccacgatcaggtgctcctcaagggtatgaccagcataagtctgccctccgtcatggacccaggagcctttgaaacagtgcttgcctcagcgtacactggtcgcctgtccatggctgccgcggatatcgtgaattttctgacggttggcagtgtgcttcagatgtggcatatcgtcgataaatgtaccgagctgttgagggaaggccgcgccagcgccactaccacgatcactacggcggctgccacgagtgtcacggtgccgggagcgggggtgccaagtggttcaggaggaactgtggcccccgcaaccatgggctccgcccgctcccatgcttctagccgagctagcgaaaatcagagcccgtcttcttcaaactatttcagcccccgggaatcaacagacttcagttccagtagtcaagaagcattcgcagcctctgccgtgggcagcggcgagagacggggaggcgggcctgtgtttcccgccccagtggttggaagcggaggtgctacatcagggaaactgctccttgaagcagacgaactgtgcgatgatggaggcgatggtagaggcgccgtggtgcccggtgccggtttacggagacctacctacacaccgccctctattatgccacagaagcactgggtgtatgtgaagaggggagggaactgccccgctcccgcccctcttgtgccacaggatccggacctggaagaggaagaggaggaggaggatcttgtcctaacctgtgaggacgacgaggacgaggaacttggaggttcctcccgcgtgccagtcggcggaggaccagaggcaactctatctatctccgacgtcaggacccttagcgaacctcccgacaagggcgaagagcaggtaaatttttgcgaatcgtcaaacgatttcggaccatatgaaggcggtggacctgtcgccgggctggatgacagtgggggccccacaccatcatcttatgcgcctagccacccaccccgccctctgttacccctggatatgcaagggaatcagattctggtctttccgtcatcttccagttcttcctccagtcaagcgcctggtcagccgcccggaaatcaggccgagcatggggcagtgacagtgggcggtacttctgtcggctctctcggggtgcccggatccgtcgggggcgtgccaggcgggaccgggtctggcgatggtaataagatatttctgtgccactgcggaaaggcgttcagtcacaaatctatgagagatagacacgtgaatatgcaccttaaccttcggccatttgattgcccggtgtgtaacaagaaattcaaaatgaagcatcatctgaccgagcacatgaaaacacacacggggctcaagccatacgagtgcggtgtgtgtgccaagaagtttatgtggagagacagtttcatgcggcaccgcggacactgcgaacgtagacatcgcctcggcggcgtgggggctgttccaggccccggaacccctaccgggccatccctgccttctaagagagagtctcccggcgtgggtggaggctcaggtgatgaagcatcagccgcgacacctccctcctcccgaagagtctggagtcccccaagagttcacaaggttgaaatgggcttcggcggagggggcggcgctaactag

SEQ ID NO: 57832 - DNA, 450 bp, Artificial Sequence
  derived and/or modified sequence
atggagcccagccccctgagccccagcggcgccgccctgcccctgcccctatctcttgctcctccccctctgccgctccctgccgctgcggttgttcacgtttctttccctgaagtgacctccgctctactggagtcactgaaccagcagcgcctgcagggccagctctgcgatgtttcaatcagggttcaaggaagagagttcagagctcacagagccgtgctagccgctagttccccttacttccacgatcaagtgctattgaaaggaatgacctcaatttctctgccctctgtcatggacccaggggcattcgaaactgtgctcgcatccgcttataccgggaggctgtcaatggcagcagcggacatcgtcaacttcttgacagtggggtccgtcctgcagatgtggcatattgtggataaatgtaccgaactcctgagggagtag

SEQ ID NO: 57833 - DNA, 450 bp, Artificial Sequence
  derived and/or modified sequence
atggagcccagccccctgagccccagcggcgccgccctgcccctgcccctatccctggcaccgcctcctttgcccctgccagctgccgctgtggtgcacgtgtctttccctgaggtgacaagcgcattgcttgaaagcctcaaccagcagaggctgcaaggccagctgtgtgatgtcagcattagggtgcagggccgcgagtttcgggcccacagggccgtgctggcagcttcctccccatattttcacgatcaggttttactaaaaggaatgacttccatcagcctccctagtgtgatggacccaggggctttcgagaccgtattggcaagtgcatataccggtaggctcagcatggccgcagctgatatcgtcaatttcctcactgttggtagcgtcctgcaaatgtggcacattgtggacaaatgcaccgaactgctgcgtgagtag

SEQ ID NO: 57834 - DNA, 450 bp, Artificial Sequence
  derived and/or modified sequence
atggagcccagccccctgagccccagcggcgccgccctgcccctgccgctcagcttagcccccccacctctgccactgccggccgctgctgtggtgcacgtgagcttcccagaagtgacctctgccttgctggagtccttgaaccagcagaggctgcagggccaactgtgcgacgtttctatcagggtgcagggtcgagagtttcgagcccaccgcgccgttttggcggcttccagcccctactttcacgatcaggtgctgctaaaaggcatgacgagcatttccctacccagtgtaatggaccccggtgccttcgagaccgttctcgcctctgcttataccgggaggctgtcaatggccgctgccgacattgtgaacttcctgaccgtcggttccgtgctccagatgtggcacattgtggacaaatgcaccgagctcttacgggagtag

SEQ ID NO: 57835 - DNA, 1905 bp, Artificial Sequence
  derived and/or modified sequence
atggagcccagccccctgagccccagcggcgccgccctgcccctgccactgtccctggctcccccaccacttcccctgcctgccgccgctgtagtccacgtctcattccctgaagtaacttccgctcttttagaaagtctgaatcaacagcgactgcaaggccagctgtgcgacgtttcgatcagggtgcagggccgggagttccgcgctcacagagccgtccttgctgccagctccccatattttcacgatcaggtcctgctgaagggtatgaccagtatctctctcccttcagtgatggaccccggcgcctttgaaaccgtgcttgcctccgcatatacgggtagactctcaatggcagcagccgacatcgtaaatttcctcacagttgggagtgtgttacagatgtggcatattgtggacaaatgtacagaattgttgagagaaggaagggcttccgccacaaccaccattaccactgccgccgccacatcggtcactgtacctggcgcgggggtgcctagcggaagcgggggaactgtggctcccgcaaccatgggaagtgctagatctcatgcgagtagtagagccagcgaaaatcagagtccaagttcatctaactacttctccccccgggaatcaaccgacttctccagttcttctcaggaagccttcgctgctagcgctgttggttccggtgaacgacgaggcgggggtcctgtctttcctgctcccgtcgtgggatcgggaggagcgacttctgggaagctcttgctcgaggcagatgagttgtgcgacgatgggggggatgggagaggtgcagtggtgcccggcgccgggctacgccgccctacttatacacccccttcgattatgccacagaaacactgggtttacgtgaagaggggcggtaattgtcctgctccagcgcctcttgtgccccaggaccccgatcttgaggaagaagaggaagaagaggatctggtcctgacatgcgaagatgacgaggatgaagagctcggaggttcttcacgggtcccggttggagggggaccggaagcgactctaagtatctccgacgtgcgcactctgagtgaaccacctgataagggagaggagcaggtaaatttctgtgagagcagtaatgactttggcccatacgaaggtggtggtcctgtcgcaggtctggatgactctggcgggccaactccttcatcatacgcaccatcacacccgccacgcccattacttccactggacatgcagggcaaccaaatactcgttttcccatcgtcctcttcatctagtagctcccaagcgcctggccagcctccgggaaaccaagctgaacacggtgccgtgaccgtgggcggcactagcgtcggcagtctgggggtcccagggtcagtgggcggagtgcctggcggcactggtagcggggatggtaacaaaattttcctctgccactgcggcaaagcattctcccacaagtctatgcgggaccgtcacgtaaacatgcacctgaacctgcgcccatttgactgtccggtctgtaataagaagtttaaaatgaagcaccacctaactgaacacatgaagacacataccgggctaaaaccttacgagtgcggcgtatgcgcgaagaagtttatgtggagggatagctttatgaggcaccgggggcattgtgagagaaggcacaggctgggcggggtcggggcagtgccaggacccggcacaccaacgggcccatccctgccctccaaacgggagagtccgggggtggggggcggtagtggcgatgaggcatccgccgccactccaccatcttctcggcgcgtgtggagccctccccgcgtgcataaggtcgagatggggttcggcggtggggggggggcaaactag

SEQ ID NO: 57836 - DNA, 1905 bp, Artificial Sequence
  derived and/or modified sequence
atggagcccagccccctgagccccagcggcgccgccctgcccctgccactaagtcttgcccccccccccttgcccctgccagccgctgcggtcgtacatgtcagcttccctgaagtcacttccgcactgctcgaatctctgaatcagcaaagactccagggccaactttgcgatgtgagcatccgcgtccaaggccgggaatttcgggctcatagggctgtcctagctgctagcagcccatactttcacgatcaggttttacttaaggggatgaccagcatttccctcccttccgtgatggacccaggggccttcgaaaccgttctggcctcagcttatacagggcggctgtcgatggctgcggccgatattgtgaacttcctgacagtcggtagcgtgctgcagatgtggcacatcgtggataagtgtactgaattactgcgagaggggcgtgcatccgcaacaacaactatcaccaccgccgcagcaactagcgtaacggtgcccggcgctggtgtccctagcggatccgggggaacggtggcccccgctaccatgggaagtgcaagatcacacgcctccagtcgggcttcagagaaccagagtccaagctcctccaattatttttcccccagggagagtacggacttcagttcctcctcccaggaagctttcgctgctagcgccgtcggaagtggtgaaagaaggggcggggggcctgtgttccccgcccccgtcgtgggctccggcggcgctacgtctggaaagctccttcttgaagcggacgaactgtgcgatgatggaggggatggtcgcggggctgtggtgcccggggccggactcaggcgtccaacttacactcctccctccattatgcctcaaaaacattgggtctatgtcaagcgagggggcaattgccccgcccctgcccctcttgtcccacaagacccagacctggaggaagaggaagaggaagaggatttggtactgacctgcgaggacgatgaggacgaagagctcggaggatcatcaagagtccctgtgggtggtggaccggaagccacactgtcaatttcagatgtccggacgctgtcagaacccccagacaaaggtgaagagcaggtgaacttttgtgaaagtagtaacgacttcgggccctatgaggggggaggacccgtggcaggacttgatgattcgggagggcccactccaagttcctatgcacccagccatccaccaagaccactgctgcccctggatatgcagggcaatcaaatcttggtgttcccctcaagctctagcagctcctcatcccaagcgcccggtcaacctcccggcaatcaggccgaacacggcgcagtgacagtcggagggacgtctgtggggtccctgggagtcccgggctccgtgggaggcgtacccggcggcacaggaagcggcgacggtaacaagatctttttgtgccattgcggtaaggcattctcacacaagagcatgcgagaccgacacgttaatatgcatctgaatcttcgaccgtttgactgtccagtgtgtaataagaagtttaagatgaaacatcaccttaccgagcacatgaagactcacaccgggctgaagccctatgaatgcggcgtgtgcgctaaaaagtttatgtggcgcgattcctttatgcgacatcgcggccactgtgaacgtagacacaggctgggcggtgtgggtgctgtcccaggccctgggacccctaccggaccttcattgccctcaaaacgggaatcacccggggttggaggtggatcaggcgacgaggcctctgccgcaaccccaccttccagccgccgggtgtggtcaccccctcgtgtacataaggtagagatggggtttgggggaggcggaggggccaattag

SEQ ID NO: 57837 - DNA, 1905 bp, Artificial Sequence
  derived and/or modified sequence
atggagcccagccccctgagccccagcggcgccgccctgcccctgcctctgtctcttgcaccaccacctttgccactgccagccgctgcggtggtgcacgtttcattccccgaggtgacaagcgcactactggagagcctgaaccagcagcgtctccaggggcaactgtgcgatgtgtccatccgggtgcagggaagggaatttagagcccaccgagccgtgctggccgctagcagcccctactttcacgaccaagtactcctgaaaggaatgacctcaatatctcttccctccgtaatggatccaggcgcattcgagaccgtcctggctagcgcttacacagggcggttgtcaatggcggccgcagacattgtcaatttccttacagtgggatcggtgcttcagatgtggcatatcgtggacaagtgtacggagctccttagggaagggagggcctcagctacaacaactatcacaacagccgcggctacaagcgtgacagtgcccggcgctggagtgccatctgggtccggaggaaccgttgcacccgctaccatggggtccgctaggagtcatgctagcagcagagccagtgagaaccaaagcccgagctcaagcaattacttctcccctcgagaaagtactgatttcagtagcagttcccaagaagctttcgccgcctctgctgtcgggtccggagagagaagaggcgggggtccagtcttccccgcccccgtggttggtagcgggggcgcaacgagcggaaaattactgcttgaggccgacgagctgtgtgatgacggcggagacgggcgcggggcagtggtccctggtgccggtcttagacgccccacgtatacgcccccaagcatcatgcctcagaaacactgggtctacgtgaagcgcgggggcaactgccccgcgccggcccccctggtccctcaagaccccgatcttgaagaggaggaggaggaggaggacctggtcctcacctgcgaggatgacgaggatgaagagctcgggggtagttcacgcgtacctgttggcgggggcccagaggcaactctttccatttctgatgttcgaacactatcagagcctcctgacaagggtgaggaacaggtgaacttctgtgagtccagtaacgattttggaccatatgaaggcggaggaccagtggccggactcgatgattctggcggaccaacgccgtccagctacgctccgtcccatcccccaaggcctcttctgcctttggatatgcagggcaaccagatcttagtgttcccatccagctcctctagctctagtagtcaggcccccggtcagcctcctggtaaccaggctgaacatggagcggttacggtgggcgggacatctgttgggagcttgggagtgccaggtagcgtgggcggggtcccaggcgggactggatcgggcgatgggaacaagatattcctgtgccactgtggaaaggcgttctcccacaagtcaatgagggaccgacatgtgaacatgcaccttaatctgcgtccattcgattgtcccgtatgtaacaaaaagttcaagatgaagcaccacctgactgagcacatgaagacccacaccggactgaaaccttacgaatgcggagtgtgcgccaaaaaatttatgtggcgagattcgttcatgcgtcacagaggtcattgtgaacgcaggcaccggcttggtggcgtgggggcggtgccgggtcctggaacaccaacaggaccctccctgccatcaaaacgagaaagcccaggcgtcggaggtggctccggcgacgaagctagcgcggccacccctcccagctctaggcgcgtgtggagtcctccgagagtgcataaagtggaaatggggtttggaggaggaggcggggcaaactag

SEQ ID NO: 57838 - DNA, 1905 bp, Artificial Sequence
  derived and/or modified sequence
atggagccttccccgttgtctcctagtggggctgctcttccgctgcccctgtcccttgcccctccccctttgcctctgcctgccgctgccgtcgtccacgtgtcttttccggaggtgacatcagcccttcttgaatctctgaaccagcagcggctgcagggtcagctgtgtgatgtttccattcgggtacagggtagggaattcagagcccatcgagcggtcctcgccgcatcatctccctatttccacgatcaggtgctcctcaaaggtatgacctcaatctccctgccctctgtgatggatccaggggcatttgagactgtcctcgctagcgcctacactgggagactgtcgatggccgcagctgacatagttaatttcctgactgttggttccgtgcttcagatgtggcacatagtggataaatgtactgagctcctgagggaagggagggccagcgcgaccacaacaataacaacagccgcagcgacatccgtgactgtccccggtgccggtgtgccttctgggtctggtgggacagtggcgccagcgacaatgggttctgctcgctcccacgcctccagcagggcaagcgagaaccagtcacccagttcctccaattacttttctccacgcgaaagcaccgatttttctagtagttctcaggaggcatttgccgcttctgcagttggatcgggcgaacgcaggggtggcggacctgttttcccagctcccgttgtcggctccggcggagcaacctctggaaagttgctgctcgaggccgatgaactctgtgacgatggaggggatgggcgtggagccgtcgtcccaggggcaggattaaggcgtccgacttacacacctccttccatcatgccacagaaacactgggtctatgttaagagggggggaaattgtcccgcacccgctcctctagttccccaggaccccgatctggaggaggaggaggaggaggaggacctagtgctaacctgcgaggacgacgaagatgaagagcttggcggtagttcgagagtacccgttgggggaggccctgaagcgacactaagtataagtgacgtgaggactttaagtgagccccctgataagggtgaagaacaggtcaatttctgcgagagttctaacgacttcggcccttacgaagggggaggacctgtggctggtctggatgactccggaggccctactccaagttcatatgctccctcccatccacccagaccccttctaccacttgatatgcaagggaatcagattctggtgttcccaagctctagtagctcatcaagtagccaggccccagggcaacccccagggaaccaggcggagcacggagccgtgacggtgggaggaacttccgtgggaagtttgggggttcctggatctgtgggaggtgtcccaggtggcacagggagtggggatggcaataaaatttttctgtgtcattgtgggaaggctttcagccacaaatcaatgagagaccgacacgttaacatgcatctcaacctgaggcctttcgactgccctgtgtgtaacaagaagttcaagatgaaacaccacctgactgaacatatgaagacccataccggcttgaagccctacgaatgcggtgtgtgcgccaaaaaattcatgtggcgtgacagcttcatgagacatcggggacactgcgaaaggaggcaccgcttaggcggagtcggcgctgtgcccggaccagggacaccaacaggaccgtcactgccctctaagcgagagtctcccggtgttggtggcggatctggtgatgaggccagcgcagccacccccccatcatcccgcagggtgtggagtccacctagagttcataaggtcgaaatggggtttggcggtggcggtggcgcaaactag

SEQ ID NO: 57839 - DNA, 1905 bp, Artificial Sequence
  derived and/or modified sequence
atggaacctagcccgctgagtccaagcggggctgccttgcctcttccccttagtctcgctccgccacccctacccctgcccgcagctgccgttgtacacgtgtcctttccagaagttacctccgccttgcttgagagcctgaaccagcagagactgcagggtcaactatgtgatgtttcaatccgggtgcagggcagagaatttcgagcgcatagggccgtactcgcggcttcaagtccctattttcatgaccaggtcttgttgaaaggaatgacttcaatctccctaccttccgtgatggatccaggtgccttcgagacagtactagcctctgcctataccgggagattgtcaatggccgcagccgatatcgtgaactttcttacagttggaagcgtgctccaaatgtggcatattgtcgacaaatgtactgaacttttaagagaaggccgtgcttctgccacaaccactataacaaccgccgcagctacttccgtcactgtgccaggggctggggtgccgagcgggtcaggaggtaccgtcgcaccagctaccatgggatccgcaaggagtcatgcaagctcgagggcgtcggaaaaccagtcaccatcctcaagcaactatttcagtccgcgagaatccaccgacttttcctctagtagccaggaggctttcgctgcatcagcagttggctccggcgagaggagaggcggaggaccagtgttccccgctcccgttgtgggcagtgggggagctactagtggcaagttgttgctggaggccgacgaattgtgtgacgacggcggtgatggcagaggggcagtagtccctggtgcgggacttcgcaggccgacttacacccctcccagcattatgccacagaaacattgggtctacgtgaaacggggtggcaattgccctgcccctgcgcctttggttccacaggatcccgatttggaggaggaggaagaggaggaagacctggtgctcacctgtgaagacgatgaggatgaggagctgggagggtcttccagggtccccgttggcggtgggcctgaagccaccctctccatttcagacgtgagaacgctttctgagcctcccgacaagggtgaggaacaggttaacttttgcgagtcctccaacgattttggcccttacgagggtggtggacctgtggcaggccttgatgactccggaggcccaactccatcttcctacgccccttctcacccccctaggccgttgctcccgctcgatatgcagggaaaccagatccttgtgtttcccagtagctcttcctcctcctcctcccaggctcccggacaaccaccaggtaatcaggccgaacatggtgccgtgacagtcggcggaacaagtgtcggctccctgggggtgcccggttcagtcggcggtgtccccggtggaaccggatccggtgatggcaacaaaattttcctgtgtcactgtggaaaggctttctctcacaaaagcatgcgagacaggcacgtcaacatgcacctaaatcttcggcctttcgattgcccagtatgcaacaaaaagttcaaaatgaagcaccacttgactgaacatatgaagacacacacgggccttaaaccatatgagtgtggagtttgcgctaaaaaatttatgtggagagattcatttatgcgccatcggggacattgtgaacgacggcacagattaggcggagtgggcgcagtgcctggccctgggacgcccacgggaccctcactcccgtccaagcgagaaagcccaggggttggcggtgggtccggtgacgaagcctctgccgctacaccaccttcttcacggagagtctggagccctcctagagtccacaaggtggagatggggttcggtggtgggggtggagccaattag

SEQ ID NO: 57840 - DNA, 1905 bp, Artificial Sequence
  derived and/or modified sequence
atggagccttctcccttgagcccatccggggcagctctgcccctgccgctcagtttagcgccaccccctctgcctctgcccgcagcagctgtggtgcacgtgtcctttccagaagtcacgtctgctctattggagtcattaaatcaacagcgcctccagggacagctgtgcgatgtgagtatacgagttcagggcagggaatttagagctcacagagctgttttggccgcaagctcaccatatttccacgaccaggtactactaaaagggatgacaagcatctctctgccttctgtcatggacccaggagccttcgagactgtgctggcttccgcctacaccgggaggctgtcaatggccgcagccgatattgtgaatttcctcaccgtaggctcggtcttgcagatgtggcatatcgtggacaagtgcacagaactgctcagagagggcagggccagtgctacgacaactatcactacagccgcagcaacttccgttaccgtgcctggcgcaggtgtgccctcgggtagcggaggcaccgtggcacccgcaaccatgggtagcgctaggtctcatgctagctctagagcatccgaaaaccagtccccttcatccagcaattattttagtccgcgagagtctaccgacttttccagttcctcccaggaagccttcgctgcctcagccgttggctcaggcgaacgtcgtggcggaggaccagtgtttcctgcccctgtggtaggaagcggaggcgctacatctgggaagctcctactggaagccgatgaactgtgtgatgatggcggtgacggtaggggggctgtcgtgccgggagctggtctgaggagacctacttatacaccgccttcgatcatgccgcagaaacattgggtctatgttaaaagaggtggaaattgccctgccccagcaccacttgtcccccaagacccagatttggaggaagaagaagaagaggaggatttggtgctgacctgcgaggatgacgaggacgaagagcttggtgggtctagtagggtccccgttggcggtgggcctgaggccaccctttctatatcagacgtgcgcaccctgtccgaacccccagacaaaggggaagaacaagtcaatttctgcgaatcctccaacgattttggcccttacgaggggggtggacctgtggctggattggacgattctggagggcctaccccatcttcttacgctcccagccacccgcctcggcctctgctccccctggatatgcaaggaaatcagatcctggtgttcccctctagtagctcaagcagtagtagtcaggctcctgggcagccgcctggaaatcaagccgagcacggggcagtgactgtggggggaacttcagtgggctcactgggcgttccaggaagtgtcggaggcgtgcctgggggaaccggctctggcgacggcaataagatcttcctgtgtcactgcggcaaggctttttcccacaagagcatgagggatcggcatgtgaacatgcacctgaacctgaggccattcgactgtcctgtttgcaataagaagttcaaaatgaagcatcatctgacagagcatatgaagactcacaccgggttgaagccctatgagtgcggcgtgtgcgctaaaaaattcatgtggcgggattccttcatgcggcacaggggtcattgtgaaagacggcacagactgggcggagtgggagccgttccaggtcctgggacccctacaggcccttcacttccttctaaacgcgagagcccaggagtcggtgggggatctggcgacgaggcctccgccgctactccaccaagtagcagacgggtttggtcccctccgagggtacacaaagtagagatgggcttcggtgggggaggtggagccaattag

SEQ ID NO: 57841 - DNA, 450 bp, Artificial Sequence
  derived and/or modified sequence
atggaaccatccccactgagcccttcaggggctgcactgcccctgcctctttcactggctccccctcctctcccactgcctgcagcggcagtggtgcatgtctcttttcccgaggttactagcgctttgctcgaatcacttaatcaacagaggctgcagggtcaattgtgcgacgtttccattcgggtccaggggcgagagtttagagcccaccgcgctgtcctggccgcttcatctccatattttcatgatcaggttcttctaaagggcatgacctctatttctctgccttctgttatggacccgggagcttttgagacggtactggcttctgcgtacactggaaggctctcaatggctgctgcggacattgttaactttctcaccgtcgggtccgttctccagatgtggcacatcgtggacaagtgcacagaactgttgcgtgaatag

SEQ ID NO: 57842 - DNA, 450 bp, Artificial Sequence
  derived and/or modified sequence
atggaaccatcgccgctcagcccttcaggagctgccctgcccctgcccttaagtttggcaccaccgcctcttcctctgcccgcagctgctgttgtgcatgtcagctttcccgaggtgacctcagcccttcttgaatcactcaaccagcagcggctgcagggccagttgtgcgatgtctctatacgtgtccagggacgcgagttccgggcacatagggcagttttggccgcttcatcaccatatttccatgaccaggtgttgctcaagggaatgaccagcatcagcctcccaagcgtcatggacccaggggcattcgaaactgtgctggcatctgcttacaccggtcgactgtccatggccgctgccgacatcgtgaattttctgacagtgggctctgtgctgcaaatgtggcacatcgtagataagtgtactgagctgctgcgcgagtag

SEQ ID NO: 57843 - DNA, 450 bp, Artificial Sequence
  derived and/or modified sequence
atggaaccctccccactgtcccccagcggagcagcattaccgttgcccctttcgctcgctccaccccctctcccactgccggcagccgctgtggtccacgtcagctttcccgaggtcacttccgctctcttagagtcactgaaccaacaacgtctgcagggacagctgtgcgacgtctctatccgggtccagggcagagaattccgcgcacatcgtgctgtgctcgcagcttcttcgccatatttccacgatcaggtgctgctaaaaggaatgacaagcatcagccttccatctgtgatggatcctggcgcttttgagacagtgctggccagtgcctacactggccgactgtcgatggcagccgcagatattgttaactttctaactgttggttccgtgctccagatgtggcacattgtcgataagtgcaccgagttattacgcgagtag

SEQ ID NO: 57844 - DNA, 1905 bp, Artificial Sequence
  derived and/or modified sequence
atggagccttcacccctctctccaagtggagccgctctgcccctccccctgtccctggctcccccaccccttcccctccctgccgcagctgtcgtgcatgtttcttttccagaggtgacaagcgctcttctcgagtcgctgaaccagcaaagactccagggacagctgtgcgacgtgagcattagggttcagggtagagaattccgggcacaccgggcagttctggctgcctctagcccatacttccatgaccaagtcctcctcaaggggatgacctccatctccctcccctcggtgatggaccctggcgcattcgagacagtgttggcttctgcttatacgggacgcctgtcgatggctgcagccgatatagtgaactttctaacagtggggagtgtgctacagatgtggcatatcgtcgacaaatgtacagagttgctgagagaaggccgtgcgtcagctaccacaaccataaccactgcggctgccacaagcgtgaccgtccccggagcaggggtgccttccgggagtggtgggacagtcgccccagctaccatggggagtgcacgtagccacgcctcttctagagcgtccgaaaatcagtcgccttcaagttctaactacttttctcctagggagagcacagacttttcaagtagcagccaagaagcctttgccgcaagcgccgttggcagcggagaacgcagaggtggcggtcccgtttttcccgctcctgtggtggggagcggtggcgctaccagcggcaaactactgctggaggcggacgaattatgcgatgacggaggtgacggtagaggagcggtcgttccaggagcgggtctccgcagacctacctatacaccaccgagtatcatgccacagaagcattgggtgtacgtgaaaaggggagggaattgcccagcacctgctcctctggtcccccaagaccctgatttggaagaagaggaagaggaggaggacctggtgctgacttgtgaggacgacgaggatgaggagttagggggaagctccagggtgcctgttggaggtggccctgaggccacacttagcatctcagatgtccgcaccttgtcagagccaccagataagggggaagagcaggtgaacttctgtgaatcatcgaacgacttcgggccttatgaaggaggcggacctgtggccggattggacgactctggaggcccaacgccatcatcttatgcgccttcgcaccccccaagaccactgctgcccctggacatgcagggcaaccagatccttgtgttccctagctcctctagttcatccagctcccaggcccctggccagccgcctggaaatcaggctgagcacggagcagtaacggtgggaggcacttccgttggctctttgggggtgcctggctcagtcggaggggtgcccggtggcaccgggtcgggtgacgggaacaaaatttttctctgccactgtggcaaagcgttctcgcacaagagcatgagagatcgtcacgtgaacatgcatctgaatttgaggccttttgattgcccagtgtgcaataagaaattcaaaatgaagcatcatctcactgagcacatgaagacacacacaggcctaaaaccttatgagtgcggcgtgtgcgccaaaaagtttatgtggcgggatagcttcatgcgccaccgtggccactgtgagaggcgtcaccggttggggggtgttggtgccgtaccgggacctggaacccccacgggcccaagcctgccctcgaagagggaatctccaggcgtcgggggaggcagcggagacgaggcttctgccgcaaccccgccatcgtcccgaagggtgtggtctccacccagggtccacaaggtcgagatgggctttggagggggtggcggagctaactag

SEQ ID NO: 57845 - DNA, 1905 bp, Artificial Sequence
  derived and/or modified sequence
atggagccttcacccctatctccatcgggcgcagcacttccacttcctctctcgttagccccaccacctcttccattacccgcagcggctgtggtccatgtctcattcccagaggtaacttctgccctcctggagagtcttaaccagcaacgcttacaaggtcaactgtgtgatgtgagcatccgggtgcagggtcgcgagttcagggctcaccgagcggtgctggcggcatcctcaccctatttccacgatcaagtgttgttgaagggcatgactagtatctctcttccttcagtgatggacccaggagctttcgaaaccgtgctggccagtgcttataccggccgacttagtatggcggctgctgatattgtaaactttctgaccgtgggcagtgtcctgcagatgtggcacatagttgacaagtgcactgaattgctcagagaaggacgcgcttccgccaccaccacaattaccaccgcggctgccacgtccgttaccgtgcccggtgcaggcgttccatccgggtccgggggaaccgtcgccccagctacaatggggagcgcccgatctcatgcttctagcagagctagtgaaaaccagagcccatcctctagtaactacttctctccgagggagtcaactgatttttcttctagttctcaggaggcttttgctgcctctgccgtcggcagcggcgagaggagaggtgggggaccagtctttccggcacccgtggtgggctctggaggcgctacatctggaaagctcctgctggaggcagacgagctgtgcgatgacggaggggacgggcgtggggctgtggtcccaggtgccggacttcggcgacccacatacacacctccatcaattatgccgcaaaagcactgggtatatgtcaaacggggtggcaattgtccagctcccgcacccctagtacctcaagacccagacctcgaagaggaggaggaggaggaagatcttgtgctgacctgtgaggacgacgaagacgaggagctgggcggatcctctcgggttccagtcgggggaggaccagaggccaccctgagcattagtgatgtgagaaccctcagcgaaccacctgataaaggggaggagcaagtaaatttctgtgaaagttcaaatgactttggcccttacgaaggcggtggtcccgtggcgggactggacgacagcggaggccctactccatcttcctacgcaccctcccatccgcctcgtcccctactgccattggacatgcagggcaatcaaatcctggtgtttccttcctctagcagtagcagtagtagccaagccccaggacagccccctgggaatcaggccgaacacggcgcagtcacagtgggaggcacttccgttggtagtttaggggttccaggcagtgtgggaggggtcccaggcggtacgggaagtggagatggtaacaaaattttcctgtgccactgcggcaaggcattttcccataagtccatgagggacaggcatgtgaacatgcacctgaacctgcggccattcgactgcccagtgtgcaataaaaaattcaagatgaaacatcatctgaccgagcacatgaagactcatacaggacttaagccctacgagtgcggagtttgtgccaagaagttcatgtggcgagactcattcatgcgacatcggggacattgcgaaagaaggcatcggctgggcggagttggggcagtgccgggaccgggtactccaaccggaccctctctccccagcaagagggagagcccaggggtcggagggggttccggtgacgaggcttccgccgcaactccccctagtagccggagggtttggtcccctcctagagttcataaagtagagatgggtttcggaggtgggggaggtgctaattag

SEQ ID NO: 57846 - DNA, 1905 bp, Artificial Sequence
  derived and/or modified sequence
atggagccgtcccccctgagcccatctggagccgctctgccattgcctctaagtctggcacctccacctttgccacttcccgcagccgctgtggtccacgtgtcattcccagaagtgacaagtgccctgctggagtcattaaaccagcagcgcctgcaaggtcagctgtgcgacgtatcgatacgggtacaggggcgagaatttcgggcacatcgtgccgtgcttgctgcgagcagcccctactttcatgatcaggtgttgcttaaggggatgacatccatctccctgccttctgtcatggatccaggcgctttcgagaccgtgctcgcttccgcttatacaggtcgtctgtcaatggccgctgcagatatagttaacttcctcactgtgggttctgtcctgcagatgtggcatattgtggataagtgtaccgagctactgagggaagggagagcgagcgcgacgaccaccatcactacagcagccgctacaagcgtgacggtgccgggtgctggcgtgccctccggctcaggcggtactgttgccccagcgaccatgggctccgcaagaagccatgccagcagtagagccagtgagaatcagtccccctcaagctccaattacttcagcccaagggagtctacggattttagcagctcatctcaagaggccttcgccgcttccgctgtaggctctggcgaacgcagaggcggtggccctgtgttccctgcacccgtagtaggaagcgggggtgccacctctgggaagttgctgctggaagctgacgagctgtgcgatgacggtggcgacggacgcggagcagtcgttccgggtgccggtctgcgtcgcccaacttatactccaccaagtatcatgccacagaagcactgggtatatgtgaaacgaggtggcaactgccccgcacccgctccgttagttccacaggacccagatcttgaggaagaggaagaggaagaagacctggtgcttacatgcgaggatgacgaggatgaggaacttggcggatcctccagagtaccggtgggcggaggccctgaggcaacgctttcaatctcagacgtgcgtaccctaagtgagcccccagataaaggagaggaacaggttaatttttgtgaatctagcaatgactttggaccctacgagggcggtgggcctgtggcaggattagacgattccggagggccaactccctcttcttatgctccctctcatcctcctcggccacttctgcccctcgatatgcagggaaaccagatcttggtcttccccagttcaagcagctcttcctcatcacaggccccaggccagcccccaggcaatcaggccgaacacggagctgttaccgtgggagggacgtccgtcggctcattgggagtacccggatctgttggaggggtcccaggagggacgggcagcggcgatggcaacaagatcttcctctgtcactgcggtaaggctttttcccacaagtctatgagagatcgccatgtcaatatgcacctgaacctgagaccatttgattgccccgtgtgtaacaagaagtttaaaatgaagcatcacttgactgagcacatgaagacacataccggccttaagccatatgagtgcggcgtctgcgccaaaaagtttatgtggagagactcttttatgagacatcgagggcactgtgagcggaggcacaggctcggaggcgtgggtgccgtgccaggcccaggaacaccaacggggccaagtcttcccagtaaaagagagagccctggggtcgggggtggcagtggagatgaggccagtgccgcaacacctcccagcagcaggcgagtctggtcacctcctcgagtccacaaagttgagatgggttttgggggagggggtggagccaattag

SEQ ID NO: 57847 - DNA, 2651 bp, Artificial Sequence
  derived and/or modified sequence
cgcaagatggcggcgggaggggcccaggttgctgctctggccgccgagtgaggggcggggggggcccgggggcgcgcggcccgagacccccccggccgccctcctcctttctttgttcctgtggctgggggggtatcccctccctccacaacatggagccatctcctctgtctcccagtggggcagcacttcccctgccgctgtcgctggctccgcccccactacccctgccagcagctgcagtggtacatgtgtccttccctgaggtgaccagtgccctcttggagtccctcaatcagcagcgtctgcagggccagctctgcgatgtatctatcagagtgcagggccgggagttccgggctcatcgggctgtcctggctgcctcctccccttacttccatgatcaggtcctactcaaaggcatgacctccatctcgctgcccagtgtcatggacccaggcgcctttgagactgtcctagcctccgcttacactggccgcctcagcatggctgctgctgacattgtcaacttccttacagtggggtctgtgctccaaatgtggcacattgtggacaagtgcactgaactactccgagaaggccgggcctcagctaccaccaccatcactactgctgcagccacctctgtcactgtccctggtgctggggtgccatccgggagtgggggcactgtggcccctgctaccatgggctctgcgcgctcccatgcctccagccgggccagtgagaatcaatctcccagcagcagcaactacttcagccccagggagtccactgatttctcatcttcctcccaagaggcatttgcagcttctgcagtgggcagtggggagcgtcgaggaggtggccctgtattcccagcccctgtcgttggcagtggaggggccacatctggaaagctgctgctggaggcagatgagctgtgcgatgatggtggggatgggaggggggcagtggttcctggggctgggctccggagacccacctacacaccccctagcatcatgccacagaaacactgggtatacgtgaagcgaggtggtaattgcccagcgccagcacccctggttccccaagacccagatctggaggaggaagaggaggaggaagatctggtgttgacctgtgaggatgatgaagatgaagaactagggggtagctccagggttccagtggggggagggcctgaggctaccctcagcataagtgatgtccgtaccctgagtgagcccccagacaagggggaggagcaggtcaacttctgtgagtcctccaatgactttggcccatatgagggtgggggtcctgtggcaggtcttgatgactcaggggggccaactccctcttcctatgccccctcccaccctcctcgaccgctccttcccttggacatgcagggcaaccagatcctggtcttcccgtcgtcgtcttcatcctcatcctcacaggctcctggccaaccaccagggaaccaagcagaacacggggcagtgaccgtggggggcacgtcggtggggagcctgggtgtgccgggtagcgttggtggggtccctggagggactggcagtggggacgggaataagatctttctgtgccattgtgggaaggccttctcccacaagagcatgcgggaccggcacgtgaacatgcacctcaatctgcggccgtttgactgccccgtgtgcaacaaaaagttcaagatgaagcaccatctgactgagcacatgaagacgcacacaggtctcaagccctacgagtgcggagtctgcgccaagaagttcatgtggcgagacagcttcatgcgccaccgaggacactgtgagcgccggcaccgcctgggcggggtcggggccgtacctgggcctgggactcccacggggccatccttgccgtccaagagagagtctcccggagtgggcgggggcagcggcgacgaagcgagtgcggccacgcccccgtccagcagacgtgtctggtccccacccagagtccacaaggtggagatgggcttcggtggaggtggaggagcaaactgaaggggcaggctactggggtggggtagctttcgggaaagggaataaggagcacgatgcaagggcgctgtggcccccgggtgatctcccaccacacttactgtcttcctttatctctgtggacttgtatatattctggaaggggaaccacagtttcaccatcacccgcccattctactactcaacccctcccccccaaggtatttccagaactaaacccttcctttccctctgatgggtacactgaagcccctgctccacagagtagattgcacatggagggagggagagggggcgtgttgaacatcctgcagtcacagggtcaggggtcaggtggttgtagtctgtgcctgaagtctgtgtttgtgttgtcgtggagacaaggcctttgagccccacccttgtcctagaacctaccccctctcaaggatgcgctctttatttctaccctgtttctccccgccacccccgacttcccgtggaaattcccaactcggttctcatggaggagtgggtggagacaaggagggagtaagtcgtaggagtacaaggtttttattttttttaacagtgattaaaatatttattggtcattta

SEQ ID NO: 57848 - DNA, 2651 bp, Artificial Sequence
  derived and/or modified sequence
cgcaagatggcggcgggaggggcccaggttgctgctctggccgccgagtgaggggcggggggggcccgggggcgcgcggcccgagacccccccggccgccctcctcctttctttgttcctgtggctgggggggtatcccctccctccacaacatggagccatctcctctgtctcccagtggggcagcacttcccctgccgctgtcgctggctccgcccccactacccctgccagcagctgcagtggtacatgtgtccttccctgaggtgaccagtgccctcttggagtccctcaatcagcagcgtctgcagggccagctctgcgatgtatctatcagagtgcagggccgggagttccgggctcatcgggctgtcctggctgcctcctccccttacttccatgatcaggtcctactcaaaggcatgacctccatctcgctgcccagtgtcatggacccaggcgcctttgagactgtcctagcctccgcttacactggccgcctcagcatggctgctgctgacattgtcaacttccttacagtggggtctgtgctccaaatgtggcacattgtggacaagtgcactgaactactccgagaaggccgggcctcagctaccaccaccatcactactgctgcagccacctctgtcactgtccctggtgctggggtgccatccgggagtgggggcactgtggcccctgctaccatgggctctgcgcgctcccatgcctccagccgggccagtgagaatcaatctcccagcagcagcaactacttcagccccagggagtccactgatttctcatcttcctcccaagaggcatttgcagcttctgcagtgggcagtggggagcgtcgaggaggtggccctgtattcccagcccctgtcgttggcagtggaggggccacatctggaaagctgctgctggaggcagatgagctgtgcgatgatggtggggatgggaggggggcagtggttcctggggctgggctccggagacccacctacacaccccctagcatcatgccacagaaacactgggtatacgtgaagcgaggtggtaattgcccagcgccagcacccctggttccccaagacccagatctggaggaggaagaggaggaggaagatctggtgttgacctgtgaggatgatgaagatgaagaactagggggtagctccagggttccagtggggggagggcctgaggctaccctcagcataagtgatgtccgtaccctgagtgagcccccagacaagggggaggagcaggtcaacttctgtgagtcctccaatgactttggcccatatgagggtgggggtcctgtggcaggtcttgatgactcaggggggccaactccctcttcctatgccccctcccaccctcctcgaccgctccttcccttggacatgcagggcaaccagatcctggtcttcccgtcgtcgtcttcatcctcatcctcacaggctcctggccaaccaccagggaaccaagcagaacacggggcagtgaccgtggggggcacgtcggtggggagcctgggtgtgccgggtagcgttggtggggtccctggagggactggcagtggggacgggaataagatctttctgtgccattgtgggaaggccttctcccacaagagcatgcgggaccggcacgtgaacatgcacctcaatctgcggccgtttgactgccccgtgtgcaacaaaaagttcaagatgaagcaccatctgactgagcacatgaagacgcacacaggtctcaagccctacgagtgcggagtctgcgccaagaagttcatgtggcgagacagcttcatgcgccaccgaggacactgtgagcgccggcaccgcctgggcggggtcggggccgtacctgggcctgggactcccacggggccatccttgccgtccaagagagagtctcccggagtgggcgggggcagcggcgacgaagcgagtgcggccacgcccccgtccagcagacgtgtctggtccccacccagagtccacaaggtggagatgggcttcggtggaggtggaggagcaaactgaaggggcaggctactggggtggggtagctttcgggaaagggaataaggagcacgatgcaagggcgctgtggcccccgggtgatctcccaccacacttactgtcttcctttatctctgtggacttgtatatattctggaaggggaaccacagtttcaccatcacccgcccattctactactcaacccctcccccccaaggtatttccagaactaaacccttcctttccctctgatgggtacactgaagcccctgctccacagagtagattgcacatggagggagggagagggggcgtgttgaacatcctgcagtcacagggtcaggggtcaggtggttgtagtctgtgcctgaagtctgtgtttgtgttgtcgtggagacaaggcctttgagccccacccttgtcctagaacctaccccctctcaaggatgcgctctttatttctaccctgtctctccccgccacccccgacttcccgtggaaattcccaactcggttctcatggaggagtgggtggagacaaggagggagtaagtcgtaggagtacaaggtttttattttttttaacagtgattaaaatatttattggtcattta

SEQ ID NO: 57849 - DNA, 2645 bp, Artificial Sequence
  derived and/or modified sequence
gaataaatgcttcggccgaaccaagtcctgagctcccagcggaggaggggacctgatcttttaagagacccccccggccgccctcctcctttctttgttcctgtggctgggggggtatcccctccctccacaacatggagccatctcctctgtctcccagtggggcagcacttcccctgccgctgtcgctggctccgcccccactacccctgccagcagctgcagtggtacatgtgtccttccctgaggtgaccagtgccctcttggagtccctcaatcagcagcgtctgcagggccagctctgcgatgtatctatcagagtgcagggccgggagttccgggctcatcgggctgtcctggctgcctcctccccttacttccatgatcaggtcctactcaaaggcatgacctccatctcgctgcccagtgtcatggacccaggcgcctttgagactgtcctagcctccgcttacactggccgcctcagcatggctgctgctgacattgtcaacttccttacagtggggtctgtgctccaaatgtggcacattgtggacaagtgcactgaactactccgagaaggccgggcctcagctaccaccaccatcactactgctgcagccacctctgtcactgtccctggtgctggggtgccatccgggagtgggggcactgtggcccctgctaccatgggctctgcgcgctcccatgcctccagccgggccagtgagaatcaatctcccagcagcagcaactacttcagccccagggagtccactgatttctcatcttcctcccaagaggcatttgcagcttctgcagtgggcagtggggagcgtcgaggaggtggccctgtattcccagcccctgtcgttggcagtggaggggccacatctggaaagctgctgctggaggcagatgagctgtgcgatgatggtggggatgggaggggggcagtggttcctggggctgggctccggagacccacctacacaccccctagcatcatgccacagaaacactgggtatacgtgaagcgaggtggtaattgcccagcgccagcacccctggttccccaagacccagatctggaggaggaagaggaggaggaagatctggtgttgacctgtgaggatgatgaagatgaagaactagggggtagctccagggttccagtggggggagggcctgaggctaccctcagcataagtgatgtccgtaccctgagtgagcccccagacaagggggaggagcaggtcaacttctgtgagtcctccaatgactttggcccatatgagggtgggggtcctgtggcaggtcttgatgactcaggggggccaactccctcttcctatgccccctcccaccctcctcgaccgctccttcccttggacatgcagggcaaccagatcctggtcttcccgtcgtcgtcttcatcctcatcctcacaggctcctggccaaccaccagggaaccaagcagaacacggggcagtgaccgtggggggcacgtcggtggggagcctgggtgtgccgggtagcgttggtggggtccctggagggactggcagtggggacgggaataagatctttctgtgccattgtgggaaggccttctcccacaagagcatgcgggaccggcacgtgaacatgcacctcaatctgcggccgtttgactgccccgtgtgcaacaaaaagttcaagatgaagcaccatctgactgagcacatgaagacgcacacaggtctcaagccctacgagtgcggagtctgcgccaagaagttcatgtggcgagacagcttcatgcgccaccgaggacactgtgagcgccggcaccgcctgggcggggtcggggccgtacctgggcctgggactcccacggggccatccttgccgtccaagagagagtctcccggagtgggcgggggcagcggcgacgaagcgagtgcggccacgcccccgtccagcagacgtgtctggtccccacccagagtccacaaggtggagatgggcttcggtggaggtggaggagcaaactgaaggggcaggctactggggtggggtagctttcgggaaagggaataaggagcacgatgcaagggcgctgtggcccccgggtgatctcccaccacacttactgtcttcctttatctctgtggacttgtatatattctggaaggggaaccacagtttcaccatcacccgcccattctactactcaacccctcccccccaaggtatttccagaactaaacccttcctttccctctgatgggtacactgaagcccctgctccacagagtagattgcacatggagggagggagagggggcgtgttgaacatcctgcagtcacagggtcaggggtcaggtggttgtagtctgtgcctgaagtctgtgtttgtgttgtcgtggagacaaggcctttgagccccacccttgtcctagaacctaccccctctcaaggatgcgctctttatttctaccctgtctctccccgccacccccgacttcccgtggaaattcccaactcggttctcatggaggagtgggtggagacaaggagggagtaagtcgtaggagtacaaggtttttattttttttaacagtgattaaaatatttattggtcatttacttggcttcccg

SEQ ID NO: 57850 - DNA, 2645 bp, Artificial Sequence
  derived and/or modified sequence
gaataaatgcttcggccgaaccaagtcctgagctcccagcggaggaggggacctgatcttttaagagacccccccggccgccctcctcctttctttgttcctgtggctgggggggtatcccctccctccacaacatggagccatctcctctgtctcccagtggggcagcacttcccctgccgctgtcgctggctccgcccccactacccctgccagcagctgcagtggtacatgtgtccttccctgaggtgaccagtgccctcttggagtccctcaatcagcagcgtctgcagggccagctctgcgatgtatctatcagagtgcagggccgggagttccgggctcatcgggctgtcctggctgcctcctccccttacttccatgatcaggtcctactcaaaggcatgacctccatctcgctgcccagtgtcatggacccaggcgcctttgagactgtcctagcctccgcttacactggccgcctcagcatggctgctgctgacattgtcaacttccttacagtggggtctgtgctccaaatgtggcacattgtggacaagtgcactgaactactccgagaaggccgggcctcagctaccaccaccatcactactgctgcagccacctctgtcactgtccctggtgctggggtgccatccgggagtgggggcactgtggcccctgctaccatgggctctgcgcgctcccatgcctccagccgggccagtgagaatcaatctcccagcagcagcaactacttcagccccagggagtccactgatttctcatcttcctcccaagaggcatttgcagcttctgcagtgggcagtggggagcgtcgaggaggtggccctgtattcccagcccctgtcgttggcagtggaggggccacatctggaaagctgctgctggaggcagatgagctgtgcgatgatggtggggatgggaggggggcagtggttcctggggctgggctccggagacccacctacacaccccctagcatcatgccacagaaacactgggtatacgtgaagcgaggtggtaattgcccagcgccagcacccctggttccccaagacccagatctggaggaggaagaggaggaggaagatctggtgttgacctgtgaggatgatgaagatgaagaactagggggtagctccagggttccagtggggggagggcctgaggctaccctcagcataagtgatgtccgtaccctgagtgagcccccagacaagggggaggagcaggtcaacttctgtgagtcctccaatgactttggcccatatgagggtgggggtcctgtggcaggtcttgatgactcaggggggccaactccctcttcctatgccccctcccaccctcctcgaccgctccttcccttggacatgcagggcaaccagatcctggtcttcccgtcgtcgtcttcatcctcatcctcacaggctcctggccaaccaccagggaaccaagcagaacacggggcagtgaccgtggggggcacgtcggtggggagcctgggtgtgccgggtagcgttggtggggtccctggagggactggcagtggggacgggaataagatctttctgtgccattgtgggaaggccttctcccacaagagcatgcgggaccggcacgtgaacatgcacctcaatctgcggccgtttgactgccccgtgtgcaacaaaaagttcaagatgaagcaccatctgactgagcacatgaagacgcacacaggtctcaagccctacgagtgcggagtctgcgccaagaagttcatgtggcgagacagcttcatgcgccaccgaggacactgtgagcgccggcaccgcctgggcggggtcggggccgtacctgggcctgggactcccacggggccatccttgccgtccaagagagagtctcccggagtgggcgggggcagcggcgacgaagcgagtgcggccacgcccccgtccagcagacgtgtctggtccccacccagagtccacaaggtggagatgggcttcggtggaggtggaggagcaaactgaaggggcaggctactggggtggggtagctttcgggaaagggaataaggagcacgatgcaagggcgctgtggcccccgggtgatctcccaccacacttactgtcttcctttatctctgtggacttgtatatattctggaaggggaaccacagtttcaccatcacccgcccattctactactcaacccctcccccccaaggtatttccagaactaaacccttcctttccctctgatgggtacactgaagcccctgctccacagagtagattgcacatggagggagggagagggggcgtgttgaacatcctgcagtcacagggtcaggggtcaggtggttgtagtctgtgcctgaagtctgtgtttgtgttgtcgtggagacaaggcctttgagccccacccttgtcctagaacctaccccctctcaaggatgcgctctttatttctaccctgtttctccccgccacccccgacttcccgtggaaattcccaactcggttctcatggaggagtgggtggagacaaggagggagtaagtcgtaggagtacaaggtttttattttttttaacagtgattaaaatatttattggtcatttacttggcttcccg

SEQ ID NO: 57851 - DNA, 558 bp, Artificial Sequence
  derived and/or modified sequence
atgggagtcaaagttctgtttgccctgatctgcatcgctgtggccgaggccaagcccaccgagaacaacgaagacttcaacatcgtggccgtggccagcaacttcgcgaccacggatctcgatgctgaccgcgggaagttgcccggcaagaagctgccgctggaggtgctcaaagagatggaagccaatgcccggaaagctggctgcaccaggggctgtctgatctgcctgtcccacatcaagtgcacgcccaagatgaagaagttcatcccaggacgctgccacacctacgaaggcgacaaagagtccgcacagggcggcataggcgaggcgatcgtcgacattcctgagattcctgggttcaaggacttggagcccatggagcagttcatcgcacaggtcgatctgtgtgtggactgcacaactggctgcctcaaagggcttgccaacgtgcagtgttctgacctgctcaagaagtggctgccgcaacgctgtgcgacctttgccagcaagatccagggccaggtggacaagatcaagggggccggtggtgactaa

SEQ ID NO: 57852 - DNA, 749 bp, Artificial Sequence
  derived and/or modified sequence
aagcttttggaccctcgtacagaagctaatacgactcactatagggaaataagagagaaaagaagagtaagaagaaatataagagccaccatgggagtcaaagttctgtttgccctgatctgcatcgctgtggccgaggccaagcccaccgagaacaacgaagacttcaacatcgtggccgtggccagcaacttcgcgaccacggatctcgatgctgaccgcgggaagttgcccggcaagaagctgccgctggaggtgctcaaagagatggaagccaatgcccggaaagctggctgcaccaggggctgtctgatctgcctgtcccacatcaagtgcacgcccaagatgaagaagttcatcccaggacgctgccacacctacgaaggcgacaaagagtccgcacagggcggcataggcgaggcgatcgtcgacattcctgagattcctgggttcaaggacttggagcccatggagcagttcatcgcacaggtcgatctgtgtgtggactgcacaactggctgcctcaaagggcttgccaacgtgcagtgttctgacctgctcaagaagtggctgccgcaacgctgtgcgacctttgccagcaagatccagggccaggtggacaagatcaagggggccggtggtgactaagctgccttctgcggggcttgccttctggccatgcccttcttctctcccttgcacctgtacctcttggtctttgaataaagcctgagtaggaaggcggccgc

SEQ ID NO: 57853 - protein, 442 aa, Artificial Sequence
  derived and/or modified sequence
MVRSRQMCNTNMSVPTDGAVTTSQIPASEQETLVRPKPLLLKLLKSVGAQKDTYTMKEVLFYLGQYIMTKRLYDEKQQHIVYCSNDLLGDLFGVPSFSVKEHRKIYTMIYRNLVVVNQQEENSDELSGERQRKRHKSDSISLSFDESLALCVIREICCERSSSSESTGTPSNPDLDAGVSEHSGDWLDQDSVSDQFSVEFEVESLDSEDYSLSEEGQELSDEDDEVYQVTVYQAGESDTDSFEEDPEISLADYWKCTSCNEMNPPLPSHCNRCWALRENWLPEDKGKDKGEISEKAKLENSTQAEEGFDVPDCKKTIVNDSRESCVEENDDKITQASQSQESEDYSQPSTSSSIIYSSQEDVKEFEREETQDKEESVESSLPLNAIEPCVICQGRPKNGCIVHGKTGHLMACFTCAKKLKKRNKPCPVCRQPIQMIVLTYFP

SEQ ID NO: 57854 - protein, 436 aa, Artificial Sequence
  derived and/or modified sequence
MCNTNMSVPTDGAVTTSQIPASEQETLVRPKPLLLKLLKSVGAQKDTYTMKEVLFYLGQYIMTKRLYDEKQQHIVYCSNDLLGDLFGVPSFSVKEHRKIYTMIYRNLVVVNQQEENSDELSGERQRKRHKSDSISLSFDESLALCVIREICCERSSSSESTGTPSNPDLDAGVSEHSGDWLDQDSVSDQFSVEFEVESLDSEDYSLSEEGQELSDEDDEVYQVTVYQAGESDTDSFEEDPEISLADYWKCTSCNEMNPPLPSHCNRCWALRENWLPEDKGKDKGEISEKAKLENSTQAEEGFDVPDCKKTIVNDSRESCVEENDDKITQASQSQESEDYSQPSTSSSIIYSSQEDVKEFEREETQDKEESVESSLPLNAIEPCVICQGRPKNGCIVHGKTGHLMACFTCAKKLKKRNKPCPVCRQPIQMIVLTYFP

SEQ ID NO: 57855 - DNA, 1329 bp, Artificial Sequence
  derived and/or modified sequence
atggtgagaagcagacagatgtgcaacaccaacatgagcgtgcccaccgacggcgccgtgaccaccagccagatccccgccagcgagcaggagaccctggtgagacccaagcccctgctgctgaagctgctgaagagcgtgggcgcccagaaggacacctacaccatgaaggaggtgctgttctacctgggccagtacatcatgaccaagagactgtacgacgagaagcagcagcacatcgtgtactgcagcaacgacctgctgggcgacctgttcggcgtgcccagcttcagcgtgaaggagcacagaaagatctacaccatgatctacagaaacctggtggtggtgaaccagcaggaggagaacagcgacgagctgagcggcgagagacagagaaagagacacaagagcgacagcatcagcctgagcttcgacgagagcctggccctgtgcgtgatcagagagatctgctgcgagagaagcagcagcagcgagagcaccggcacccccagcaaccccgacctggacgccggcgtgagcgagcacagcggcgactggctggaccaggacagcgtgagcgaccagttcagcgtggagttcgaggtggagagcctggacagcgaggactacagcctgagcgaggagggccaggagctgagcgacgaggacgacgaggtgtaccaggtgaccgtgtaccaggccggcgagagcgacaccgacagcttcgaggaggaccccgagatcagcctggccgactactggaagtgcaccagctgcaacgagatgaacccccccctgcccagccactgcaacagatgctgggccctgagagagaactggctgcccgaggacaagggcaaggacaagggcgagatcagcgagaaggccaagctggagaacagcacccaggccgaggagggcttcgacgtgcccgactgcaagaagaccatcgtgaacgacagcagagagagctgcgtggaggagaacgacgacaagatcacccaggccagccagagccaggagagcgaggactacagccagcccagcaccagcagcagcatcatctacagcagccaggaggacgtgaaggagttcgagagagaggagacccaggacaaggaggagagcgtggagagcagcctgcccctgaacgccatcgagccctgcgtgatctgccagggcagacccaagaacggctgcatcgtgcacggcaagaccggccacctgatggcctgcttcacctgcgccaagaagctgaagaagagaaacaagccctgccccgtgtgcagacagcccatccagatgatcgtgctgacctacttcccctag

SEQ ID NO: 57856 - DNA, 1311 bp, Artificial Sequence
  derived and/or modified sequence
atgtgcaacaccaacatgagcgtgcccaccgacggcgccgtgaccaccagccagatccccgccagcgagcaggagaccctggtgagacccaagcccctgctgctgaagctgctgaagagcgtgggcgcccagaaggacacctacaccatgaaggaggtgctgttctacctgggccagtacatcatgaccaagagactgtacgacgagaagcagcagcacatcgtgtactgcagcaacgacctgctgggcgacctgttcggcgtgcccagcttcagcgtgaaggagcacagaaagatctacaccatgatctacagaaacctggtggtggtgaaccagcaggaggagaacagcgacgagctgagcggcgagagacagagaaagagacacaagagcgacagcatcagcctgagcttcgacgagagcctggccctgtgcgtgatcagagagatctgctgcgagagaagcagcagcagcgagagcaccggcacccccagcaaccccgacctggacgccggcgtgagcgagcacagcggcgactggctggaccaggacagcgtgagcgaccagttcagcgtggagttcgaggtggagagcctggacagcgaggactacagcctgagcgaggagggccaggagctgagcgacgaggacgacgaggtgtaccaggtgaccgtgtaccaggccggcgagagcgacaccgacagcttcgaggaggaccccgagatcagcctggccgactactggaagtgcaccagctgcaacgagatgaacccccccctgcccagccactgcaacagatgctgggccctgagagagaactggctgcccgaggacaagggcaaggacaagggcgagatcagcgagaaggccaagctggagaacagcacccaggccgaggagggcttcgacgtgcccgactgcaagaagaccatcgtgaacgacagcagagagagctgcgtggaggagaacgacgacaagatcacccaggccagccagagccaggagagcgaggactacagccagcccagcaccagcagcagcatcatctacagcagccaggaggacgtgaaggagttcgagagagaggagacccaggacaaggaggagagcgtggagagcagcctgcccctgaacgccatcgagccctgcgtgatctgccagggcagacccaagaacggctgcatcgtgcacggcaagaccggccacctgatggcctgcttcacctgcgccaagaagctgaagaagagaaacaagccctgccccgtgtgcagacagcccatccagatgatcgtgctgacctacttcccctag

SEQ ID NO: 57857 - DNA, 1329 bp, Artificial Sequence
  derived and/or modified sequence
atggtccgatctcgacagatgtgtaacaccaacatgagcgttcccacagacggagcggtgaccactagccagatcccagcatcagagcaagagaccctggtacgccccaagccgctcttgctcaaactccttaagagcgtcggcgcccaaaaggacacctacactatgaaggaggtgctcttttacttagggcagtacatcatgacaaagcgactctatgacgaaaagcagcaacatatcgtatactgttctaatgatctgcttggcgatttattcggcgtgccctccttctccgtcaaggaacatcgaaagatttatacaatgatttaccgcaaccttgttgtggtgaaccagcaggaggagaacagcgacgaattgtctggagaacgccaaaggaagcgccataagagcgatagtatttctctgtccttcgacgaaagtcttgccctatgtgttattcgcgagatttgctgtgaaagatcgtccagcagcgagtcaactggtacccccagcaaccccgacctggacgccggagtctctgaacactcgggtgattggcttgaccaggactcagtgagcgatcagttctctgttgagttcgaggtggagtccctggattccgaggactatagtctgtccgaagagggccaggaactgtccgatgaagatgacgaggtctatcaagtaaccgtttatcaggcgggcgaaagcgatactgacagctttgaggaggatcccgaaatcagtctggctgactattggaagtgtacatcatgcaacgaaatgaaccctcctctcccttctcactgcaacaggtgttgggctctcagagaaaactggctacccgaagataagggcaaagataaaggggagatctctgagaaagcaaaactcgaaaacagtacccaagctgaggagggattcgatgtccctgactgcaagaaaacaattgtcaacgacagtcgagaaagctgcgtggaagaaaacgatgacaaaatcacacaggcctcacaaagccaggagtccgaggattatagccagccgtctaccagttcctctataatctacagtagccaagaggacgtgaaggaattcgagagggaggagactcaggacaaagaggaatccgtcgagagctccttgcctctcaacgcaatcgaaccatgtgtcatttgtcaggggcggcctaaaaatgggtgcatcgtccacggtaaaacaggacatcttatggcatgcttcacatgtgctaaaaagctgaagaagcgcaacaagccatgccccgtctgccggcagccaatccagatgattgtcttgacttactttccttag

SEQ ID NO: 57858 - DNA, 1311 bp, Artificial Sequence
  derived and/or modified sequence
atgtgtaatacaaacatgtccgtaccgacagacggcgcagttaccacctctcaaatccctgcgagtgagcaagaaacactggttagacccaagccccttctactgaagctcctaaagtccgttggagctcagaaggacacgtataccatgaaggaagtgctcttttacctcggccagtacattatgacaaagagactgtacgatgaaaagcagcagcacatcgtttactgttccaacgatctactgggcgaccttttcggtgtgcccagctttagcgtgaaagagcaccgtaagatctatactatgatatatcgtaatttagtggtcgtgaaccaacaggaagagaactccgatgagttatcgggagaacggcaaagaaaacggcacaagagtgacagcattagcctgagcttcgacgaatccctcgccctatgtgtgatccgcgagatctgttgcgaaaggtccagttcctccgagtccacgggcacacccagtaaccctgacctcgatgctggagtttcagagcacagcggcgactggctcgaccaggactccgtgtccgatcagttcagcgtggaattcgaggttgaatctctagatagtgaagattacagtctgtctgaagaaggtcaggaactttccgacgaggatgacgaggtttaccaggtgaccgtgtatcaagccggcgagagtgacactgattctttcgaggaggaccctgagatatctctcgcggactattggaaatgcacttcctgtaacgaaatgaacccccccctgccttcccactgtaataggtgctgggcactgagagaaaactggctgccagaggacaagggcaaggacaagggggaaatcagtgagaaggccaaactggaaaacagcacccaggccgaagaaggatttgatgtgccagattgtaagaaaacgatcgtgaacgattcaagggaaagttgtgtggaggaaaatgacgacaaaatcacacaggcttctcagagccaggagagcgaagattatagccagccatccaccagctcttctattatctacagctcgcaggaggatgtgaaggaattcgaacgcgaagagacacaggataaggaggagtcggtggaaagcagcctgccactgaacgctatcgagccatgcgtcatctgtcaaggaagaccgaagaatggatgcatagtgcacggaaagacaggccacctcatggcatgttttacatgcgctaagaagctgaagaaacgaaataaaccatgcccagtttgccgacagcctattcaaatgattgttctcacctactttccctag

SEQ ID NO: 57859 - DNA, 1329 bp, Artificial Sequence
  derived and/or modified sequence
atggtgcgcagccggcagatgtgcaacaccaacatgtctgtgcccacagatggagctgtgaccaccagccagatcccagccagcgagcaggagaccctggtgcggcccaagcccctgctgctgaagctgctgaagtctgtgggcgcccagaaggacacctacaccatgaaggaggtgctcttctacctgggccagtacatcatgaccaagaggctgtatgatgagaagcagcagcacatcgtgtactgcagcaatgacctgctgggggacctgtttggagtgcccagcttctctgtgaaggagcacaggaagatctacaccatgatctacagaaacctggtggtggtgaaccagcaggaggagaacagtgatgagctgtctggagagcggcagaggaagaggcacaagagtgacagcatcagcctgagctttgatgagagcctggccctgtgtgtgatccgggagatctgctgtgagaggagcagcagcagcgagagcacaggcacccccagcaacccagacctggatgctggggtgtctgagcacagcggggactggctggaccaggacagcgtgtctgaccagttctctgtggagtttgaggtggagagcctggacagcgaggactacagcctgtctgaggagggccaggagctgagtgatgaagatgatgaggtgtaccaggtgacagtgtaccaggccggggagagtgacacagacagctttgaggaggaccctgagatcagcctggccgactactggaagtgcaccagctgcaatgagatgaacccccccctgcccagccactgcaaccgctgctgggccctgcgggagaactggctgcctgaagataaaggcaaggacaagggggagatcagcgagaaggccaagctggagaacagcacccaggccgaggagggctttgatgtgcctgactgcaagaagaccatcgtgaatgacagccgggagagctgtgtggaggagaatgatgacaagatcacccaggccagccagagccaggagagcgaggactacagccagcccagcaccagcagcagcatcatctacagcagccaggaggatgtgaaggagtttgagcgggaggagacccaggacaaggaggagagcgtggagagcagcctgcccctgaatgccatcgagccctgtgtgatctgccagggccggcccaagaatggctgcatcgtgcacggcaagacaggccacctgatggcctgcttcacctgtgccaagaagctgaagaagaggaacaagccctgccctgtgtgccggcagcccatccagatgattgtgctgacctacttcccctag

SEQ ID NO: 57860 - DNA, 1311 bp, Artificial Sequence
  derived and/or modified sequence
atgtgcaacaccaacatgtctgtgcccacagatggagctgtgaccaccagccagatcccagccagcgagcaggagaccctggtgcggcccaagcccctgctgctgaagctgctgaagtctgtgggcgcccagaaggacacctacaccatgaaggaggtgctcttctacctgggccagtacatcatgaccaagaggctgtatgatgagaagcagcagcacatcgtgtactgcagcaatgacctgctgggggacctgtttggagtgcccagcttctctgtgaaggagcacaggaagatctacaccatgatctacagaaacctggtggtggtgaaccagcaggaggagaacagtgatgagctgtctggagagcggcagaggaagaggcacaagagtgacagcatcagcctgagctttgatgagagcctggccctgtgtgtgatccgggagatctgctgtgagaggagcagcagcagcgagagcacaggcacccccagcaacccagacctggatgctggggtgtctgagcacagcggggactggctggaccaggacagcgtgtctgaccagttctctgtggagtttgaggtggagagcctggacagcgaggactacagcctgtctgaggagggccaggagctgagtgatgaagatgatgaggtgtaccaggtgacagtgtaccaggccggggagagtgacacagacagctttgaggaggaccctgagatcagcctggccgactactggaagtgcaccagctgcaatgagatgaacccccccctgcccagccactgcaaccgctgctgggccctgcgggagaactggctgcctgaagataaaggcaaggacaagggggagatcagcgagaaggccaagctggagaacagcacccaggccgaggagggctttgatgtgcctgactgcaagaagaccatcgtgaatgacagccgggagagctgtgtggaggagaatgatgacaagatcacccaggccagccagagccaggagagcgaggactacagccagcccagcaccagcagcagcatcatctacagcagccaggaggatgtgaaggagtttgagcgggaggagacccaggacaaggaggagagcgtggagagcagcctgcccctgaatgccatcgagccctgtgtgatctgccagggccggcccaagaatggctgcatcgtgcacggcaagacaggccacctgatggcctgcttcacctgtgccaagaagctgaagaagaggaacaagccctgccctgtgtgccggcagcccatccagatgattgtgctgacctacttcccctag

SEQ ID NO: 57861 - DNA, 1361 bp, Artificial Sequence
  derived and/or modified sequence
cgcgaaaaccccggatggtgaggagcaggcaaatgtgcaataccaacatgtctgtacctactgatggtgctgtaaccacctcacagattccagcttcggaacaagagaccctggttagaccaaagccattgcttttgaagttattaaagtctgttggtgcacaaaaagacacttatactatgaaagaggttcttttttatcttggccagtatattatgactaaacgattatatgatgagaagcaacaacatattgtatattgttcaaatgatcttctaggagatttgtttggcgtgccaagcttctctgtgaaagagcacaggaaaatatataccatgatctacaggaacttggtagtagtcaatcagcaggaagaaaattcagatgaattatctggtgaacgacaaagaaaacgccacaaatctgatagtatttccctttcctttgatgaaagcctggctctgtgtgtaataagggagatatgttgtgaaagaagcagtagcagtgaatctacagggacgccatcgaatccggatcttgatgctggtgtaagtgaacattcaggtgattggttggatcaggattcagtttcagatcagtttagtgtagaatttgaagttgaatctctcgactcagaagattatagccttagtgaagaaggacaagaactctcagatgaagatgatgaggtatatcaagttactgtgtatcaggcaggggagagtgatacagattcatttgaagaagatcctgaaatttccttagctgactattggaaatgcacttcatgcaatgaaatgaatcccccccttccatcacattgcaacagatgttgggcccttcgtgagaattggcttcctgaagataaagggaaagataaaggggaaatctctgagaaagccaaactggaaaactcaacacaagctgaagagggctttgatgttcctgattgtaaaaaaactatagtgaatgattccagagagtcatgtgttgaggaaaatgatgataaaattacacaagcttcacaatcacaagaaagtgaagactattctcagccatcaacttctagtagcattatttatagcagccaagaagatgtgaaagagtttgaaagggaagaaacccaagacaaagaagagagtgtggaatctagtttgccccttaatgccattgaaccttgtgtgatttgtcaaggtcgacctaaaaatggttgcattgtccatggcaaaacaggacatcttatggcctgctttacatgtgcaaagaagctaaagaaaaggaataagccctgcccagtatgtagacaaccaattcaaatgattgtgctaacttatttcccctagttgacctgtctataagag

SEQ ID NO: 57862 - DNA, 7198 bp, Artificial Sequence
  derived and/or modified sequence
gcaccgcggcgagcttggctgcttctggggcctgtgtggccctgtgtgtcggaaagatggagcaagaagccgagcccgaggggcggccgcgacccctctgaccgagatcctgctgctttcgcagccaggagcaccgtccctccccggattagtgcgtacgagcgcccagtgccctggcccggagagtggaatgatccccgaggcccagggcgtcgtgcttccgcgcgccccgtgaaggaaactggggagtcttgagggacccccgactccaagcgcgaaaaccccggatggtgaggagcaggcaaatgtgcaataccaacatgtctgtacctactgatggtgctgtaaccacctcacagattccagcttcggaacaagagaccctggttagaccaaagccattgcttttgaagttattaaagtctgttggtgcacaaaaagacacttatactatgaaagaggttcttttttatcttggccagtatattatgactaaacgattatatgatgagaagcaacaacatattgtatattgttcaaatgatcttctaggagatttgtttggcgtgccaagcttctctgtgaaagagcacaggaaaatatataccatgatctacaggaacttggtagtagtcaatcagcaggaagaaaattcagatgaattatctggtgaacgacaaagaaaacgccacaaatctgatagtatttccctttcctttgatgaaagcctggctctgtgtgtaataagggagatatgttgtgaaagaagcagtagcagtgaatctacagggacgccatcgaatccggatcttgatgctggtgtaagtgaacattcaggtgattggttggatcaggattcagtttcagatcagtttagtgtagaatttgaagttgaatctctcgactcagaagattatagccttagtgaagaaggacaagaactctcagatgaagatgatgaggtatatcaagttactgtgtatcaggcaggggagagtgatacagattcatttgaagaagatcctgaaatttccttagctgactattggaaatgcacttcatgcaatgaaatgaatcccccccttccatcacattgcaacagatgttgggcccttcgtgagaattggcttcctgaagataaagggaaagataaaggggaaatctctgagaaagccaaactggaaaactcaacacaagctgaagagggctttgatgttcctgattgtaaaaaaactatagtgaatgattccagagagtcatgtgttgaggaaaatgatgataaaattacacaagcttcacaatcacaagaaagtgaagactattctcagccatcaacttctagtagcattatttatagcagccaagaagatgtgaaagagtttgaaagggaagaaacccaagacaaagaagagagtgtggaatctagtttgccccttaatgccattgaaccttgtgtgatttgtcaaggtcgacctaaaaatggttgcattgtccatggcaaaacaggacatcttatggcctgctttacatgtgcaaagaagctaaagaaaaggaataagccctgcccagtatgtagacaaccaattcaaatgattgtgctaacttatttcccctagttgacctgtctataagagaattatatatttctaactatataaccctaggaatttagacaacctgaaatttattcacatatatcaaagtgagaaaatgcctcaattcacatagatttcttctctttagtataattgacctactttggtagtggaatagtgaatacttactataatttgacttgaatatgtagctcatcctttacaccaactcctaattttaaataatttctactctgtcttaaatgagaagtacttggtttttttttttcttaaatatgtatatgacatttaaatgtaacttattattttttttgagaccgagtcttgctctgttacccaggctggagtgcagtggcgtgatcttggctcactgcaagctctgcctcccgggttcgcaccattctcctgcctcagcctcccaattagcttggcctacagtcatctgccaccacacctggctaattttttgtacttttagtagagacagggtttcaccgtgttagccaggatggtctcgatctcctgacctcgtgatccgcccacctcggcctcccaaagtgctgggattacaggcatgagccaccgcgtccggcctaaatgtcacttagtacctttgatataaagagaaaatgtgtgaaagatttagttttttgtttttttgtttgtttgtttgtttgtttgttttgagatgagtctctctgtcgcccaggctggagtgcagtgtcatgatctagcagtctccgcttcccgggttcaagccattctcctggctcagcctctggagcagctgggattacaggcatgcaccaccatgcccagctaatttttgtatttttagtagagatagggtttcaccatgttggccaggctggtcacgaactcctgacctcaagtgaggtcacccgcctcggcctcccgaagtgctgggattgcagatgtgagccaccatgtccagccaagaattagtatttaaattttagatactctttttttttttttttttttttttttttgagacagagtcttgctccatcacccatgctagagtgcagtggagtgatctcggctcactgcaacttccgccttctgggttcaagctattctcctgcctcagccttccaagtaactgggattacaggcatgtaccaccataccagctgatttttttgtatttttagtaaagacagggtttcaccatgttagccaggctgatcttgaactcctaaactcaagtgatctactcacctcagcctcccaaaatgctgggattacagatgtgaggcacctggcctcagatttttgatactcttaaaccttctgatccttagtttctctctccaaaatactctttctaggttaaaaaaaaaaaggctcttatatttggtgctatgtaaatgaaaatgttttttaggttttcttgatttaacaatagagacagggtctccctgtgttgcccaggctggtctcgaactcctgggctcaagagatcctcctgtcttggcctcgcaaagtgctaagtaggattacaggcgttagccaccacacccggctgtaaaaatgtacttattctccagcctcttttgtataaaccatagtaagggatgggagtaatgatgttatctgtgaaaatagccaccatttacccgtaagacaaaacttgttaaagcctcctgagtctaacctagattacatcaggccctttttcacacacaaaaaaatcctttatgggatttaatggaatctgttgtttccccctaagttgaaaaacaactctaagacactttaaagtaccttcttggcctgggttacatggttcccagcctaggtttcagacttttgcttaaggccagttttagaaacccgtgaattcagaaaagttaattcagaaatttgataaacagaattgttatttaaaaactaactggaaagattgttaagttctttctgaattattcagaaattatgcatcattttccttcaagaatgacagggtcagcatgtggaattccaagatacctcttgacttcctctcaagctccgtgtttggtcagtggaggcccatccgagctcagcactgagaagtgttagtttctttgggacccatctaccctgaccacatcatgatgttcatctgcagctgttgcaaggtgttcagattgtataaacataaatgtcacaaaaactttaaaagaagtgcaattctcaaaaggttaggtggactaaagcattctgtaaagcaactgctaataatgagcttacagtggatttgaatttgaaaaatatagtaacaagcctgtcaaatatctgcaagaactatggaataaaactactgatgcagtgaagacagttgaaaagatcaaacaaatgccaagctatatttataatgaacaaattcaagaaaaaggactacggaaagttcaggacatcaaagaagtcaggcaaaactcatcttgacccctgttgcaggcaaaggaacgcagctggaagaaaagatgatataacagttaacaggatgcagacatggcagaggtttcctaaaaatctcattatctataaccatttctatatttacatttgaaaatctcctttggagacttagaacctctaaattattgacttattttttatataaggtcactccgatgaaaggtgattacaaaatcatctacattgctgtctacaaaacagataatatggatgtttgatcgcatctcattgttaactctttactgatatgtttgtaaatacagaagtgaaatgtggacataaaatagttacgctatttggttaatggtactagacaacatgtaattaatgacattcaaaaatttatggctagtgatatatataaagtaaaattttctttgcagtaaaatatgccctttattatagaagggaggatataaggaaccaacagtttgtatgaaaatagctcaaataatatcttttattttgattttaatatttcttattttggtttattagtgtcttagaacaaaatggccttatataatgaagcctagttatgctggactgttttgatctcttttaattgttctgacagatagttggggatgagagccgaataaggtttgcctgaaataactgacactatataatttctgctttggcaaatactaagttctaacttgtcattcctggtagaacaagctttatttttcgagcctagcaatgatctagaagcagatgttatctcagtgccttttgcaatttgttgtgtgggtttttttttttttaaagccacacaataattttggaaaacaatgtatgggtagaacatgtgtctgttaattgcacacaaaaccacttttaatgggtacagagttaaatttgaaggaataagttctagctgaagtattatgaactccaaataatgctttgaggacctccaaaggtaaaagtactaatccctttggccatttattgagagagagagagagagagagtagggtgactatagttaatgtattgaatgttcttgctacaaataaatgatatttgagctgatgggtgtgctaattacactgatttgatcaatacccattgtatgtgaaacagtacatacaccatatttacaattatgtatttaacatttaaaatttctaatataagtatctctcaaactgtggattaacttcttgatttatatttaaatatgaatcttaagcaaaacagtgaaaataaccatcttgatttagtgtttttctcccatatgtgaattgtatatacttaggtgaagacaataaaatcaactgaactgtaagcttagaataggactgaggtaattctgcacagcaactttactaatggtacattgttgcttcaaaactctctctctctctctctgtctgtctcaataaatggccaaagggattagtagtttacctgtggaggtcctccaagcattatttggagttgataatacttcagctacaaccaagcagaatctcttttttttggaggtcctcgaagcattatttggagttgataatacttcagcttcaatttggagttgataatatttcagctagaacctagtagaatctgtttttttcctttggaggtcctcaaagcattattggagttcataatactgaagctagaaccaagcagaatctgtttttttctgaggagtatcggtagcataaatgtgattataaacatagtacacttgatatatggaggcagtgacagctatttttacaaaatttaaatctgcaaatggattcaacatgtttatgggttattaaaattgtctgatttcttaggttctttatagtacacgtgttgaaaataaatgattaagaattgtttcaagaatgcaattatttgatcttaaatttttatgagttgttaaaatagaaattatttgaatatcatatatttgggtaacaaaaggcacaagtctgaatgtgtttctttttctggaatggccatgcctgcccactttagaaatacaaatatcactgggcagcttgaagcagttgggagcctccaatgagagcaacttgagagaatgatgttgcaagttagtaggagtaagaaatgctgtgttctccctgtcttctcttaggtcacatggcagcctggcctaagtgatcgtgaatggtctataagggaggtagctgggacagggaggggagtttgggctagccaccgtaccacttgtcagcgtgaaaagtaagattgtaattgcctgtttagttttctgcctcatctttgaaagttccaccaagctgggaacctcttgattgtgaggcacaaatgtaagtacatcagaaaaaaacaaaaaaactggctttaaagcaggagcttgtgggcccctaagccagacggggactagcttttggcattatataattaagattttttaaatccttaataagggttttattttatttttatttattttttgagacggagtcttgctctgtggctcaggctggagtacagtggtgcaatcttggctcactgcaacctctgcctcctggctgtgttcaagtggttctgcttcagcctcccaagtagctggggttagagcaccctgtcaccacgccccgctaatttttgtatttctagcagagatgaagtttcactatgttggccaggctgggctcaaactcctgacctcaagtgatctgcccgccttggccccccaaagtgctgtgattacaggcgtgagccgccacgcccagcctaataagggttttaaagataattagtgtgtaggtctgtaggcttatgatggtaaccacaagttgttaatggcattgtgaaaagtttttagttgcgctttatgggtggatgctgaattacattttgatttgatacttataaaaagaaaaagtatttcttcagcttaaaaaattgtttaaaagtttgtgatcatattgtctaccatgtagccagctttcaattatatgtaagagggactttttgacatttacaaataatactttgaggtagatatctgaaagcaccagcacttggaaggtgttcagaagtaacaaattataaaatgagctaacaaacgaaaggcaaaataaaaccgtaaagcaagc

SEQ ID NO: 57863 - DNA, 1329 bp, Artificial Sequence
  derived and/or modified sequence
atggtgcggagccggcagatgtgcaacaccaacatgagcgtgcccactgacggagcggtgaccacgagtcagatcccagccagtgagcaggaaaccctcgtccgccccaagcctctcctgctgaaactgctgaagagcgtgggggctcagaaagatacatacacgatgaaggaagttcttttttacctcggccaatacatcatgacgaagcgtctctacgacgagaagcagcaacatatagtgtattgttcgaacgatttattaggggatctctttggagtcccctccttctccgtgaaggagcaccgcaagatctacacaatgatctaccgtaacctggtggtagtgaaccagcaggaagagaactctgacgagctcagtggagagcggcagaggaagcggcataaatccgatagtatcagcctaagtttcgacgagagcctcgccctgtgtgtgatccgggaaatttgctgcgagaggagctcctccagcgagtcgaccggaacaccctcaaatcctgacctagatgccggtgtgagcgaacacagcggagattggctggaccaagactcagtgtccgaccaatttagcgttgagttcgaagtggagtccttggattctgaagattattctctgtctgaagaggggcaggagctttcggacgaggatgacgaggtgtatcaggtgaccgtttaccaggccggtgagtctgacacggattcctttgaggaggacccagagatctctctggctgattactggaaatgtacgtcatgtaatgaaatgaacccaccactgccatcccattgtaatcggtgctgggccttgcgcgaaaattggctgcccgaggacaagggcaaggacaaaggggagatctcagagaaagctaagcttgaaaactctactcaggcagaggaaggtttcgatgtacccgattgcaaaaagacgatcgtaaacgatagtagagagagctgtgtggaggaaaacgacgacaagattacacaggcttctcagtcccaggagtccgaggactatagccagccctcaacatcttcatccatcatttacagctcacaagaggatgttaaggaatttgaacgcgaggagactcaggataaggaggagtctgttgagagctccttgcccctgaatgccatcgagccgtgtgtcatctgccagggccgaccgaagaatggatgcatcgtgcatgggaagacaggtcacctcatggcgtgctttacctgtgctaaaaaactgaagaagcgcaataagccatgtccagtgtgtaggcagccgatccagatgattgtgttaacatatttcccatag

SEQ ID NO: 57864 - DNA, 1311 bp, Artificial Sequence
  derived and/or modified sequence
atgtgcaacaccaacatgagcgtgcccaccgacggcgccgtgaccacgtcccaaatccctgccagcgagcaggaaactttagtgaggcctaaaccactgctcttgaaactcctgaagtccgtcggtgcccagaaggacacttatacaatgaaagaagtattgttctacctgggacagtatatcatgaccaagcgcctatacgatgagaagcaacaacatattgtgtattgttcaaatgacctgcttggcgatctgttcggcgtaccctcattttctgtgaaagagcatagaaagatttataccatgatctacaggaacctggtggtcgttaatcagcaagaggagaattctgacgagttgagcggagaacgccagcggaagcggcataagtctgactcgatttccctgtcgtttgacgaatctctggcactgtgcgtgattcgcgagatttgctgtgagaggagtagcagctccgaaagcactggcaccccgtccaatccagacctggatgcgggggtaagtgagcactcaggagattggctggaccaggacagtgtgagcgaccagttcagcgttgagtttgaggtggagtcactagattctgaagactacagcctgtctgaggagggacaggagctttccgacgaggacgacgaagtgtaccaggtcacggtgtaccaagctggggaatcagatactgactcctttgaggaagatcctgagatttcactcgctgactactggaaatgtacaagctgtaatgagatgaatcctccattacccagccactgcaatcgctgttgggccctacgagaaaattggctgcctgaagacaaagggaaagataaaggtgagattagcgagaaagctaagctggagaacagcacccaagctgaggagggcttcgatgtacctgattgcaagaagacaattgtcaacgactcccgggagagctgtgtggaagaaaatgatgacaagattactcaagccagtcagtcccaggagagcgaagattacagccagccctccacctccagttcgatcatctactcctcacaagaggacgtgaaggaattcgagcgagaggagacccaggataaagaagaaagtgttgaatcttcccttccacttaatgccatcgagccctgtgtgatctgtcaagggcggcctaaaaacggctgcattgtgcatggtaagactggtcacctcatggcctgctttacctgcgctaagaagttaaagaaacgcaacaagccttgtccagtgtgtcgacagccgatccagatgatagttcttacctatttcccgtag

SEQ ID NO: 57865 - DNA, 1329 bp, Artificial Sequence
  derived and/or modified sequence
atggtgcgttcacgccagatgtgtaataccaatatgtctgtcccgacggatggcgcagtcaccacttctcagatccctgccagcgaacaggaaactctggtgcgcccaaagcccctactcttaaaactgctgaagtctgttggagcacagaaggatacgtacactatgaaagaggtactgttctacctaggccagtatatcatgaccaaaagattgtacgacgagaagcaacagcatatcgtgtattgttccaatgatctgctgggggatctcttcggtgttccctccttttcagttaaggagcatcggaaaatttacaccatgatttataggaacctggtcgtagtcaaccagcaggaggaaaacagcgatgaactaagtggtgagaggcagcggaaacgtcataagagtgactctatcagtctgtcattcgacgaaagcctggcactctgcgtgatccgcgaaatctgctgcgagaggtcatcatctagcgaaagcacgggaacaccgagcaatcctgacctcgacgccggagtctcggagcactctggcgactggttggaccaagactctgtgagcgaccagttcagcgtcgaatttgaggtggagagtctggactccgaagattatagtctgtctgaggaggggcaggaactgagcgatgaagatgatgaagtgtatcaagtgaccgtttaccaagctggcgaatctgatacagactcattcgaagaggaccccgaaatttccctggccgactactggaaatgcactagttgtaatgagatgaaccctccgctcccatcacactgcaataggtgttgggccctccgggagaattggctcccagaggacaaggggaaggacaaaggcgagatctctgaaaaggcaaaattggagaattcaacccaggcagaggagggttttgatgtgcccgattgcaagaagactatcgtcaatgactcaagagaaagttgcgtagaagagaacgatgataagatcactcaggcctctcaatcccaggaaagcgaggattattcacagccctctacgtcatcctcaatcatctattcgtcgcaggaggacgtcaaggagtttgagagggaggagacacaagataaggaggaaagtgtcgaatcctccttacctctcaacgctattgagccatgtgtcatctgccaggggaggcccaagaacgggtgtatcgtgcatggaaagaccggccatctgatggcctgcttcacatgtgccaagaaactaaagaagcgcaacaaaccatgtccagtatgcaggcagcccatccaaatgatagtgctgacatattttccgtag

SEQ ID NO: 57866 - DNA, 1311 bp, Artificial Sequence
  derived and/or modified sequence
atgtgtaacacaaacatgagcgtgcctaccgatggcgctgtcacaactagtcaaatccccgcaagtgaacaggaaaccctggtgcgcccaaaacccctgctgctcaaattgctgaagagtgtcggggcacagaaagatacgtacacgatgaaagaggtgttattctatcttggacagtacattatgaccaaacgtctatacgatgaaaaacagcaacatatcgtgtactgtagcaacgacctcctgggagacctttttggcgttcccagtttctccgttaaagagcatcggaagatttacactatgatttatcgtaacttggtggtcgttaatcaacaggaagaaaatagcgatgagctctctggggaacgacagcggaaaagacataaaagcgactccatatccctttcctttgatgagagtttagcactgtgcgtgattagagagatctgttgtgagagaagctcgtctagcgaatctaccggcactccaagtaatccggacctggatgcaggcgtgagtgagcacagtggagactggttggatcaggatagcgtcagtgaccaattctccgtagaatttgaggttgagtcactcgattcagaggactatagtctttccgaagagggccaggaactttcagacgaggatgacgaggtgtaccaggttaccgtgtatcaggccggtgagagcgacactgactccttcgaggaagaccccgaaatctccctcgccgactactggaaatgcacgagttgcaacgagatgaacccaccgctgccctcacattgtaaccgttgctgggctctgcgtgaaaactggctgcctgaagacaaaggtaaagacaagggagagatttcagagaaagcaaagctcgaaaactctacccaagctgaggaggggttcgatgtacctgattgcaagaagacaatagtgaatgactctcgggagagctgtgtagaagagaatgacgataagattactcaagcgtcccagagccaggaaagtgaagactatagtcagcctagcacaagttctagtataatttacagtagccaggaggatgtgaaagaatttgaacgggaagaaacacaggacaaggaagaatccgtcgagtcttctctgcccctaaacgctatcgaaccctgcgtgatttgccagggacgccctaaaaatggatgtatagtgcacgggaaaacagggcacctcatggcttgttttacatgcgcaaaaaagttgaagaaaaggaataagccatgccctgtgtgcaggcaaccaatccagatgatagtcctgacctacttcccatag

SEQ ID NO: 57867 - protein, 265 aa, Artificial Sequence
  derived and/or modified sequence
MSVPTDGAVTTSQIPASEQETLDLDAGVSEHSGDWLDQDSVSDQFSVEFEVESLDSEDYSLSEEGQELSDEDDEDYWKCTSCNEMNPPLPSHCNRCWALRENWLPEDKGKDKGEISEKAKLENSTQAEEGFDVPDCKKTIVNDSRESCVEENDDKITQASQSQESEDYSQPSTSSSIIYSSQEDVKEFEREETQDKEESVESSLPLNAIEPCVICQGRPKNGCIVHGKTGHLMACFTCAKKLKKRNKPCPVCRQPIQMIVLTYFP

SEQ ID NO: 57868 - protein, 243 aa, Artificial Sequence
  derived and/or modified sequence
MCNTNMSVPTDGAVTTSQIPASEQETLVRPKPLLLKLLKSVGAQKDTYTMKEDYWKCTSCNEMNPPLPSHCNRCWALRENWLPEDKGKDKGEISEKAKLENSTQAEEGFDVPDCKKTIVNDSRESCVEENDDKITQASQSQESEDYSQPSTSSSIIYSSQEDVKEFEREETQDKEESVESSLPLNAIEPCVICQGRPKNGCIVHGKTGHLMACFTCAKKLKKRNKPCPVCRQPIQMIVLTYFP

SEQ ID NO: 57869 - protein, 270 aa, Artificial Sequence
  derived and/or modified sequence
MCNTNMSVPTDGAVTTSQIPASEQETLDLDAGVSEHSGDWLDQDSVSDQFSVEFEVESLDSEDYSLSEEGQELSDEDDEDYWKCTSCNEMNPPLPSHCNRCWALRENWLPEDKGKDKGEISEKAKLENSTQAEEGFDVPDCKKTIVNDSRESCVEENDDKITQASQSQESEDYSQPSTSSSIIYSSQEDVKEFEREETQDKEESVESSLPLNAIEPCVICQGRPKNGCIVHGKTGHLMACFTCAKKLKKRNKPCPVCRQPIQMIVLTYFP

SEQ ID NO: 57870 - DNA, 798 bp, Artificial Sequence
  derived and/or modified sequence
atgagcgtgcccaccgacggcgccgtgaccaccagccagatccccgccagcgagcaggagaccctggacctggacgccggcgtgagcgagcacagcggcgactggctggaccaggacagcgtgagcgaccagttcagcgtggagttcgaggtggagagcctggacagcgaggactacagcctgagcgaggagggccaggagctgagcgacgaggacgacgaggactactggaagtgcaccagctgcaacgagatgaacccccccctgcccagccactgcaacagatgctgggccctgagagagaactggctgcccgaggacaagggcaaggacaagggcgagatcagcgagaaggccaagctggagaacagcacccaggccgaggagggcttcgacgtgcccgactgcaagaagaccatcgtgaacgacagcagagagagctgcgtggaggagaacgacgacaagatcacccaggccagccagagccaggagagcgaggactacagccagcccagcaccagcagcagcatcatctacagcagccaggaggacgtgaaggagttcgagagagaggagacccaggacaaggaggagagcgtggagagcagcctgcccctgaacgccatcgagccctgcgtgatctgccagggcagacccaagaacggctgcatcgtgcacggcaagaccggccacctgatggcctgcttcacctgcgccaagaagctgaagaagagaaacaagccctgccccgtgtgcagacagcccatccagatgatcgtgctgacctacttcccctag

SEQ ID NO: 57871 - DNA, 732 bp, Artificial Sequence
  derived and/or modified sequence
atgtgcaacaccaacatgagcgtgcccaccgacggcgccgtgaccaccagccagatccccgccagcgagcaggagaccctggtgagacccaagcccctgctgctgaagctgctgaagagcgtgggcgcccagaaggacacctacaccatgaaggaggactactggaagtgcaccagctgcaacgagatgaacccccccctgcccagccactgcaacagatgctgggccctgagagagaactggctgcccgaggacaagggcaaggacaagggcgagatcagcgagaaggccaagctggagaacagcacccaggccgaggagggcttcgacgtgcccgactgcaagaagaccatcgtgaacgacagcagagagagctgcgtggaggagaacgacgacaagatcacccaggccagccagagccaggagagcgaggactacagccagcccagcaccagcagcagcatcatctacagcagccaggaggacgtgaaggagttcgagagagaggagacccaggacaaggaggagagcgtggagagcagcctgcccctgaacgccatcgagccctgcgtgatctgccagggcagacccaagaacggctgcatcgtgcacggcaagaccggccacctgatggcctgcttcacctgcgccaagaagctgaagaagagaaacaagccctgccccgtgtgcagacagcccatccagatgatcgtgctgacctacttcccctag

SEQ ID NO: 57872 - DNA, 657 bp, Artificial Sequence
  derived and/or modified sequence
atgtgcaacaccaacatgagcgtgcccaccgacggcgccgtgaccaccagccagatccccgccagcgagcaggagaccctggactactggaagtgcaccagctgcaacgagatgaacccccccctgcccagccactgcaacagatgctgggccctgagagagaactggctgcccgaggacaagggcaaggacaagggcgagatcagcgagaaggccaagctggagaacagcacccaggccgaggagggcttcgacgtgcccgactgcaagaagaccatcgtgaacgacagcagagagagctgcgtggaggagaacgacgacaagatcacccaggccagccagagccaggagagcgaggactacagccagcccagcaccagcagcagcatcatctacagcagccaggaggacgtgaaggagttcgagagagaggagacccaggacaaggaggagagcgtggagagcagcctgcccctgaacgccatcgagccctgcgtgatctgccagggcagacccaagaacggctgcatcgtgcacggcaagaccggccacctgatggcctgcttcacctgcgccaagaagctgaagaagagaaacaagccctgccccgtgtgcagacagcccatccagatgatcgtgctgacctacttcccctag

SEQ ID NO: 57873 - DNA, 813 bp, Artificial Sequence
  derived and/or modified sequence
atgtgcaacaccaacatgagcgtgcccaccgacggcgccgtgaccaccagccagatccccgccagcgagcaggagaccctggacctggacgccggcgtgagcgagcacagcggcgactggctggaccaggacagcgtgagcgaccagttcagcgtggagttcgaggtggagagcctggacagcgaggactacagcctgagcgaggagggccaggagctgagcgacgaggacgacgaggactactggaagtgcaccagctgcaacgagatgaacccccccctgcccagccactgcaacagatgctgggccctgagagagaactggctgcccgaggacaagggcaaggacaagggcgagatcagcgagaaggccaagctggagaacagcacccaggccgaggagggcttcgacgtgcccgactgcaagaagaccatcgtgaacgacagcagagagagctgcgtggaggagaacgacgacaagatcacccaggccagccagagccaggagagcgaggactacagccagcccagcaccagcagcagcatcatctacagcagccaggaggacgtgaaggagttcgagagagaggagacccaggacaaggaggagagcgtggagagcagcctgcccctgaacgccatcgagccctgcgtgatctgccagggcagacccaagaacggctgcatcgtgcacggcaagaccggccacctgatggcctgcttcacctgcgccaagaagctgaagaagagaaacaagccctgccccgtgtgcagacagcccatccagatgatcgtgctgacctacttcccctag

SEQ ID NO: 57874 - DNA, 393 bp, Artificial Sequence
  derived and/or modified sequence
atgtgcaacaccaacatgagcgtgcccaccgacggcgccgtgaccaccagccagatccccgccagcgagcaggagaccctggtgagacccaagcccctgctgctgaagctgctgaagagcgtgggcgcccagaaggacacctacaccatgaaggagttcgagagagaggagacccaggacaaggaggagagcgtggagagcagcctgcccctgaacgccatcgagccctgcgtgatctgccagggcagacccaagaacggctgcatcgtgcacggcaagaccggccacctgatggcctgcttcacctgcgccaagaagctgaagaagagaaacaagccctgccccgtgtgcagacagcccatccagatgatcgtgctgacctacttcccctag

SEQ ID NO: 57875 - DNA, 798 bp, Artificial Sequence
  derived and/or modified sequence
atgtcggttccaacagacggtgctgtgaccacttcacagattcccgcctctgagcaagaaaccctcgacctagatgcaggtgttagcgagcattcaggcgattggctggatcaggatagtgtgtcggatcagttctccgtggaatttgaagttgagtccttggatagcgaagattacagtttgtccgaagaggggcaagagttaagcgatgaagatgacgaagactactggaaatgcacaagctgcaacgagatgaacccccccctgccttctcattgtaatcgatgctgggcactaagagaaaactggcttccagaggataaaggcaaggataaaggggaaattagcgaaaaagctaaattggaaaattcgacgcaagcggaggaagggtttgatgttccagactgcaagaagacgatcgtgaacgattcaagagagagttgcgttgaggagaatgacgacaagatcacccaagcctctcagagccaggagagtgaagactactcccagccttctactagcagtagtatcatatactcttctcaggaggatgtaaaggagtttgagcgcgaggaaactcaagataaagaagagtctgttgaatcctcactgccactgaatgctatcgaaccatgtgtgatttgccaggggcggccaaagaacggatgcatagtgcatggcaagactggtcacttgatggcctgctttacgtgtgccaaaaaattgaagaaacgaaacaaaccctgtccggtttgtcggcagccgattcagatgatcgtcctgacatattttccctag

SEQ ID NO: 57876 - DNA, 732 bp, Artificial Sequence
  derived and/or modified sequence
atgtgcaacaccaatatgagtgttccaacagacggcgccgtaacgacaagccagattccggctagtgagcaggaaacattggttcgacccaagccccttttgctgaagctgcttaaaagcgtcggggctcagaaagatacatataccatgaaagaagactactggaaatgtacctcctgtaatgagatgaatcctcccttgccaagccactgcaaccgatgttgggctcttcgcgagaactggctcccagaggacaagggtaaagataagggcgagatcagcgagaaggccaagctcgagaactcaactcaggctgaagaggggtttgacgttcctgactgcaagaagacgattgtgaacgattccagggaatcatgcgtagaggagaatgatgacaagattacccaggcttctcagagccaggagtctgaagattactctcaaccgagtacgagtagctcaataatttactcatcacaggaggacgttaaggagtttgagagggaggagactcaggataaagaggagagcgtggagtccagccttcccttgaacgccatagagccttgcgtcatctgtcagggcagaccaaaaaatggttgtattgtacatggcaaaacggggcatctcatggcttgcttcacctgcgcaaagaagcttaagaaacgcaataaaccctgcccagtgtgtcgccagcctattcagatgatagtgctgacctacttcccttag

SEQ ID NO: 57877 - DNA, 657 bp, Artificial Sequence
  derived and/or modified sequence
atgtgtaacactaacatgtcagttccaaccgatggcgccgtgactactagccaaattccagcttcagagcaggaaacactcgactactggaagtgcacgagctgtaatgagatgaatcccccactgccttctcactgcaaccgctgctgggctctgagagagaactggctccctgaggacaagggtaaggacaagggtgaaatctctgagaaggccaagctggagaacagtacacaggcagaagaaggctttgacgttccagactgtaagaaaactatagtcaacgactctcgggagtcctgtgttgaagagaatgacgataagataacacaggcaagccagtcgcaggagagtgaggactactcacagccaagtactagctcaagcattatctatagcagtcaggaggatgtcaaggaattcgaaagggaggaaacacaggataaggaggaaagcgtggaaagttcactccccttgaatgctatagaaccttgtgtgatctgtcagggcaggcccaaaaatggatgcattgtgcacgggaaaaccgggcacttgatggcctgttttacttgcgccaaaaagctgaagaaacgcaataaaccctgcccagtgtgccggcagcctatccagatgattgtgctaacgtatttcccctag

SEQ ID NO: 57878 - DNA, 657 bp, Artificial Sequence
  derived and/or modified sequence
atgtgtaacactaacatgagtgtccctacagatggcgcggttaccacatctcagatacccgcctccgaacaagaaacacttgactactggaaatgcacatcatgtaacgaaatgaacccacctttaccaagtcactgcaaccgatgctgggccctgagagagaactggcttcccgaggataaaggcaaggataagggcgaaatctccgaaaaagctaagctggagaattctactcaagccgaagagggcttcgacgtgccagattgcaagaagaccatcgtgaatgacagtcgagagtcatgtgttgaggaaaacgacgacaagattacacaagcgtctcagtcacaggagtctgaagattatagtcagccctccacctcgagttccataatttactcaagccaggaggatgtgaaggagttcgagcgcgaggagactcaggacaaggaggaaagcgtggagtctagcctgccactgaatgcaatcgagccttgcgtcatatgtcagggaagacctaagaacgggtgcattgtgcacggaaaaaccggacacttgatggcctgctttacctgcgccaagaaactgaagaaaaggaataagccttgtccagtgtgcaggcagccgattcagatgatagtgctcacatatttcccctag

SEQ ID NO: 57879 - DNA, 813 bp, Artificial Sequence
  derived and/or modified sequence
atgtgcaacacaaatatgtctgtgccaaccgacggggccgttacaacttcccagatccccgcgagcgaacaggaaactctagacctcgatgcaggggtctccgagcacagcggggactggctagaccaggactccgtgtccgatcagttcagcgttgagtttgaggtggagtctcttgattccgaagactactccctgtctgaagagggacaagagctgagcgacgaagacgacgaggactactggaagtgtacctcttgtaacgaaatgaacccaccactgccttctcattgcaataggtgttgggcactgagggagaactggctgccggaagacaaggggaaagacaagggcgagataagcgagaaagccaaactggagaactccacccaagctgaggagggcttcgacgtcccagattgcaaaaagacaatcgttaatgacagccgagagtcttgtgttgaggaaaatgacgacaagattacacaagcctcacagagccaggaatcggaagattactcgcagccgagcacgtccagtagcatcatatacagctctcaggaggacgtgaaagaattcgagcgcgaagagacgcaggacaaagaagagtcggtcgaatccagcctacccctgaatgcgattgagccctgtgtcatatgccaaggacggccaaagaacgggtgtattgtgcacggtaaaacgggccatctgatggcctgctttacatgcgctaagaagctcaaaaaacgaaataaaccttgccctgtatgccgtcagccgatacagatgatcgtgctgacctacttcccttag

SEQ ID NO: 57880 - DNA, 393 bp, Artificial Sequence
  derived and/or modified sequence
atgtgcaatactaacatgtccgtacccacggatggcgccgtaacaacaagccagataccagccagcgaacaggagaccctggtgcgacccaagcctttactcctgaaattattgaaatcggttggagcccagaaggacacatataccatgaaggagttcgagagggaggaaacacaagacaaggaggagtccgtggagtcatctcttccccttaacgcaattgagccatgtgtgatttgccaggggagacctaagaacggctgcatagtgcacggtaagactggacacctgatggcctgctttacctgtgctaaaaagttaaagaagcgcaataagccatgccctgtttgccgccagccaatacagatgatagttcttacttactttccatag

SEQ ID NO: 57881 - DNA, 798 bp, Artificial Sequence
  derived and/or modified sequence
atgtctgtgcccacagatggagctgtgaccaccagccagatcccagccagcgagcaggagaccctggacctggatgctggggtgtctgagcacagcggggactggctggaccaggacagcgtgtctgaccagttctctgtggagtttgaggtggagagcctggacagcgaggactacagcctgtctgaggagggccaggagctgagtgatgaagatgatgaggactactggaagtgcaccagctgcaatgagatgaacccccccctgcccagccactgcaaccgctgctgggccctgcgggagaactggctgcctgaggacaagggcaaggacaagggggagatcagcgagaaggccaagctggagaacagcacccaggccgaggagggctttgatgtgcctgactgcaagaagaccatcgtgaatgacagccgggagagctgtgtggaggagaatgatgacaagatcacccaggccagccagagccaggagagcgaggactacagccagcccagcaccagcagcagcatcatctacagcagccaggaggatgtgaaggagtttgagcgggaggagacccaggacaaggaggagagcgtggagagcagcctgcccctgaatgccatcgagccctgcgtcatctgccagggccggcccaagaatggctgcatcgtgcacggcaagacaggccacctgatggcctgcttcacctgtgccaagaagctgaagaagaggaacaagccctgccctgtgtgccggcagcccatccagatgattgtgctgacctacttcccctag

SEQ ID NO: 57882 - DNA, 732 bp, Artificial Sequence
  derived and/or modified sequence
atgtgcaacaccaacatgtctgtgcccacagatggagctgtgaccaccagccagatcccagccagcgagcaggagaccctggtgcggcccaagcccctgctgctgaagctgctgaagtctgtgggcgcccagaaggacacctacaccatgaaggaggactactggaagtgcaccagctgcaatgagatgaacccccccctgcccagccactgcaaccgctgctgggccctgcgggagaactggctgcctgaggacaagggcaaggacaagggggagatcagcgagaaggccaagctggagaacagcacccaggccgaggagggctttgatgtgcctgactgcaagaagaccatcgtgaatgacagccgggagagctgtgtggaggagaatgatgacaagatcacccaggccagccagagccaggagagcgaggactacagccagcccagcaccagcagcagcatcatctacagcagccaggaggatgtgaaggagtttgagcgggaggagacccaggacaaggaggagagcgtggagagcagcctgcccctgaatgccatcgagccctgcgtcatctgccagggccggcccaagaatggctgcatcgtgcacggcaagacaggccacctgatggcctgcttcacctgtgccaagaagctgaagaagaggaacaagccctgccctgtgtgccggcagcccatccagatgattgtgctgacctacttcccctag

SEQ ID NO: 57883 - DNA, 657 bp, Artificial Sequence
  derived and/or modified sequence
atgtgcaacaccaacatgtctgtgcccacagatggagctgtgaccaccagccagatcccagccagcgagcaggagaccctggactactggaagtgcaccagctgcaatgagatgaacccccccctgcccagccactgcaaccgctgctgggccctgcgggagaactggctgcctgaagataaaggcaaggacaagggggagatcagcgagaaggccaagctggagaacagcacccaggccgaggagggctttgatgtgcctgactgcaagaagaccatcgtgaatgacagccgggagagctgtgtggaggagaatgatgacaagatcacccaggccagccagagccaggagagcgaggactacagccagcccagcaccagcagcagcatcatctacagcagccaggaggatgtgaaggagtttgagcgggaggagacccaggacaaggaggagagcgtggagagcagcctgcccctgaatgccatcgagccctgtgtgatctgccagggccggcccaagaatggctgcatcgtgcacggcaagacaggccacctgatggcctgcttcacctgtgccaagaagctgaagaagaggaacaagccctgccctgtgtgccggcagcccatccagatgattgtgctgacctacttcccctag

SEQ ID NO: 57884 - DNA, 813 bp, Artificial Sequence
  derived and/or modified sequence
atgtgcaacaccaacatgtctgtgcccacagatggagctgtgaccaccagccagatcccagccagcgagcaggagaccctggacctggatgctggggtgtctgagcacagcggggactggctggaccaggacagcgtgtctgaccagttctctgtggagtttgaggtggagagcctggacagcgaggactacagcctgtctgaggagggccaggagctgagtgatgaagatgatgaggactactggaagtgcaccagctgcaatgagatgaacccccccctgcccagccactgcaaccgctgctgggccctgcgggagaactggctgcctgaagataaaggcaaggacaagggggagatcagcgagaaggccaagctggagaacagcacccaggccgaggagggctttgatgtgcctgactgcaagaagaccatcgtgaatgacagccgggagagctgtgtggaggagaatgatgacaagatcacccaggccagccagagccaggagagcgaggactacagccagcccagcaccagcagcagcatcatctacagcagccaggaggatgtgaaggagtttgagcgggaggagacccaggacaaggaggagagcgtggagagcagcctgcccctgaatgccatcgagccctgtgtgatctgccagggccggcccaagaatggctgcatcgtgcacggcaagacaggccacctgatggcctgcttcacctgtgccaagaagctgaagaagaggaacaagccctgccctgtgtgccggcagcccatccagatgattgtgctgacctacttcccctag

SEQ ID NO: 57885 - DNA, 393 bp, Artificial Sequence
  derived and/or modified sequence
atgtgcaacaccaacatgtctgtgcccacagatggagctgtgaccaccagccagatcccagccagcgagcaggagaccctggtgcggcccaagcccctgctgctgaagctgctgaagtctgtgggcgcccagaaggacacctacaccatgaaggagtttgagcgggaggagacccaggacaaggaggagagcgtggagagcagcctgcccctgaatgccatcgagccctgtgtgatctgccagggccggcccaagaatggctgcatcgtgcacggcaagacaggccacctgatggcctgcttcacctgtgccaagaagctgaagaagaggaacaagccctgccctgtgtgccggcagcccatccagatgattgtgctgacctacttcccctag

SEQ ID NO: 57886 - DNA, 798 bp, Artificial Sequence
  derived and/or modified sequence
atgtctgtacctactgatggtgctgtaaccacctcacagattccagcttcggaacaagagaccctggatcttgatgctggtgtaagtgaacattcaggtgattggttggatcaggattcagtttcagatcagtttagtgtagaatttgaagttgaatctctcgactcagaagattatagccttagtgaagaaggacaagaactctcagatgaagatgatgaggactattggaaatgcacttcatgcaatgaaatgaatcccccccttccatcacattgcaacagatgttgggcccttcgtgagaattggcttcctgaagataaagggaaagataaaggggaaatctctgagaaagccaaactggaaaactcaacacaagctgaagagggctttgatgttcctgattgtaaaaaaactatagtgaatgattccagagagtcatgtgttgaggaaaatgatgataaaattacacaagcttcacaatcacaagaaagtgaagactattctcagccatcaacttctagtagcattatttatagcagccaagaagatgtgaaagagtttgaaagggaagaaacccaagacaaagaagagagtgtggaatctagtttgccccttaatgccattgaaccttgtgtgatttgtcaaggtcgacctaaaaatggttgcattgtccatggcaaaacaggacatcttatggcctgctttacatgtgcaaagaagctaaagaaaaggaataagccctgcccagtatgtagacaaccaattcaaatgattgtgctaacttatttcccctag

SEQ ID NO: 57887 - DNA, 732 bp, Artificial Sequence
  derived and/or modified sequence
atgtgcaataccaacatgtctgtacctactgatggtgctgtaaccacctcacagattccagcttcggaacaagagaccctggttagaccaaagccattgcttttgaagttattaaagtctgttggtgcacaaaaagacacttatactatgaaagaggactattggaaatgcacttcatgcaatgaaatgaatcccccccttccatcacattgcaacagatgttgggcccttcgtgagaattggcttcctgaagataaagggaaagataaaggggaaatctctgagaaagccaaactggaaaactcaacacaagctgaagagggctttgatgttcctgattgtaaaaaaactatagtgaatgattccagagagtcatgtgttgaggaaaatgatgataaaattacacaagcttcacaatcacaagaaagtgaagactattctcagccatcaacttctagtagcattatttatagcagccaagaagatgtgaaagagtttgaaagggaagaaacccaagacaaagaagagagtgtggaatctagtttgccccttaatgccattgaaccttgtgtgatttgtcaaggtcgacctaaaaatggttgcattgtccatggcaaaacaggacatcttatggcctgctttacatgtgcaaagaagctaaagaaaaggaataagccctgcccagtatgtagacaaccaattcaaatgattgtgctaacttatttcccctag

SEQ ID NO: 57888 - DNA, 1171 bp, Artificial Sequence
  derived and/or modified sequence
ctgtgtggccctgtgtgtcggaaagatggagcaagaagccgagcccgaggggcggccgcgacccctctgaccgagatcctgctgctttcgcagccaggagcaccgtccctccccggattagtgcgtacgagcgcccagtgccctggcccggagagtggaatgatccccgaggcccagggcgtcgtgcttccgcgcgccccgtgaaggaaactggggagtcttgagggacccccgactccaagcgcgaaaaccccggatggtgaggagcaggcaaatgtgcaataccaacatgtctgtacctactgatggtgctgtaaccacctcacagattccagcttcggaacaagagaccctggactattggaaatgcacttcatgcaatgaaatgaatcccccccttccatcacattgcaacagatgttgggcccttcgtgagaattggcttcctgaagataaagggaaagataaaggggaaatctctgagaaagccaaactggaaaactcaacacaagctgaagagggctttgatgttcctgattgtaaaaaaactatagtgaatgattccagagagtcatgtgttgaggaaaatgatgataaaattacacaagcttcacaatcacaagaaagtgaagactattctcagccatcaacttctagtagcattatttatagcagccaagaagatgtgaaagagtttgaaagggaagaaacccaagacaaagaagagagtgtggaatctagtttgccccttaatgccattgaaccttgtgtgatttgtcaaggtcgacctaaaaatggttgcattgtccatggcaaaacaggacatcttatggcctgctttacatgtgcaaagaagctaaagaaaaggaataagccctgcccagtatgtagacaaccaattcaaatgattgtgctaacttatttcccctagttgacctgtctataagagaattatatatttctaactatataaccctaggaatttagacaacctgaaatttattcacatatatcaaagtgagaaaatgcctcaattcacatagatttcttctctttagtataattgacctactttggtagtggaatagtgaatacttactataatttgacttgaatatgtagctcatcctttacaccaactcctaattttaaataatttctactctgtctt

SEQ ID NO: 57889 - DNA, 657 bp, Artificial Sequence
  derived and/or modified sequence
atgtgcaataccaacatgtctgtacctactgatggtgctgtaaccacctcacagattccagcttcggaacaagagaccctggactattggaaatgcacttcatgcaatgaaatgaatcccccccttccatcacattgcaacagatgttgggcccttcgtgagaattggcttcctgaagataaagggaaagataaaggggaaatctctgagaaagccaaactggaaaactcaacacaagctgaagagggctttgatgttcctgattgtaaaaaaactatagtgaatgattccagagagtcatgtgttgaggaaaatgatgataaaattacacaagcttcacaatcacaagaaagtgaagactattctcagccatcaacttctagtagcattatttatagcagccaagaagatgtgaaagagtttgaaagggaagaaacccaagacaaagaagagagtgtggaatctagtttgccccttaatgccattgaaccttgtgtgatttgtcaaggtcgacctaaaaatggttgcattgtccatggcaaaacaggacatcttatggcctgctttacatgtgcaaagaagctaaagaaaaggaataagccctgcccagtatgtagacaaccaattcaaatgattgtgctaacttatttcccctag

SEQ ID NO: 57890 - DNA, 6700 bp, Artificial Sequence
  derived and/or modified sequence
gcaccgcggcgagcttggctgcttctggggcctgtgtggccctgtgtgtcggaaagatggagcaagaagccgagcccgaggggcggccgcgacccctctgaccgagatcctgctgctttcgcagccaggagcaccgtccctccccggattagtgcgtacgagcgcccagtgccctggcccggagagtggaatgatccccgaggcccagggcgtcgtgcttccgcgcgccccgtgaaggaaactggggagtcttgagggacccccgactccaagcgcgaaaaccccggatggtgaggagcaggcaaatgtgcaataccaacatgtctgtacctactgatggtgctgtaaccacctcacagattccagcttcggaacaagagaccctggatcttgatgctggtgtaagtgaacattcaggtgattggttggatcaggattcagtttcagatcagtttagtgtagaatttgaagttgaatctctcgactcagaagattatagccttagtgaagaaggacaagaactctcagatgaagatgatgaggactattggaaatgcacttcatgcaatgaaatgaatcccccccttccatcacattgcaacagatgttgggcccttcgtgagaattggcttcctgaagataaagggaaagataaaggggaaatctctgagaaagccaaactggaaaactcaacacaagctgaagagggctttgatgttcctgattgtaaaaaaactatagtgaatgattccagagagtcatgtgttgaggaaaatgatgataaaattacacaagcttcacaatcacaagaaagtgaagactattctcagccatcaacttctagtagcattatttatagcagccaagaagatgtgaaagagtttgaaagggaagaaacccaagacaaagaagagagtgtggaatctagtttgccccttaatgccattgaaccttgtgtgatttgtcaaggtcgacctaaaaatggttgcattgtccatggcaaaacaggacatcttatggcctgctttacatgtgcaaagaagctaaagaaaaggaataagccctgcccagtatgtagacaaccaattcaaatgattgtgctaacttatttcccctagttgacctgtctataagagaattatatatttctaactatataaccctaggaatttagacaacctgaaatttattcacatatatcaaagtgagaaaatgcctcaattcacatagatttcttctctttagtataattgacctactttggtagtggaatagtgaatacttactataatttgacttgaatatgtagctcatcctttacaccaactcctaattttaaataatttctactctgtcttaaatgagaagtacttggtttttttttttcttaaatatgtatatgacatttaaatgtaacttattattttttttgagaccgagtcttgctctgttacccaggctggagtgcagtggcgtgatcttggctcactgcaagctctgcctcccgggttcgcaccattctcctgcctcagcctcccaattagcttggcctacagtcatctgccaccacacctggctaattttttgtacttttagtagagacagggtttcaccgtgttagccaggatggtctcgatctcctgacctcgtgatccgcccacctcggcctcccaaagtgctgggattacaggcatgagccaccgcgtccggcctaaatgtcacttagtacctttgatataaagagaaaatgtgtgaaagatttagttttttgtttttttgtttgtttgtttgtttgtttgttttgagatgagtctctctgtcgcccaggctggagtgcagtgtcatgatctagcagtctccgcttcccgggttcaagccattctcctggctcagcctctggagcagctgggattacaggcatgcaccaccatgcccagctaatttttgtatttttagtagagatagggtttcaccatgttggccaggctggtcacgaactcctgacctcaagtgaggtcacccgcctcggcctcccgaagtgctgggattgcagatgtgagccaccatgtccagccaagaattagtatttaaattttagatactctttttttttttttttttttttttttttgagacagagtcttgctccatcacccatgctagagtgcagtggagtgatctcggctcactgcaacttccgccttctgggttcaagctattctcctgcctcagccttccaagtaactgggattacaggcatgtaccaccataccagctgatttttttgtatttttagtaaagacagggtttcaccatgttagccaggctgatcttgaactcctaaactcaagtgatctactcacctcagcctcccaaaatgctgggattacagatgtgaggcacctggcctcagatttttgatactcttaaaccttctgatccttagtttctctctccaaaatactctttctaggttaaaaaaaaaaaggctcttatatttggtgctatgtaaatgaaaatgttttttaggttttcttgatttaacaatagagacagggtctccctgtgttgcccaggctggtctcgaactcctgggctcaagagatcctcctgtcttggcctcgcaaagtgctaagtaggattacaggcgttagccaccacacccggctgtaaaaatgtacttattctccagcctcttttgtataaaccatagtaagggatgggagtaatgatgttatctgtgaaaatagccaccatttacccgtaagacaaaacttgttaaagcctcctgagtctaacctagattacatcaggccctttttcacacacaaaaaaatcctttatgggatttaatggaatctgttgtttccccctaagttgaaaaacaactctaagacactttaaagtaccttcttggcctgggttacatggttcccagcctaggtttcagacttttgcttaaggccagttttagaaacccgtgaattcagaaaagttaattcagaaatttgataaacagaattgttatttaaaaactaactggaaagattgttaagttctttctgaattattcagaaattatgcatcattttccttcaagaatgacagggtcagcatgtggaattccaagatacctcttgacttcctctcaagctccgtgtttggtcagtggaggcccatccgagctcagcactgagaagtgttagtttctttgggacccatctaccctgaccacatcatgatgttcatctgcagctgttgcaaggtgttcagattgtataaacataaatgtcacaaaaactttaaaagaagtgcaattctcaaaaggttaggtggactaaagcattctgtaaagcaactgctaataatgagcttacagtggatttgaatttgaaaaatatagtaacaagcctgtcaaatatctgcaagaactatggaataaaactactgatgcagtgaagacagttgaaaagatcaaacaaatgccaagctatatttataatgaacaaattcaagaaaaaggactacggaaagttcaggacatcaaagaagtcaggcaaaactcatcttgacccctgttgcaggcaaaggaacgcagctggaagaaaagatgatataacagttaacaggatgcagacatggcagaggtttcctaaaaatctcattatctataaccatttctatatttacatttgaaaatctcctttggagacttagaacctctaaattattgacttattttttatataaggtcactccgatgaaaggtgattacaaaatcatctacattgctgtctacaaaacagataatatggatgtttgatcgcatctcattgttaactctttactgatatgtttgtaaatacagaagtgaaatgtggacataaaatagttacgctatttggttaatggtactagacaacatgtaattaatgacattcaaaaatttatggctagtgatatatataaagtaaaattttctttgcagtaaaatatgccctttattatagaagggaggatataaggaaccaacagtttgtatgaaaatagctcaaataatatcttttattttgattttaatatttcttattttggtttattagtgtcttagaacaaaatggccttatataatgaagcctagttatgctggactgttttgatctcttttaattgttctgacagatagttggggatgagagccgaataaggtttgcctgaaataactgacactatataatttctgctttggcaaatactaagttctaacttgtcattcctggtagaacaagctttatttttcgagcctagcaatgatctagaagcagatgttatctcagtgccttttgcaatttgttgtgtgggtttttttttttttaaagccacacaataattttggaaaacaatgtatgggtagaacatgtgtctgttaattgcacacaaaaccacttttaatgggtacagagttaaatttgaaggaataagttctagctgaagtattatgaactccaaataatgctttgaggacctccaaaggtaaaagtactaatccctttggccatttattgagagagagagagagagagagtagggtgactatagttaatgtattgaatgttcttgctacaaataaatgatatttgagctgatgggtgtgctaattacactgatttgatcaatacccattgtatgtgaaacagtacatacaccatatttacaattatgtatttaacatttaaaatttctaatataagtatctctcaaactgtggattaacttcttgatttatatttaaatatgaatcttaagcaaaacagtgaaaataaccatcttgatttagtgtttttctcccatatgtgaattgtatatacttaggtgaagacaataaaatcaactgaactgtaagcttagaataggactgaggtaattctgcacagcaactttactaatggtacattgttgcttcaaaactctctctctctctctctgtctgtctcaataaatggccaaagggattagtagtttacctgtggaggtcctccaagcattatttggagttgataatacttcagctacaaccaagcagaatctcttttttttggaggtcctcgaagcattatttggagttgataatacttcagcttcaatttggagttgataatatttcagctagaacctagtagaatctgtttttttcctttggaggtcctcaaagcattattggagttcataatactgaagctagaaccaagcagaatctgtttttttctgaggagtatcggtagcataaatgtgattataaacatagtacacttgatatatggaggcagtgacagctatttttacaaaatttaaatctgcaaatggattcaacatgtttatgggttattaaaattgtctgatttcttaggttctttatagtacacgtgttgaaaataaatgattaagaattgtttcaagaatgcaattatttgatcttaaatttttatgagttgttaaaatagaaattatttgaatatcatatatttgggtaacaaaaggcacaagtctgaatgtgtttctttttctggaatggccatgcctgcccactttagaaatacaaatatcactgggcagcttgaagcagttgggagcctccaatgagagcaacttgagagaatgatgttgcaagttagtaggagtaagaaatgctgtgttctccctgtcttctcttaggtcacatggcagcctggcctaagtgatcgtgaatggtctataagggaggtagctgggacagggaggggagtttgggctagccaccgtaccacttgtcagcgtgaaaagtaagattgtaattgcctgtttagttttctgcctcatctttgaaagttccaccaagctgggaacctcttgattgtgaggcacaaatgtaagtacatcagaaaaaaacaaaaaaactggctttaaagcaggagcttgtgggcccctaagccagacggggactagcttttggcattatataattaagattttttaaatccttaataagggttttattttatttttatttattttttgagacggagtcttgctctgtggctcaggctggagtacagtggtgcaatcttggctcactgcaacctctgcctcctggctgtgttcaagtggttctgcttcagcctcccaagtagctggggttagagcaccctgtcaccacgccccgctaatttttgtatttctagcagagatgaagtttcactatgttggccaggctgggctcaaactcctgacctcaagtgatctgcccgccttggccccccaaagtgctgtgattacaggcgtgagccgccacgcccagcctaataagggttttaaagataattagtgtgtaggtctgtaggcttatgatggtaaccacaagttgttaatggcattgtgaaaagtttttagttgcgctttatgggtggatgctgaattacattttgatttgatacttataaaaagaaaaagtatttcttcagcttaaaaaattgtttaaaagtttgtgatcatattgtctaccatgtagccagctttcaattatatgtaagagggactttttgacatttacaaataatactttgaggtagatatctgaaagcaccagcacttggaaggtgttcagaagtaacaaattataaaatgagctaacaaacgaaaggcaaaataaaaccgtaaagcaagc

SEQ ID NO: 57891 - DNA, 393 bp, Artificial Sequence
  derived and/or modified sequence
atgtgcaataccaacatgtctgtacctactgatggtgctgtaaccacctcacagattccagcttcggaacaagagaccctggttagaccaaagccattgcttttgaagttattaaagtctgttggtgcacaaaaagacacttatactatgaaagagtttgaaagggaagaaacccaagacaaagaagagagtgtggaatctagtttgccccttaatgccattgaaccttgtgtgatttgtcaaggtcgacctaaaaatggttgcattgtccatggcaaaacaggacatcttatggcctgctttacatgtgcaaagaagctaaagaaaaggaataagccctgcccagtatgtagacaaccaattcaaatgattgtgctaacttatttcccctag

SEQ ID NO: 57892 - DNA, 798 bp, Artificial Sequence
  derived and/or modified sequence
atgagcgtgcccaccgacggcgccgtgaccaccagccagatccccgcaagcgagcaggaaactttagatctggacgccggtgtgtctgagcactccggggactggctggaccaggatagtgtgtctgaccagttcagcgttgagtttgaggtggagtccctcgatagcgaggactactccttatccgaggaagggcaggaactttcagatgaggatgatgaagactactggaagtgtacatcttgcaatgaaatgaacccgcctttgccatcgcactgtaatcgctgctgggccctccgggagaattggctgcccgaagacaaggggaaggataagggtgagatctctgagaaggcgaaactagaaaactctactcaggcagaggaggggtttgacgtacctgactgtaaaaagaccatcgtgaatgactcaagagagtcctgtgtcgaagaaaacgatgacaaaatcacacaggcctcccagtcccaggaatctgaagactactctcagcccagcacaagtagctctattatctatagctcacaggaggacgttaaagaatttgagcgggaagaaactcaggacaaggaagaaagcgtggagagctctctgccactgaatgcaatagagccctgcgtcatttgccagggcagacctaagaatggctgtattgttcatggaaagacaggacatcttatggcctgtttcacttgcgccaagaagctcaagaagcggaacaagccttgccccgtgtgtcgtcaacctattcagatgatagttttaacttacttcccctag

SEQ ID NO: 57893 - DNA, 732 bp, Artificial Sequence
  derived and/or modified sequence
atgtgcaacaccaacatgagcgtgcccaccgacggcgccgtgaccactagccaaattcccgcgtcggagcaggaaacccttgtgagacctaaaccgctgctactcaagctgcttaagagcgtcggggcccaaaaggacacatacacaatgaaggaggactattggaagtgcacgtcctgcaatgagatgaacccccccttgccttctcactgcaacaggtgttgggcactacgtgagaattggctgcccgaagacaagggaaaagataaaggagagatatcagaaaaagccaagctcgagaactccacccaggcagaggaagggttcgatgttccagattgcaaaaagacaatcgttaacgactctagggaaagttgtgtcgaagagaacgatgacaaaatcacccaggcaagtcaatcccaggaatccgaagattattcgcagccgtccacaagttcctcgatcatctatagttcccaggaagacgttaaggaatttgaacgtgaggaaacccaagacaaggaggaatcggtggagtcaagtctccctctgaatgccatagagccctgcgtcatctgccaggggaggccaaaaaacggttgcattgtgcatgggaagactgggcaccttatggcctgcttcacctgcgctaaaaaactaaaaaaacgcaataagccctgcccggtctgtcgtcaacccattcagatgatcgtgcttacatattttccatag

SEQ ID NO: 57894 - DNA, 657 bp, Artificial Sequence
  derived and/or modified sequence
atgtgcaacaccaacatgagcgtgcccaccgacggcgccgtgaccaccagccagattcccgccagcgaacaggagaccttagattactggaagtgtacgagctgcaatgaaatgaatccccctctgccttcccactgtaataggtgctgggctctgcgcgagaattggctgccagaggataagggaaaggacaagggagagatctccgaaaaggccaagctagagaactccacacaagccgaggagggcttcgacgtgccagactgcaaaaagacaattgtgaacgacagcagagagtcctgcgtggaagaaaacgacgataagattacccaggccagccagtctcaagagagcgaggattattctcaacccagcacctcaagctcaatcatctatagcagccaggaagacgtaaaggagtttgaacgggaagagacgcaagataaggaggagagcgtcgagagctccctccctctgaacgctatcgagccgtgcgttatttgccaggggcgccccaagaacggctgtattgtccatggcaagaccggccacttaatggcctgcttcacatgtgccaaaaaattgaaaaaacgaaacaagccttgcccagtgtgcagacaacccatccagatgattgttctaacatacttcccttag

SEQ ID NO: 57895 - DNA, 657 bp, Artificial Sequence
  derived and/or modified sequence
atgtgcaacaccaacatgagcgtgcccaccgacggcgccgtgaccacatcccaaattccggccagcgagcaggaaactctcgactattggaaatgtactagttgcaatgagatgaatccccctctgccgtctcattgtaacaggtgctgggccctccgtgagaattggctgcccgaggacaaaggaaaagacaagggtgagatttctgagaaggcgaaattagagaacagcacacaagcagaggagggcttcgatgtccccgattgtaagaagactattgtgaatgacagtcgcgagagctgcgtggaggaaaatgatgataagatcacacaggcaagccagtcacaggagtcagaagactattcccaaccctccacgagctcatctatcatatatagttctcaggaggatgtgaaggagtttgaacgggaggaaacacaggataaggaagagagcgtggagagcagtctgcctctgaacgccattgaaccttgtgtgatctgccagggaagaccaaagaatggctgtatcgtgcatgggaaaaccgggcacctaatggcgtgcttcacctgcgctaagaagctcaagaagaggaacaagccatgcccggtgtgccggcagccaattcagatgattgtgcttacctactttccctag

SEQ ID NO: 57896 - DNA, 813 bp, Artificial Sequence
  derived and/or modified sequence
atgtgcaacaccaacatgagcgtgcccaccgacggcgccgtgaccaccagccagatccccgccagtgagcaggaaactttggatcttgacgcgggtgtatcagagcattctggggactggctggatcaggattccgtctcggaccagttctcggtggaatttgaagttgagagcttagactctgaggactacagtctgtccgaagaaggacaagaactttccgacgaggatgacgaggactactggaagtgcacgagctgtaatgaaatgaatccaccactgcccagtcattgcaataggtgttgggcacttcgggagaactggctgcccgaagacaaaggaaaggataagggcgagatatccgaaaaggcaaagctcgagaactctactcaggccgaggaagggtttgacgtcccggactgtaagaaaacaattgtaaacgacagccgggaaagctgcgtcgaggagaacgacgataaaattactcaggcctcccagagccaggaaagtgaagattattcccagccgtcaacgagctcgtctatcatctactcatcacaggaggacgtgaaggagtttgagagggaggagacccaagataaagaagaatcggtggagtcttccctcccgctgaacgcgatcgagccatgcgtcatttgccaaggaaggcctaagaatggctgcatcgtacacggaaaaacgggccacctgatggcctgttttacatgtgccaaaaaactcaaaaagcggaataagccctgccccgtttgccgccagcctatccagatgattgtgttaacatactttccttag

SEQ ID NO: 57897 - DNA, 393 bp, Artificial Sequence
  derived and/or modified sequence
atgtgcaacaccaacatgagcgtgcccaccgacggcgccgtgaccaccagccagatccctgcttcagagcaggagaccctcgttcgccccaagcctctgttacttaaactccttaaaagcgttggggcccagaaggacacatatacgatgaaggaatttgagagagaagagacccaggacaaagaggagagcgtggagagtagcttgcccctgaatgccatagagccatgtgttatctgtcaggggaggccgaaaaatggatgcattgttcacggaaagacgggacatctgatggcttgttttacctgcgccaagaaactgaagaagcggaataaaccttgcccagtatgcagacaacctatccaaatgatcgtcctgacttattttccctag

SEQ ID NO: 57898 - DNA, 798 bp, Artificial Sequence
  derived and/or modified sequence
atgagcgtgccaacggatggagccgtcaccacttctcagataccggcttctgaacaggagacactggacctcgatgcaggggtatctgagcacagtggtgattggcttgaccaggactccgtctctgaccagttctccgtggaatttgaggtcgaaagcctggattcggaagactacagcttgtcagaagagggacaggaactctccgatgaggacgacgaagactattggaagtgtactagctgcaacgagatgaacccccctttgcctagccattgcaatagatgttgggcactgcgcgaaaactggctgcccgaagataaaggcaaggataaaggggagataagcgaaaaagctaagctggaaaattccactcaggccgaggaggggtttgacgttcccgactgcaagaaaacaatcgtgaatgattcacgcgaaagttgtgtggaggagaacgatgataaaatcacccaagcatcccaaagccaggaaagtgaagattacagtcaaccctcgacttcaagctcgatcatttatagcagccaggaggatgtaaaagagtttgagcgggaggaaactcaggataaggaagagtctgtggaaagcagcctgcctttgaatgccatcgagccctgtgtcatatgtcagggcagacccaagaacggatgtatcgtgcacgggaagactggccaccttatggcctgctttacttgcgcaaaaaaactgaaaaagcggaataagccctgccccgtgtgcaggcaaccgattcagatgattgtgctgacctactttccttag

SEQ ID NO: 57899 - DNA, 732 bp, Artificial Sequence
  derived and/or modified sequence
atgtgcaacaccaacatgagcgttcccaccgacggagccgtgactacctcgcagattccagcaagtgagcaggagacgcttgtccgacctaaacctttattgctgaagctcctgaagtccgtgggtgcccagaaggatacgtacacaatgaaggaagactactggaagtgcacgtcctgcaatgaaatgaacccccctctgccaagtcactgtaaccgttgttgggcactcagggagaactggctgccagaagacaaggggaaggataaaggagagatttcagaaaaggcaaaattagagaattcgacgcaagcagaggaaggattcgacgtgcctgattgtaaaaagacaatcgtgaacgattcgagagagtcctgcgtggaagagaatgatgacaagatcacccaggcttcacagtcccaggagtccgaggactactcccaaccctctaccagttcgtcaattatatattcttcccaggaggacgtgaaagaattcgagcgtgaagagactcaggacaaagaggagagcgtcgaaagctctctgccactaaacgccatcgagccttgtgtgatttgtcagggcagacctaagaacgggtgcatcgttcacgggaaaacaggccaccttatggcctgctttacttgcgctaagaagctgaagaaacgaaacaagccgtgtcccgtctgcagacaaccgatccagatgatcgtgttaacctactttccttag

SEQ ID NO: 57900 - DNA, 657 bp, Artificial Sequence
  derived and/or modified sequence
atgtgtaatacaaatatgtctgtgcccaccgacggtgccgtgaccaccagtcagattcctgcttcagaacaggagacactggactattggaaatgtacctcatgcaacgaaatgaatccacccttgcctagccactgtaatcggtgctgggctctgagggaaaactggcttcccgaggacaaaggtaaggacaagggtgagatttctgagaaggctaaactggagaactccactcaggctgaggaaggcttcgacgttccagactgcaagaagaccatcgtgaacgacagtcgagagtcctgcgttgaggagaatgatgacaaaatcactcaggcttcccagagtcaggagtccgaggattactcacagcccagcacttccagctcaatcatatactcttctcaggaggatgtgaaagagtttgagcgtgaggagacccaggataaggaagagagcgtcgaatccagcctgcccctgaacgccattgaaccatgtgttatctgtcaggggaggccaaagaatggttgtatagtgcacgggaaaaccggtcacctgatggcttgtttcacttgtgccaaaaagctgaagaaaaggaacaaaccatgccctgtctgccggcagccgatacagatgatcgtgttgacttacttcccctag

SEQ ID NO: 57901 - DNA, 657 bp, Artificial Sequence
  derived and/or modified sequence
atgtgtaatactaacatgtcagtgcctaccgatggagccgtgacaacgtcccaaatccctgccagtgaacaggagacactcgactattggaagtgtaccagttgtaacgaaatgaatcccccactcccatctcattgtaacagatgctgggcattgcgcgaaaactggttgcctgaagacaagggaaaggataagggggagattagcgagaaggctaagcttgaaaacagcactcaggcagaggagggctttgatgtacccgactgcaaaaagaccatcgtcaacgacagtagagagtcctgcgtcgaggaaaacgatgataagataactcaggcatcccagtcccaggagtcggaggactattctcaaccaagtacttccagttctattatttacagctcacaggaggatgtcaaagaattcgaaagagaagagacccaggataaagaggagagtgttgaatcctcgctgcccctgaacgccatcgaaccctgcgtcatttgtcaaggtcgaccaaagaatggttgtattgtgcacggaaaaaccggacacttgatggcttgcttcacctgtgcaaagaaactaaagaagcggaacaagccttgccctgtgtgccgccagcctattcagatgatcgtgctgacatacttcccctag

SEQ ID NO: 57902 - DNA, 813 bp, Artificial Sequence
  derived and/or modified sequence
atgtgcaacaccaacatgtcagtgccaacagatggtgccgtgactacctcccagatccctgcgagcgaacaggaaacactggatctggatgccggtgtctccgagcactcaggggattggctggatcaggactcggttagcgatcagttttccgtggagttcgaggtggagtcgttggatagcgaagattattctttaagcgaggagggacaggaactgtcggacgaggatgacgaggattattggaagtgtacatcctgtaacgagatgaatcctcctcttcctagtcactgtaaccggtgctgggcactcagggaaaactggctgccggaggataaggggaaggataagggcgagatttccgagaaggccaagttggaaaattcaacacaggcggaagagggattcgacgtgccagactgtaagaaaaccattgtcaacgatagccgggagtcttgcgttgaagagaacgatgataagattactcaggcctcccagtcacaggagtctgaagactattctcagcccagcactagcagcagcattatctatagtagtcaggaggacgtaaaagagttcgaacgtgaggagacccaggataaggaggagagcgtagaaagttctctccctttaaacgccattgagccctgtgtgatttgtcaaggtagaccgaagaatggctgtatagtgcatgggaaaactggccaccttatggcttgttttacctgcgcgaaaaagctgaagaagagaaacaagccctgccctgtgtgtagacagcccattcagatgattgtcctgacctactttccatag

SEQ ID NO: 57903 - DNA, 393 bp, Artificial Sequence
  derived and/or modified sequence
atgtgcaacaccaatatgagcgtgcccactgatggcgcagtaaccacatcacagattcccgcaagcgagcaagagaccctggtgcgcccaaagcctttgcttcttaaattactgaagtcagtgggggctcagaaggacacatatactatgaaggagttcgagagggaggaaacccaggataaggaggaatcagtggagtcgagtctgccccttaacgctattgagccatgcgttatctgtcagggtcggcctaaaaacggctgcatagtacacggcaagacagggcatttgatggcttgcttcacatgtgcgaaaaagctgaaaaagcgcaataaaccttgccctgtgtgccgccaacccatccagatgatagtactcacatacttcccctag

SEQ ID NO: 57904 - protein, 24 aa, Artificial Sequence
  derived and/or modified sequence
MAAVVQQNDLVFEFASNVMEDERQ

SEQ ID NO: 57905 - protein, 595 aa, Artificial Sequence
  derived and/or modified sequence
MAAVVQQNDLVFEFASNVMEDERQLGDPAIFPAVIVEHVPGADILNSYAGLACVEEPNDMITESSLDVAEEEIIDDDDDDITLTVEASCHDGDETIETIEAAEALLNMDSPGPMLDEKRINGIPEVMETQQVQEKYADSPGASSPEQPKRKKGRKTKPPRPDSPATTPNISVKKKNKDGKGNTIYLWEFLLALLQDKATCPKYIKWTQREKGIFKLVDSKAVSRLWGKHKNKPDMNYETMGRALRYYYQRGILAKVEGQRLVYQFKEMPKDLIYINDEDPSSSIESSDPSLSSSATSNRNQTSRSRVSSSPGVKGGATTVLKPGNSKAAKPKDPVEVAQPSEVLRTVQPTQSPYPTQLFRTVHVVQPVQAVPEGEAARTSTMQDETLNSSVQSIRTIQAPTQVPVVVSPRNQQLHTVTLQTVPLTTVIASTDPSAGTGSQKFILQAIPSSQPMTVLKENVMLQSQKAGSPPSIVLGPAQVQQVLTSNVQTICNGTVSVASSPSFSATAPVVTFSPRSSQLVAHPPGTVITSVIKTQETKTLTQEVEKKESEDHLKENTEKTEQQPQPYVMVVSSSNGFTSQVAMKQNELLEPNSF

SEQ ID NO: 57906 - DNA, 1788 bp, Artificial Sequence
  derived and/or modified sequence
atggcagctgtggtgcagcagaatgacctagtgtttgagttcgcctcaaacgtcatggaagatgagaggcagctcggcgaccccgctattttcccggcggttatcgtggagcacgtacccggcgctgacatcctgaacagttacgccgggctggcctgcgtcgaggagccgaatgatatgatcaccgaaagttcactcgatgttgctgaagaagagattattgatgacgatgacgacgatatcacactcaccgtagaggcctcctgtcatgatggcgacgagacaatcgagaccatcgaggctgccgaggcgttactcaatatggattctcctggcccaatgctggacgaaaagcgaatcaacggtatacctgaagttatggagacccaacaggtccaagagaagtatgccgactctcccggcgcatcttctccagagcaaccaaagagaaaaaaaggacggaagacgaagcccccacgccctgatagcccggcaacgaccccaaatatatctgtaaagaagaagaacaaggacggcaagggtaacaccatctacctgtgggagttcctgctcgccctgctacaagataaggccacttgcccgaaatacattaaatggacacagcgtgaaaagggaatttttaaacttgtcgatagcaaggccgtcagcaggctgtgggggaagcataagaataagcccgatatgaactatgagactatgggacgtgccctacggtactattaccagcgggggatccttgcaaaggtggaaggacaacggctcgtgtatcagtttaaggaaatgcctaaggatttgatctatatcaacgatgaagatcctagcagcagtatcgagtcctccgacccaagcctctcttcctctgcaacaagtaaccgcaaccagacgtcacggtctcgagtctctagctcccctggggtaaaaggtggggcgaccacagttctgaagcccgggaacagcaaggcagctaaacccaaggacccggttgaggtagcccaaccaagtgaagtgctacgtaccgtacagcccactcagagcccataccccacacagttgttcagaactgtgcacgtagttcagcccgtgcaggctgtgcctgagggtgaagccgcccggaccagcacgatgcaggacgagactctaaattcgtccgtgcagtccatcagaaccatccaggctccaacccaggtgccggttgtcgtctctccccgaaatcagcagctacacactgtaaccctgcaaactgtgcccctgaccactgtcatcgcgagcacagaccccagcgcagggactgggagccagaaatttatcttacaggcaattccatcctcccagccaatgacagttctgaaagagaatgtgatgctacagtcccagaaagccggaagccccccctccattgtcctcggacccgcacaggtccagcaggttctgacctccaatgtgcagacaatttgtaacggtaccgtctctgtggcctccagcccttcgtttagcgccaccgcccccgtcgtcactttttctccccgctccagtcagctggtggcccatcctcctgggaccgtaatcacctccgttatcaaaacccaggagaccaaaaccttgacccaggaggtcgaaaagaaagagagtgaagatcatctgaaggagaataccgaaaagaccgagcaacagccacagccttatgtgatggtcgtgagtagcagcaacggattcacaagtcaggtggcgatgaagcagaacgagctgctggagcctaactcattctag

SEQ ID NO: 57907 - DNA, 1788 bp, Artificial Sequence
  derived and/or modified sequence
atggctgctgtggtgcagcagaatgacctggtgtttgaatttgccagcaatgtgatggaggatgagcggcagctgggggaccctgccatcttccctgctgtgattgtggagcacgtgcctggagctgacatcctgaacagctatgccggcctggcctgtgtggaggagcccaatgacatgatcacagagagcagcctggatgtggccgaggaggagatcattgatgatgatgatgatgacatcaccctgactgtggaggccagctgccatgatggagatgagaccatcgagaccattgaagctgctgaggccctgctgaacatggacagccctggccccatgctggatgagaagaggatcaatggcatccctgaggtgatggagacccagcaggtgcaggagaagtatgctgacagccctggggccagcagccctgagcagcccaagaggaagaagggcaggaagaccaagccacccaggccagacagccctgccaccacccccaacatctctgtgaagaagaagaacaaggatggcaagggcaacaccatctacctgtgggagttcctgctggccctgctgcaggacaaggccacctgccccaagtacatcaagtggacccagcgggagaagggcatcttcaagctggtggacagcaaggctgtgtcccggctgtggggcaagcacaagaacaagccagacatgaactatgagaccatgggccgggccctgcgctactactaccagaggggcatcctggccaaggtggagggccagaggctggtgtaccagttcaaggagatgcccaaggacctgatctacatcaatgatgaggaccccagcagcagcattgagagcagtgaccccagcctgagcagcagcgccaccagcaacagaaaccagaccagccgcagccgggtgagcagcagccctggggtgaagggcggggccaccaccgtgctgaagccaggcaacagcaaggccgccaagcccaaggaccctgtggaggtggcccagcccagcgaggtgctgaggacagtgcagcccacccagagcccctaccccacccagctgttcagaacagtgcacgtggtgcagcctgtgcaggccgtgcctgagggggaggccgcccggaccagcaccatgcaggatgagaccctgaacagctctgtgcagagcatccgcaccatccaggcccccacccaggtgcctgtggtggtgagccccaggaaccagcagctgcacacagtgaccctgcagacagtgcccctgaccaccgtcatcgccagcacagaccccagcgctggcaccggcagccagaagttcatcctgcaggccatccccagcagccagcccatgacagtgctgaaggaaaatgtgatgctgcagagccagaaggccggcagcccccccagcatcgtgctgggccctgcccaggtgcagcaggtgctgaccagcaatgtgcagaccatctgcaatggaacagtgtctgtggccagcagccccagcttcagcgccacagcccctgtggtgaccttcagccccaggagcagccagctggtggcccaccccccaggcaccgtcatcaccagcgtcatcaagacccaggagaccaagaccctgacccaggaggtggagaagaaggagagcgaggaccacctgaaggagaacacagagaagacagagcagcagccccagccctacgtgatggtggtgagcagcagcaatggcttcaccagccaggtggccatgaagcagaatgagctgctggagcccaacagcttctag

SEQ ID NO: 57908 - DNA, 1788 bp, Artificial Sequence
  derived and/or modified sequence
atggccgccgtggtgcagcagaacgacctggtgttcgagttcgcctcaaatgtcatggaggacgagcggcagctcggtgatccggcgatctttcccgccgtgattgtggaacacgtgccaggtgccgacatcctgaactcctacgccgggctggcttgcgtggaagagcctaatgacatgataaccgagagctcgttagatgtcgcggaagaggaaattattgatgacgatgacgacgacattactcttaccgtggaggcgagctgtcatgacggagatgaaactatagagactattgaggccgccgaggccctgttaaacatggactcaccaggaccaatgctggatgagaagaggataaatggcatcccggaggtgatggaaacccagcaagttcaagagaagtacgcagacagtccaggagcctcgtctccagagcaacctaagcggaagaaaggcaggaagaccaaacccccccgccccgattcaccggccaccacccccaacatttcagtcaaaaaaaagaacaaggatggtaagggcaacaccatttatctgtgggaattcctgttggcactcctgcaggacaaggccacttgccccaagtacatcaagtggacccagcgtgagaagggcatctttaagcttgtcgattctaaggcagttagcaggctctgggggaagcataagaacaaacccgacatgaattacgagaccatgggtcgagcactccgttattactaccagcgcggtatcttagcaaaggttgaaggccagagactagtataccagttcaaggaaatgcctaaggatctcatctacatcaatgacgaagatccctcctcctcaatcgaatcatcagatccaagcctgtccagctcagccacgtcgaacaggaaccagacatctcggtcacgtgtgagctccagtcccggagtgaagggtggtgctacaactgtgctcaagcccggcaattctaaggctgccaagcccaaagatccagtggaggtcgcccagccttctgaggtcctgagaacagtgcagcctacccagtcaccttacccgacgcagctgtttcgaacagtgcatgtggtgcaacccgtgcaggccgttcccgaaggagaagccgctcgcacctccacaatgcaagatgagaccctgaactcgagcgtacaaagtataaggaccatccaggcacctacgcaagtcccggtggtagtctcaccgagaaaccagcaactgcataccgtgaccttgcagactgttcccctcaccactgtcatagcaagcaccgacccctctgccggaactgggtcacagaaattcattcttcaggccattccatccagccaacccatgacagtactgaaggaaaatgtgatgctgcagagccagaaagcaggcagtccaccatctattgttcttggacccgcccaagtccaacaggtcttaacatctaatgttcagacaatttgcaatggaactgtttcagttgcttcatcaccttcattcagcgcaaccgctcctgttgtgactttcagccctcgttctagtcagctggtggctcacccacccggcacagtgatcacttccgttatcaaaacccaagagacaaaaactctgacacaggaagtggagaaaaaggagagtgaggatcacttaaaagaaaacacggagaaaaccgaacagcaaccacaaccgtatgtcatggttgtgtcttcaagtaacggtttcacaagccaggtcgctatgaagcagaacgagctgctcgagcctaattcattttag

SEQ ID NO: 57909 - DNA, 1788 bp, Artificial Sequence
  derived and/or modified sequence
atggctgctgttgtgcagcagaacgacctagttttcgaattcgccagcaatgtgatggaggatgaaaggcagctcggcgatcccgctattttcccggctgtcatagtcgaacacgttccgggagccgacatccttaacagctatgcgggactcgcctgcgttgaggaaccgaacgatatgatcaccgagagtagcctagacgtagccgaggaggagatcatcgacgacgacgacgatgatatcacactgacagtcgaggcctcctgccacgacggggacgagactatagaaactatcgaggcggcagaagctctactgaatatggatagccccggtccgatgctggacgagaaacggatcaacgggattcccgaagtgatggagacacaacaagtccaagaaaaatatgcggacagcccgggagcgagcagccctgagcagccaaagaggaagaaggggaggaaaacaaagccccctcgccctgattctcccgcaacgacccccaatatctccgtgaaaaaaaagaataaagacggaaaaggtaataccatttacctgtgggagttcttactggcactgctgcaggataaagccacttgccccaagtacattaaatggacccagagggagaagggcatcttcaaactcgttgactccaaagcagtgagccgactgtgggggaagcataaaaacaaacccgacatgaactacgaaactatgggaagggccctaagatactactatcaaagaggtatcctcgctaaggtggagggtcagaggctagtataccaattcaaggaaatgcccaaagatctgatatacatcaacgatgaggacccaagctcctctattgagtcttcagacccctccttgtccagctccgcaacaagcaatcgtaatcagacttctaggtcccgggtgagcagcagccctggggtcaaagggggagccaccaccgtgctcaaacccggtaactccaaagctgctaaaccaaaggaccccgtcgaggtggctcaaccgtccgaagttctccggacagtccagcctacccagtctccctacccgacacagctatttcggacagtacacgtggtccagccagtccaagctgtccctgagggggaggcagctcgtaccagcaccatgcaggacgagactctcaattctagcgttcagtcaatacgaaccatccaggctcccacccaggtgcctgttgtggtctctccaagaaatcagcagttgcatacggtcacgctgcagactgtcccactgactactgtgatcgctagcaccgacccgagtgcagggactggctcacagaaatttatcctgcaggcaatcccaagctcccagccgatgacggtcctcaaggaaaatgtcatgttgcaatcacaaaaggcgggatccccacccagcattgtcttaggaccagctcaggtccagcaagtcctgacaagtaatgtgcagacgatctgtaatggcaccgtgtccgtcgccagctccccatctttttcggcgaccgcacccgttgtgaccttcagtccaagatcgtcccagctggtggcacacccacctgggactgtaatcaccagcgtgatcaaaacccaggagacaaaaactctgactcaggaggttgaaaaaaaagagtccgaggatcacctcaaggagaacactgagaaaaccgaacagcaaccgcaaccttacgtcatggtggtcagcagctcaaacggttttacatctcaggttgcgatgaaacagaacgagctgttagagcccaactcattttag

SEQ ID NO: 57910 - DNA, 3521 bp, Artificial Sequence
  derived and/or modified sequence
gccaagaagcttgagagaagaaaaatttcagaaaaattgtctcaatttgactagaatatcaatgaaccaggaaaactgaagcaccttccctaaagaaaacttgggtatacaattactccacagacagagctgagggttttttacccaaatcagtcactggattttgctgcctgatacgtgaatcttcttggaatttttctcatgtggatctaaggggaatgctttattatggctgctgttgtccaacagaacgacctagtatttgaatttgctagtaacgtcatggaggatgaacgacagcttggtgatccagctatttttcctgccgtaattgtggaacatgttcctggtgctgatattctcaatagttatgccggtctagcctgtgtggaagagcccaatgacatgattactgagagttcactggatgttgctgaagaagaaatcatagacgatgatgatgatgacatcacccttacagttgaagcttcttgtcatgacggggatgaaacaattgaaactattgaggctgctgaggcactcctcaatatggattcccctggccctatgctggatgaaaaacgaataaatgggattcctgaagtgatggaaacacagcaggtgcaagaaaaatatgcagactcaccgggagcctcatcaccagaacagcctaagaggaaaaaaggaagaaaaactaaaccaccacgaccagattccccagccactacgccaaatatatctgtgaagaagaaaaacaaagatggaaagggaaacacaatttatctttgggagtttttactggcactgctccaggacaaggctacttgtcctaaatacatcaagtggacccagcgagagaaaggcatttttaaattggtggattctaaagcagtgtccaggttgtgggggaagcacaaaaacaaacctgatatgaattatgagaccatgggaagagcactcaggtactattaccaaaggggtattctggcaaaagtggaaggtcagcgcttggtgtatcagtttaaagaaatgccaaaagatcttatatatataaatgatgaggatccaagttccagcatagagtcttcagatccatcgctatcttcatcagccacttcaaataggaatcaaaccagccggtcgagagtatcttcaagtccaggggtaaaaggaggagccactacagttctaaaaccagggaattctaaagctgcaaaacccaaagatcctgtggaagttgcacaaccatcagaagttttgaggacagtgcagcccacgcagtctccatatcctacccagctcttccggactgttcatgtagtacagccagtacaggctgtcccagagggagaagcagctagaaccagtaccatgcaggatgaaacattaaattcttccgttcagagtattaggactatacaggctccaacccaagttccagtggttgtgtctcctaggaatcagcagttgcatacagtaacactccaaacagtgccactcacaacagttatagccagcacagatccatcagcaggtactggatctcagaagtttattttacaagccattccatcatcacagcccatgacagtactgaaagaaaatgtcatgctgcagtcacaaaaggcgggctctcctccttcaattgtcttgggccctgcccaggttcagcaggtccttactagcaatgttcagaccatttgcaatggaaccgtcagtgtggcttcctctccatccttcagtgctactgcacctgtggtgaccttttctcctcgcagttcacagctggttgctcacccacctggcactgtaatcacttcagttatcaaaactcaagaaacaaaaactcttacacaggaagtagagaaaaaggaatctgaagatcatttgaaagagaacactgagaaaacggagcagcagccacagccttatgtgatggtagtgtccagttccaatggatttacttctcaggtagctatgaaacaaaacgaactgctggaacccaactctttttagttaatataccaaagcttatgaataattgtttgttaattgaacattttcaattatatgcagactgactgattctaagataaattctaaggaggtttctaattttgtaattgttaaaaatagagttaattttgactttgttagatgagggaggaaaactcaactgtttctctttgttatctaaatgtttcagaattcaatcgtgaaggaacaggcattttacactatgaagacattcttttgagatttttatttcagttgctatatcataagcatttttaaagtttcttttctaattttacattgtattagattttctgattcttttgtaaatacagaacttaaatagaaggcaacaggaaatttatataggaactattttcattccacttgtgtaagttaagtcttgactctttcaaatgcaaaaaacctattttatgctttgttaaaattatggtgtcacttagattgactttagttgactgcactatataatatagaactatgaatatgtagaataacatgaaaaattggaggtgctggtggtatggctgaccctgtttcagaagcaggatagtataaaagcatcagcctaagaatggcactcccactaactagctatgtaatcttgacctctttgggctttagttcctctcataaaaggaagagatgtattggattagactagatgatcaccactttctcttctagttctaatttttttaattctaatacctatattttcaagttatgtcaattaaatcattatcaggttatttcctaatgtaagaatagctaaaatgttgcagagaaataagtgacccaacaaaatttattcatctgttatgggtaagatctgccataaattcttcctaaataatttgtttactaactctttaggccactgtgctttgcggtccattagtaaacttgtgttgctaagtgctaaacagaatactgctattttgagagagtcaagactctttcttaagggccaagaaagcaacttgagccttgggctaatctggctgagtagtcagttataaaagcataattgctttatattttggatcattttttactgggggcggacttggggggggttgcatacaaagataacatatatatccaactttctgaaatgaaatgtttttagattactttttcaactgtaaataatgtacatttaatgtcacaagaaaaaaatgtcttctgcaaattttctagtataacagaaatttttgtagatgaaaaaaatcattatgtttagaggtctaatgctatgttttcatattacagagtgaatttgtatttaaacaaaaatttaaattttggaatcctctaaacatttttgtatctttaattggtttattattaaataaatcatataaaaattctcagtgtctgttttcaggcaaaagtttcttaaagaataagtgtgcagagaatattactagaacatcagcattacttaatgtttataaataaatttcattagtcagaattgc

SEQ ID NO: 57911 - DNA, 1788 bp, Artificial Sequence
  derived and/or modified sequence
atggccgccgtggtgcagcagaacgacctggtgttcgagttcgccagcaacgtgatggaggacgagagacagctgggcgaccccgccatcttccccgccgtgatcgtggagcacgtgcccggcgccgacatcctgaacagctacgccggcctggcctgcgtggaggagcccaacgacatgatcaccgagagcagcctggacgtggccgaggaggagatcatcgacgacgacgacgacgacatcaccctgaccgtggaggccagctgccacgacggcgacgagaccatcgagaccatcgaggccgccgaggccctgctgaacatggacagccccggccccatgctggacgagaagagaatcaacggcatccccgaggtgatggagacccagcaggtgcaggagaagtacgccgacagccccggcgccagcagccccgagcagcccaagagaaagaagggcagaaagaccaagccccccagacccgacagccccgccaccacccccaacatcagcgtgaagaagaagaacaaggacggcaagggcaacaccatctacctgtgggagttcctgctggccctgctgcaggacaaggccacctgccccaagtacatcaagtggacccagagagagaagggcatcttcaagctggtggacagcaaggccgtgagcagactgtggggcaagcacaagaacaagcccgacatgaactacgagaccatgggcagagccctgagatactactaccagagaggcatcctggccaaggtggagggccagagactggtgtaccagttcaaggagatgcccaaggacctgatctacatcaacgacgaggaccccagcagcagcatcgagagcagcgaccccagcctgagcagcagcgccaccagcaacagaaaccagaccagcagaagcagagtgagcagcagccccggcgtgaagggcggcgccaccaccgtgctgaagcccggcaacagcaaggccgccaagcccaaggaccccgtggaggtggcccagcccagcgaggtgctgagaaccgtgcagcccacccagagcccctaccccacccagctgttcagaaccgtgcacgtggtgcagcccgtgcaggccgtgcccgagggcgaggccgccagaaccagcaccatgcaggacgagaccctgaacagcagcgtgcagagcatcagaaccatccaggcccccacccaggtgcccgtggtggtgagccccagaaaccagcagctgcacaccgtgaccctgcagaccgtgcccctgaccaccgtgatcgccagcaccgaccccagcgccggcaccggcagccagaagttcatcctgcaggccatccccagcagccagcccatgaccgtgctgaaggagaacgtgatgctgcagagccagaaggccggcagcccccccagcatcgtgctgggccccgcccaggtgcagcaggtgctgaccagcaacgtgcagaccatctgcaacggcaccgtgagcgtggccagcagccccagcttcagcgccaccgcccccgtggtgaccttcagccccagaagcagccagctggtggcccacccccccggcaccgtgatcaccagcgtgatcaagacccaggagaccaagaccctgacccaggaggtggagaagaaggagagcgaggaccacctgaaggagaacaccgagaagaccgagcagcagccccagccctacgtgatggtggtgagcagcagcaacggcttcaccagccaggtggccatgaagcagaacgagctgctggagcccaacagcttctag

SEQ ID NO: 57912 - protein, 606 aa, Artificial Sequence
  derived and/or modified sequence
MSHTASSCQELVENCAVHVAGMAQEDSRRGQVPSSFYHGANQELDLSTKVYKRESGSPYSVLVDTKMSKPHLHETEEQPYFRETRAVSDVHAVKEDRENSDDTEEEEEEVSYKREQIIVEVNLNNQTLNVSKGEKGVSSQSKETPVLKTSSEEEEEESEEEATDDSNDYGENEKQKKKEKIVEKVSVTQRRTRRAASVAAATTSPTPRTTRGRRKSVEPPKRKKRATKEPKAPVQKAKCEEKETLTCEKCPRVFNTRWYLEKHMNVTHRRMQICDKCGKKFVLESELSLHQQTDCEKNIQCVSCNKSFKKLWSLHEHIKIVHGYAEKKFSCEICEKKFYTMAHVRKHMVAHTKDMPFTCETCGKSFKRSMSLKVHSLQHSGEKPFRCENCDERFQYKYQLRSHMSIHIGHKQFMCQWCGKDFNMKQYFDEHMKTHTGEKPFICEICGKSFTSRPNMKRHRRTHTGEKPYPCDVCGQRFRFSNMLKAHKEKCFRVTSPVNVPPAVQIPLTTSPATPVPSVVNTATTPTPPINMNPVSTLPPRPIPHPFSHLHIHPHPHHPHHLPIPPVPHLPPPPALFKSEPLNHRGQSEDNFLRHLAEKNSSAQHH

SEQ ID NO: 57913 - DNA, 1821 bp, Artificial Sequence
  derived and/or modified sequence
atgagccacaccgccagcagctgccaggagctggtggagaactgcgccgtgcacgtggccggcatggcccaggaggacagcagaagaggccaggtgcccagcagcttctaccacggcgccaaccaggagctggacctgagcaccaaggtgtacaagagagagagcggcagcccctacagcgtgctggtggacaccaagatgagcaagccccacctgcacgagaccgaggagcagccctacttcagagagaccagagccgtgagcgacgtgcacgccgtgaaggaggacagagagaacagcgacgacaccgaggaggaggaggaggaggtgagctacaagagagagcagatcatcgtggaggtgaacctgaacaaccagaccctgaacgtgagcaagggcgagaagggcgtgagcagccagagcaaggagacccccgtgctgaagaccagcagcgaggaggaggaggaggagagcgaggaggaggccaccgacgacagcaacgactacggcgagaacgagaagcagaagaagaaggagaagatcgtggagaaggtgagcgtgacccagagaagaaccagaagagccgccagcgtggccgccgccaccaccagccccacccccagaaccaccagaggcagaagaaagagcgtggagccccccaagagaaagaagagagccaccaaggagcccaaggcccccgtgcagaaggccaagtgcgaggagaaggagaccctgacctgcgagaagtgccccagagtgttcaacaccagatggtacctggagaagcacatgaacgtgacccacagaagaatgcagatctgcgacaagtgcggcaagaagttcgtgctggagagcgagctgagcctgcaccagcagaccgactgcgagaagaacatccagtgcgtgagctgcaacaagagcttcaagaagctgtggagcctgcacgagcacatcaagatcgtgcacggctacgccgagaagaagttcagctgcgagatctgcgagaagaagttctacaccatggcccacgtgagaaagcacatggtggcccacaccaaggacatgcccttcacctgcgagacctgcggcaagagcttcaagagaagcatgagcctgaaggtgcacagcctgcagcacagcggcgagaagcccttcagatgcgagaactgcgacgagagattccagtacaagtaccagctgagaagccacatgagcatccacatcggccacaagcagttcatgtgccagtggtgcggcaaggacttcaacatgaagcagtacttcgacgagcacatgaagacccacaccggcgagaagcccttcatctgcgagatctgcggcaagagcttcaccagcagacccaacatgaagagacacagaagaacccacaccggcgagaagccctacccctgcgacgtgtgcggccagagattcagattcagcaacatgctgaaggcccacaaggagaagtgcttcagagtgaccagccccgtgaacgtgccccccgccgtgcagatccccctgaccaccagccccgccacccccgtgcccagcgtggtgaacaccgccaccacccccaccccccccatcaacatgaaccccgtgagcaccctgccccccagacccatcccccaccccttcagccacctgcacatccacccccacccccaccacccccaccacctgcccatcccccccgtgccccacctgccccccccccccgccctgttcaagagcgagcccctgaaccacagaggccagagcgaggacaacttcctgagacacctggccgagaagaacagcagcgcccagcaccactag

SEQ ID NO: 57914 - DNA, 1821 bp, Artificial Sequence
  derived and/or modified sequence
atgtcccacaccgcttccagttgccaggagcttgtcgaaaattgcgccgtgcacgtggccgggatggcgcaggaggactcaagacgtggacaagtgccctctagtttttatcacggtgcaaatcaggagctggatctcagcaccaaagtctataagcgagaatcaggatctccttactccgtccttgtcgacacgaagatgtccaagccgcacctccatgaaactgaggaacagccatatttccgcgagaccagagcagtcagcgacgtccatgccgtgaaggaggatcgtgaaaacagtgacgatacggaggaagaagaagaagaggttagttataaaagagagcaaattattgtggaagtgaacctgaacaaccaaaccctcaatgttagtaaaggagagaagggcgtgagcagccagagcaaagaaactcccgttctcaagacttccagtgaagaggaggaggaagagagtgaagaagaggcaaccgacgacagcaatgattatggcgagaatgaaaagcagaagaagaaggaaaagattgtggagaaggtcagtgtgacccagcgccgcacacgcagagctgcttccgttgctgcagctactaccagcccaacccccagaaccacacgggggcggaggaaaagtgttgagcctccaaaacgcaaaaagagagcaacaaaagagccaaaggcgcctgtccaaaaagccaagtgcgaggaaaaggagaccctgacctgtgaaaaatgtccgagggttttcaacacacggtggtacctggagaagcacatgaacgtcacacatcgccgcatgcaaatttgcgacaagtgtggaaagaaattcgtgttggagtcggagctctcactgcaccagcagactgattgtgaaaaaaatatccagtgtgtctcatgtaacaagagtttcaaaaagctctggtccctgcacgagcacattaagattgtccacggctacgccgagaaaaagttctcctgcgaaatctgtgagaagaaattctacactatggctcacgtgcgcaaacacatggtggctcatactaaggatatgccatttacttgtgagacctgcggtaaatcatttaaacggagcatgtcacttaaagttcattctctgcagcacagtggcgaaaaaccatttcgctgtgaaaactgcgatgagagattccagtacaaatatcaattgaggagtcacatgtccatccacataggtcataagcaattcatgtgtcagtggtgtgggaaggacttcaatatgaaacagtatttcgatgaacacatgaagacccataccggtgagaagccttttatttgtgagatatgtgggaaaagcttcactagtaggcctaatatgaagaggcacaggcgcactcacaccggagaaaagccttacccctgcgacgtgtgcgggcaaaggttccgattttcgaacatgctgaaagcgcacaaagaaaagtgctttagggtcactagtccagtaaatgttccccccgctgtgcagattccgctgaccacgagcccagccacaccagtgccgtcggtggtgaatacagccaccacccctacccctcccattaatatgaatccggtcagcaccctgccacctagaccaatcccccatccctttagtcacctccatatccaccctcatccacaccaccctcatcaccttccgattcccccagtacctcatcttccccccccaccagcactattcaaatctgagcccctgaatcacagaggtcagtcggaagacaatttcttacggcatctggccgagaagaatagctccgctcaacatcattag

SEQ ID NO: 57915 - DNA, 1821 bp, Artificial Sequence
  derived and/or modified sequence
atgagtcacacagcctcctcatgccaggaattggttgaaaactgcgccgtccacgtggccgggatggcccaggaagactcgcgtcgcggccaagtgccaagctcattctaccacggcgcaaaccaggagctggacctgtcaaccaaggtgtacaaaagggaatctggctctccttatagcgtcctggttgatacgaagatgtctaagcctcacctgcacgaaacagaagaacaaccttattttcgagagactagggccgtgtccgatgttcacgccgtcaaggaggatcgcgaaaactcagatgatacggaagaagaggaagaagaagtaagctataagagggaacagatcatagttgaagtgaatctgaataatcagacgctaaacgttagcaagggcgagaagggggtctcatctcagagcaaggagacccccgttctgaagaccagctctgaggaagaggaggaggagtcagaagaggaggctaccgatgatagcaatgattacggagagaacgagaagcagaaaaaaaaagaaaaaatagtcgagaaggtctcagttacccaaagacggacccgtagagccgcatcagtcgccgctgctaccacctcccctacgccccgcactacgaggggacggagaaaatcagtggaaccccccaaaagaaagaaacgggcaacgaaagaacctaaagccccagtacagaaggcaaaatgcgaagaaaaagaaactctaacatgtgaaaagtgcccgagggtcttcaatactcggtggtatctggaaaagcacatgaacgtcacccaccgccgcatgcagatttgtgacaaatgtggtaagaaattcgtgctggagagtgagctttcactccatcagcagacagactgtgaaaaaaatatccaatgcgtctcctgtaataagtccttcaagaaactgtggtccttgcatgagcacattaaaatcgtccacggatatgccgagaagaaattcagctgcgagatatgtgagaagaaattttacactatggctcatgtccgcaaacacatggttgcccacactaaggacatgcctttcacatgcgaaacttgcgggaagtcttttaagagatcaatgtcattgaaggtccacagcctacaacacagcggcgagaaaccattcagatgtgaaaactgtgacgagcgattccagtacaagtatcagttgagaagccacatgagcattcacatagggcacaagcagttcatgtgccaatggtgcgggaaggactttaatatgaaacaatacttcgatgaacacatgaaaactcatacaggcgagaagcccttcatatgtgagatctgtggcaaatcttttacgagccgtcccaatatgaaaaggcataggcgcacgcacacgggtgagaagccctatccttgtgacgtatgtggacagcgttttaggtttagcaacatgctcaaggcgcacaaagagaagtgcttccgggtgaccagtcccgtaaatgtgccccccgccgtccagatccccttgaccactagtcccgcaacccctgtgccctcagtggtcaatacagcaactacgccgactccccccattaacatgaacccagtgtcgaccctaccaccccgccctatcccacaccctttctctcatctgcacatacaccctcatccgcaccacccacatcatctgcctatccctcctgtgcctcaccttccacctcctccagctcttttcaagtctgagccacttaatcatcggggccagtcggaagataatttcttacgacatttggccgaaaaaaatagctcagctcaacatcactag

SEQ ID NO: 57916 - DNA, 1821 bp, Artificial Sequence
  derived and/or modified sequence
atgagccacacagccagcagctgccaggagctggtggagaactgtgctgtgcacgtggccggcatggcccaggaggacagccggcggggccaggtgcccagcagcttctaccacggggccaaccaggagctggacctgagcaccaaggtgtacaagcgggagagcggcagcccctacagcgtgctggtggacaccaagatgagcaagccccacctgcatgaaacagaggagcagccctacttccgggagaccagggctgtgtctgatgtgcatgctgtgaaggaggaccgggagaacagtgatgacacagaggaggaggaggaggaggtgtcctacaagcgggagcagatcatcgtggaggtgaacctgaacaaccagaccctgaatgtgtccaagggggagaagggcgtgagcagccagagcaaggagacccctgtgctgaagaccagcagcgaggaggaggaggaggagagcgaggaggaggccacagatgacagcaatgactatggagaaaatgagaagcagaagaagaaggagaagatcgtggagaaggtgtctgtgacccagaggaggaccaggagagctgcctctgtggccgccgccaccaccagccccacccccaggaccacccggggccgcaggaagtctgtggagccccccaagaggaagaagagggccaccaaggagcccaaggcccctgtgcagaaggccaagtgtgaggagaaggagaccctgacctgtgagaagtgccccagggtcttcaacacccgctggtacctggagaagcacatgaatgtgacccacaggaggatgcagatctgtgacaagtgtgggaagaagtttgtgctggagagcgagctgagcctgcaccagcagacagactgtgagaagaacatccagtgtgtgtcctgcaacaagagcttcaagaagctgtggagcctgcacgagcacatcaagatcgtgcacggctatgcagagaagaagttcagctgtgagatctgtgagaagaagttctacaccatggcccacgtgaggaagcacatggtggcccacaccaaggacatgcccttcacctgtgagacctgtgggaagagcttcaagaggtccatgagcctgaaggtgcacagcctgcagcacagcggggagaagcccttccgctgtgagaactgtgatgagcgcttccagtacaagtaccagctgcggagccacatgagcatccacatcggccacaagcagttcatgtgccagtggtgtgggaaggacttcaacatgaagcagtactttgatgagcacatgaagacccacactggagagaagcccttcatctgtgagatctgtgggaagagcttcaccagccggcccaacatgaagaggcacaggaggacccacactggagagaagccctacccctgtgatgtgtgtggccagcgcttccgcttcagcaacatgctgaaggcccacaaggagaagtgcttccgggtgaccagccctgtgaatgtgcccccagctgtgcagatccccctgaccaccagccctgccacccctgtgcccagcgtggtgaacacagccaccacccccaccccacccatcaacatgaaccctgtgtccaccctgcccccccggcccatcccccaccccttcagccacctgcacatccacccccacccccaccacccccaccacctgcccatcccccctgtgccccacctgcccccacctccagccctcttcaagtctgagcccctgaaccaccggggccagagcgaggacaacttcctgcggcacctggccgagaagaacagcagcgcccagcaccactag

SEQ ID NO: 57917 - DNA, 1821 bp, Artificial Sequence
  derived and/or modified sequence
atgagccacaccgccagcagctgccaggagctggtggagaactgcgcagtgcacgttgccggcatggcccaggaggattcccgacgaggccaagtcccctctagcttttaccatggtgccaaccaggagctggacctatccaccaaagtatataaaagagagtctggctccccatactctgtcctggttgacaccaaaatgtcaaagccccacctccacgagaccgaagaacaaccctatttcagagagaccagggcagtctctgatgtgcatgcagtgaaggaagatcgcgaaaattccgacgatacagaggaggaagaggaggaggtaagctacaagagggaacagattatagtggaggtgaatctaaataaccagaccctcaacgtctcaaaaggagagaagggtgtttcatctcagtcaaaggagactccggtgctgaagactagcagcgaggaagaagaagaggagtctgaggaggaagcgacagatgacagcaatgattacggcgagaacgagaagcagaagaagaaggagaaaatcgtagagaaggtcagtgtgacgcaaaggaggacgcgcagggcagctagtgtagcagccgcaaccacttcgcctacacctcggaccaccaggggccgccgtaagtcagttgagccaccaaagaggaaaaaacgggcaaccaaagagcctaaggctcccgtgcagaaggcaaaatgcgaagagaaagaaaccctgacttgcgaaaagtgtcccagggtgtttaacactcgctggtacctggagaagcacatgaatgtcactcaccgtaggatgcagatctgcgacaaatgtgggaaaaaatttgttctggagtctgagctgagcctgcaccagcagaccgactgtgaaaaaaatattcaatgcgtctcttgtaacaagtcctttaaaaagctgtggagtctacacgagcatatcaagattgtgcacggttatgccgaaaagaagttttcctgtgagatctgcgagaaaaagttttacaccatggcccacgtcagaaagcatatggtcgcacacactaaagatatgccctttacgtgtgagacatgtggcaagagtttcaagaggagcatgtcgcttaaggtccattcgttgcagcacagcggggaaaaacctttccgctgcgagaattgtgacgagaggttccagtacaagtatcaactccgcagccatatgagtatacacattggacataagcagttcatgtgtcagtggtgcggaaaggactttaatatgaaacagtattttgatgagcatatgaaaactcacactggcgagaagccgtttatttgcgagatttgcgggaaatcttttacctcacgcccaaacatgaaacgacaccgaagaacccataccggggaaaaaccgtacccctgcgacgtgtgtggtcaaagatttcgattttccaatatgctgaaggcccataaggaaaagtgctttcgggtaacatctccagtgaacgttcctcccgccgtccaaattcccctgactacaagcccagcgacaccggttccatccgtggtcaatacggctactactcctaccccgcccattaatatgaaccccgtttccaccctgcccccaaggcctatcccacatccattttcacacttacacatacatcctcatccacaccaccctcaccatctaccgataccacctgtccctcaccttccccccccgcccgcactctttaaaagcgaaccactgaatcatagagggcaatccgaagacaatttcctgcgacacctggccgagaagaatagctctgcccagcatcactag

SEQ ID NO: 57918 - DNA, 1821 bp, Artificial Sequence
  derived and/or modified sequence
atgagccacaccgccagcagctgccaggagctggtggagaactgcgctgtgcacgtcgcgggcatggcacaagaggacagtaggcgcggccaggtgccatcttccttttaccacggagcgaaccaggagttggacctgtccaccaaagtgtacaagcgcgaatcaggatcaccatactccgtgctggtcgacacgaagatgtcaaaaccccatctgcatgagacagaggaacagccgtacttcagggagactagggcagtctccgatgtgcatgccgtcaaggaagaccgcgaaaatagcgacgataccgaagaggaagaggaggaggtgtcctacaagcgggaacaaattatcgtggaggtgaatctcaataatcagaccctgaacgtgtcaaaaggcgagaagggtgtgtcatcccagagcaaggagacccctgtgctgaaaacatcatcagaggaggaggaggaggagagcgaggaagaggcaactgacgactccaacgattatggggagaatgaaaaacagaagaaaaaggagaaaattgtggaaaaagtgagtgtgacacagcggcgaacaagaagagctgcatccgtggcagcagctaccactagcccaacacccaggaccactagaggccggcgtaaatcagtggagcctcccaaaaggaagaagcgcgccaccaaagaacctaaggcccctgtccagaaggctaagtgtgaggagaaggagactctgacatgcgagaaatgtccaagagtgttcaacactcggtggtacctggaaaagcacatgaacgtcacacataggaggatgcagatctgtgacaaatgcggcaagaaattcgtgcttgagtctgaactgtcacttcaccaacagaccgattgtgaaaagaacatccaatgtgtcagctgcaacaaatccttcaaaaaactgtggagcctgcacgaacacattaaaatcgtccacggttatgccgaaaagaagttttcatgcgaaatctgcgagaagaagttctatacgatggctcacgtcaggaaacacatggtcgctcacaccaaggacatgccgtttacctgtgaaacttgtggaaagtcttttaagcgatctatgtcccttaaagtgcacagcctccagcactccggagaaaaaccttttcgctgtgaaaattgcgacgagcggtttcagtataagtatcaactgcggagccacatgagcattcacataggtcacaaacagttcatgtgccaatggtgcggcaaagacttcaatatgaagcagtacttcgacgagcacatgaaaacacataccggggaaaaaccttttatctgcgaaatttgcggtaaatcatttacgtctaggccaaatatgaagaggcatcgtcggactcacacgggtgagaaaccctacccttgtgacgtatgcgggcagaggtttcggttttcaaatatgctgaaagcgcataaggagaagtgttttagagtgacaagccctgtcaatgtccccccggccgtccaaattccgctgactactagccctgctacccctgtgcccagtgtagtcaatacagcaacaactcccacacctcccattaacatgaaccccgtgtctacactcccgccgaggcccattccccatccctttagccatctccatatccacccccaccctcatcacccgcaccacctgccaataccccctgtgcctcacctgccccctccaccggcgctgtttaagagtgagcccctgaaccatcgaggccaaagtgaagataactttctccggcatctagcagaaaaaaacagctccgctcaacaccattag

SEQ ID NO: 57919 - DNA, 1821 bp, Artificial Sequence
  derived and/or modified sequence
atgagccatacagcgtcatcgtgccaggaactggttgagaactgcgccgtgcacgtggcaggcatggctcaggaggacagcaggagagggcaggtgccgagctcattctaccatggcgcaaaccaggaactggatctttcaactaaagtttataagagggaatcaggatccccatactcagttctggtggatacaaagatgtctaagccccaccttcacgaaactgaggaacagccttacttccgcgaaacgagggccgtctccgatgttcatgcggtgaaagaagaccgcgaaaacagtgacgatacagaggaagaggaggaggaagtttcatataaacgggagcaaataatcgtcgaggtaaacttgaacaaccagaccctcaacgtctcaaaaggggaaaaaggagtctcgagccagtcaaaggaaactccagtgctcaaaacttcatctgaagaagaggaagaggaatcagaggaggaggctaccgacgactccaatgattacggggagaacgagaagcagaagaaaaaggagaagatagtggaaaaggtttcggtcacacaaagaagaactcgtcgcgcagctagtgtcgccgctgccacgacatctccaaccccacgcacaactcggggtcgacggaaatccgtggagcctcccaaaagaaaaaagcgtgccacaaaagaaccaaaagcacccgtccaaaaggcaaaatgcgaggagaaagagaccctaacttgcgagaaatgcccccgagtattcaacaccaggtggtacctggagaaacatatgaacgtcacccataggcggatgcagatttgtgataagtgtggcaaaaagttcgtgttagagtccgaattgtcattgcatcagcagacagattgcgaaaagaatattcagtgtgttagttgcaacaagtccttcaagaagctttggagcctacacgaacacatcaaaattgtgcacggatacgccgagaagaaatttagttgcgaaatatgcgagaagaagttttataccatggcccacgtgagaaaacacatggtcgctcacacgaaggatatgcccttcacctgtgagacctgtgggaagagcttcaaacgcagcatgagcctgaaggtgcatagcctgcagcactcgggtgagaaacctttccgctgcgagaattgtgatgagaggtttcagtataagtaccagctgagaagtcacatgagtatccacatcgggcacaagcagttcatgtgccagtggtgtggcaaagatttcaatatgaagcagtacttcgatgagcatatgaagacccatacaggcgaaaaaccctttatctgcgaaatttgcgggaagagctttacgagcaggcccaacatgaaacggcacagaagaacacataccggggagaaaccttatccatgcgatgtgtgcggccagcggttccggtttagcaatatgctgaaggctcacaaagaaaagtgctttcgggtgacctctcctgtcaatgtgccaccggctgtgcagatccccctgacaacaagtccggcaacccctgttccttctgtggtcaacaccgcaacaactccaacccccccaataaatatgaacccagtgagtactctcccgcctcgtcccatcccccacccgttcagtcacctgcacatccacccacacccccatcaccctcatcacctgcctatcccccctgtcccccacctaccacctcctccagccctgtttaaatccgagcctttaaaccatcgaggacagtccgaagataactttctgagacatctggcagagaagaatagctctgcgcagcatcattag

SEQ ID NO: 57920 - DNA, 1821 bp, Artificial Sequence
  derived and/or modified sequence
atgagtcatacagcatccagctgccaggaattggtggaaaactgcgcggtacacgtcgctgggatggcacaggaagatagtcggcgtggacaggtcccatccagcttttaccatggggctaaccaagaactggacctgagcactaaagtctataagcgagagagcggctcaccctactccgtcctagtggatactaagatgagcaagcctcatttacacgagaccgaagagcagccctattttcgagaaactagggcagtgtctgatgtgcacgccgtgaaagaagatcgggaaaacagtgacgatactgaagaggaagaagaggaagtttcctataaaagagaacagattatcgtcgaggttaatctgaacaatcagaccctgaatgtgagcaaaggcgagaaaggggtgtcgtcacagtcaaaagaaacacctgttctcaaaactagctcggaggaagaggaggaggagagcgaggaagaagcaacagacgatagtaatgattacggagaaaatgagaaacagaagaaaaaagagaagatagtggagaaagtgtcggtgacccagcgcaggacgagaagggccgcaagcgtggccgcagcaacaactagcccgactccgagaacgaccagagggaggcggaaaagcgtagaacccccaaagcgtaaaaagagagccactaaggaacccaaagcccctgtccaaaaggctaaatgcgaagagaaggagacactgacatgtgagaagtgccctagggtctttaacacccgctggtatttggagaaacacatgaacgtcacccacagaagaatgcagatttgcgacaagtgcgggaagaaatttgttctggaatctgagctctccctccatcagcagaccgactgtgaaaagaatatacagtgtgtttcctgtaacaagtcttttaaaaagttgtggagcctgcatgagcacatcaagattgtccacggatacgccgaaaagaaattctcatgcgaaatctgtgaaaaaaaattttataccatggcccacgtgcgcaaacatatggtggcccacacgaaagacatgccatttacctgcgaaacctgcgggaagagtttcaagcgatctatgagccttaaggtgcactctctgcagcacagtggcgaaaagccatttcggtgtgaaaactgcgatgaacgctttcagtacaaatatcagttgagaagccatatgagcatccacatagggcacaagcagttcatgtgtcaatggtgtgggaaggatttcaatatgaaacaatatttcgacgaacatatgaaaacacataccggggaaaagcccttcatttgcgagatttgtggtaagagttttacaagtcggcctaatatgaagcgccaccgacgaactcatacaggggagaagccatatccatgcgatgtgtgcggtcagcgcttcaggttctctaacatgctgaaagcacacaaagaaaaatgctttcgggtcacctcacccgtcaatgtaccacctgcagtgcagataccgctgacaactagcccggctaccccagtgccttctgttgtgaacactgccaccacccctacaccccctataaacatgaaccctgtgagtacgctgcctcccaggccaattccccaccctttttcacacctccatattcacccgcatccccatcacccacaccacttaccaatcccccctgttcctcatctgccccctcctcccgctcttttcaaaagcgaaccccttaaccatcgcggacagtcagaggataacttcctcaggcacctggccgagaagaatagttcagctcagcatcactag

SEQ ID NO: 57921 - DNA, 5988 bp, Artificial Sequence
  derived and/or modified sequence
gcggggagccggcggttatctgggcggcggagcgctcacaatgtggcaggagacagaaaagataagatgctcccaagtcccttgcagctctcttcagaagaaaaatcactagtgctctgctcttgccataataccaaacctttttgactcatgctttggtgctgcaacactggaagaattgcacacagtttccaggaatatctttttttcatttgagtgattctttgtggatgagaaaagatttgagtcttaataattaccttgttttaaagctatttctttatagtctgaactgtttaataaattgggccacttaccaatgagccacacagccagttcttgtcaggagctggttgaaaactgtgctgtgcatgtagcaggaatggcacaagaagatagccgtcgtggtcaagtgccatcttccttttatcatggtgccaaccaagaacttgacctgtccaccaaagtgtacaaaagggaatcaggaagtccttattctgtgttagtggacaccaagatgagcaaaccgcatctccatgaaacagaagaacagccatatttcagggagacaagagcagtgtctgacgtgcatgctgttaaggaagaccgggagaattctgatgacacagaggaggaagaggaagaagtctcttacaaaagggagcagatcatagtggaggtaaaccttaataatcaaacattaaatgtatctaaaggggaaaagggtgtctcttctcagtccaaagagactcctgttcttaagacaagcagtgaggaggaagaggaagagagtgaggaagaggccacagatgacagcaatgactatggagagaatgaaaagcagaagaaaaaggagaagatagtagagaaagtcagcgttacacaaaggagaaccaggagagctgcctctgttgccgcagctaccacttcccctactcccagaactacaagaggtcgtaggaagagtgtagagccacctaagcgtaagaagcgggccacaaaggagcccaaagcaccagtccagaaagctaagtgtgaagagaaagagactctgacctgtgagaagtgccccagggtatttaacactcgctggtacctggagaagcacatgaacgttactcataggcgcatgcagatttgtgataaatgtggcaagaagtttgtcctggaaagtgagctgtcccttcaccagcaaacagactgtgaaaaaaacattcagtgtgtttcctgtaacaaatcgttcaagaaactctggtcccttcatgaacatatcaagatcgtccatggatatgcagaaaagaaattttcctgtgaaatttgtgagaagaaattctataccatggctcatgtgcggaaacacatggttgcacacacaaaagacatgccatttacatgcgaaacctgtggaaaatcattcaaacgcagtatgtcactcaaggtgcactccttgcagcattctggagagaagccctttagatgcgagaactgtgacgaaaggtttcagtacaagtaccagctacgctcccacatgagcattcatattgggcacaaacagttcatgtgccagtggtgtggcaaggatttcaacatgaagcagtacttcgacgaacacatgaaaacacacactggagagaaaccctttatctgtgaaatctgtggcaaaagcttcaccagccgccccaacatgaagagacaccgcagaactcacacaggcgagaagccctatccatgtgatgtgtgtggccagcggttccgcttctcgaacatgcttaaggcccacaaggagaagtgctttcgggtgaccagccccgtgaatgtgccacctgctgtccagatcccacttacaacttccccagccaccccagttccttctgtggtgaacacagccacaaccccaacccctccaatcaatatgaatcctgtaagcactcttccccctcggcccatcccccaccccttctcacacctgcacatccacccacaccctcaccacccacaccaccttcccatccctccagtccctcacctcccgccacctccagctctctttaagagtgagcctttaaatcatagaggccagagtgaggacaactttctgcggcacctggcagagaagaacagttcagcacagcatcattaacatccgtctccttagtgtgttctccaggagacacgtccccatgtgtgagcgtgcacagagggagtcggtgagcatttccttagttctcagactctcctccgcctctaccaagagcttcgccagtgtcactgaatcaacagatccaagggaatgaacaagaagactaccttgagctcacagagggactgtcatctaaaccaggggaaccactgaactaaagcccaatttgcttgcattttctgatgacttttataagtttcaaatactcagacttgtggaattttataatttcatatcagctgatgaggtatgcttgcttttatatcccagacttctcctcaaagaggggataggcctggtttcctttgtactaatcgggaaggctgtgagattaatccagagcattaattgtatcactgtgtatggtaaggaattcttttcagcttttggtgccagctacagagttgagctggccatgtttcacagtatatcaagcattatagagaaagacagaaattttcttctttgtgtagctctcctaacgcactctttattttactacagaaattattttagagtttttgtatagacttctttggtagtctgtttctaaaatgaaatgtatttcaataagcagtgtaattttttcagtgtagctgaacctatgttgtaaaatagaaaaaaatttttataatcatcaaaatgtgattcttaaagatgcatataacttctataattcaaagctattcttacatccgtacaactcaaaaggtgcttcagagactagatgtatctgagagggtctccagaccaggttactgcaaaaatgaggttttgctttcaggatttggcgtaaatacttggtagttttgacatctctgcttaacactcaagagaggctccctaatgtgctcctgtcctccatgttctgcttggcttcgttagtgcattacatgaaatgatttgcaggggatggggccttttccagggaagtcacctaaagcttgcatgttttgaaaatttgaataaggctgtttgctgacaggaggaggaagtagtggagatcatttcatctcagtcacgtctgtttctcacttcccttaggaattgtgttgatgtttaacttttatgggatgacaaattgaaatcgctcattttgaggttgctttatttttctagaattgttataagaagctaaaatagtaaacttaaaatcacaaacatgacattgctgatagtggctgagaaattcagatgagaagacaaattggttatgaattttgaaatatctattatatgtaaaatgtggatatgttcacaaccttgagctattttaacacagtttaaatatagtgagggaaaactcctaagttttactgccctgtcctctgcaaattatgtaataccagcattcttaggcgataaagagagcagcacctctagtacctttaggcagattactttttcaagtttggggaacttcaaaagaccataatcaaccaggagcttattataggaaaggctgaacagaagggctagtgtattgattacacttaacagatcatatttatccagactcagtatagcttaaaattttgtatttctttatctgagagaactgagttcccaggctaaatcacttacctcccaccccctctccaattttttttttaagagacaaggtcttgctatgttgcccaggctagagtgcagtggctattcacaggtgcagttatagcacactacagcctccaactcttgggttcaagcaaccctgcctcagctaaccaagtagctgggactacaggtgcatgctaccatgcccagtccattttttaatcttgaaatttcttcatttttctttcttcggtttcttaaaatctttgcctgaatcagaacgctggcttttatttatttttttatttttaatattaaatgtgcagatatgcttcgagcacttttctaactaatgagctctgtggtaagaaaaaatgaactctttcaattgagattaagtccatatttttcaaacatcacgttctctattggctttttggtttagtgtttctaaattttctccttctgattttgcctgtcttatataatgagcataggaaaattttggaatgaggcagaaaagtatatcaagacatacttcctggttttggatgtaagttttaaagaatggtatttttaatatttgtacacattctttgagcacccaggtacccaagccaataaggaaagttaattccttgcatatgactgttatatctttagtggttgtctccctctccctccacagtctccttggcattccatgacaagtttgtcaacctacacttttatatagacatatcattatttcatggtcaagcctgtagtattaaaatgatttttttaaaagatgtaaactgtgcttagttaattggttatattttgttctgttttttttttttttttttttttttttttgaggcagagtcttgttctgttgcctgggctggagtgcagtggcgtgatcttggctcactgcaacccccgccccccgggttcaagtgattctcctgcctcagcctcccgagtagctggaattacaggcatgcgccagcacgcccggctaagttttgtatttttggcagagatggggtttcaccatattggccaggctggtctcaaactcctgaccttgtgatccgcccacctcagcctccgaaagtgctgggattacaggcgtgagccaccacgtccaactgccttattttgttctgaataaatttacagtattgggcagcaattctggattctagacttgagaccacagaatcaaccatttcatgaggttgtactgtaattatacactggaatattcaggtagtcatctttgatttttcattcaagtaaatatagccataagaaaatatctgctatacaggaaaaccagtattaagcaaataccaccatccttaacagaaacaaaaatatatatatatattatttttaaaaattagcattgtcatacagtacaattcttagtgaagtgtattgtggaacaatttagaaacttcctttttttcccctagattaaggatactttccttgacttgagacttgtggtcttcaggaaaactactcagaatataatgactcctcatcagtatcatattgtatataaataatgaaatgcattaagaatattcacaacattgaacccaggaggcggagcttgcagtgagccgagattgcgccactgcgctccagcctgggcaacagagcgagactccatctcaaaaaaaaaaaaaaaaagaatattcacaacattaatgcttctgaatagaagaactgcaggattaagccttaaacatatatgtgcaacacgtttaacatgcttaagactcaaactcagggttgaaaatttggttggggtcctctttgtaagataaaagttgcattatgtggtatgttctcttccatatatgctacagcaccccatgaattcttcaaaactttttacctacttgttatctgtttatgaaaaaaagaattatggagaagtttgagttctcagcccttatctgtacatgtctgttaaagacaacaaaggctgcatttaagcattatatagataacaaattgaggctgtctctcgttacttagttttactgtcttcaaaggcttgtatcattgctagggttaagacttatttgaggatgagttggcattgtattttttgtgtgtgtgggttggtttgtatttgtttcgtttttatttttctattttctctcatagatttatcagtaaaatataaactcttccttagccttaataaaggctgctgctttctcaaa

SEQ ID NO: 57922 - DNA, 4701 bp, Artificial Sequence
  derived and/or modified sequence
ggagcggcggccacgtagcgctgcggcggcagcggcagcggccgaggccgggtctgaggagcggccctgaggacagacgttgggcagggggggaggggctggcccagccggcggttgtgactcgagcgccgcggctgcaggcccccgccgcagggatggaccgccgaggcggcggccggggcggcggaggcggaggcggccggcccggataagatgctcccaagtcccttgcagctctcttcagaagaaaaatcactagtgctctgctcttgccataataccaaacctttttgactcatgctttggtgctgcaacactggaagaattgcacacagtttccaggaatatctttttttcatttgagtgattctttgtggatgagaaaagatttgagtcttaataattaccttgttttaaagctatttctttatagtctgaactgtttaataaattgggccacttaccaatgagccacacagccagttcttgtcaggagctggttgaaaactgtgctgtgcatgtagcaggaatggcacaagaagatagccgtcgtggtcaagtgccatcttccttttatcatggtgccaaccaagaacttgacctgtccaccaaagtgtacaaaagggaatcaggaagtccttattctgtgttagtggacaccaagatgagcaaaccgcatctccatgaaacagaagaacagccatatttcagggagacaagagcagtgtctgacgtgcatgctgttaaggaagaccgggagaattctgatgacacagaggaggaagaggaagaagtctcttacaaaagggagcagatcatagtggaggtaaaccttaataatcaaacattaaatgtatctaaaggggaaaagggtgtctcttctcagtccaaagagactcctgttcttaagacaagcagtgaggaggaagaggaagagagtgaggaagaggccacagatgacagcaatgactatggagagaatgaaaagcagaagaaaaaggagaagatagtagagaaagtcagcgttacacaaaggagaaccaggagagctgcctctgttgccgcagctaccacttcccctactcccagaactacaagaggtcgtaggaagagtgtagagccacctaagcgtaagaagcgggccacaaaggagcccaaagcaccagtccagaaagctaagtgtgaagagaaagagactctgacctgtgagaagtgccccagggtatttaacactcgctggtacctggagaagcacatgaacgttactcataggcgcatgcagatttgtgataaatgtggcaagaagtttgtcctggaaagtgagctgtcccttcaccagcaaacagactgtgaaaaaaacattcagtgtgtttcctgtaacaaatcgttcaagaaactctggtcccttcatgaacatatcaagatcgtccatggatatgcagaaaagaaattttcctgtgaaatttgtgagaagaaattctataccatggctcatgtgcggaaacacatggttgcacacacaaaagacatgccatttacatgcgaaacctgtggaaaatcattcaaacgcagtatgtcactcaaggtgcactccttgcagcattctggagagaagccctttagatgcgagaactgtgacgaaaggtttcagtacaagtaccagctacgctcccacatgagcattcatattgggcacaaacagttcatgtgccagtggtgtggcaaggatttcaacatgaagcagtacttcgacgaacacatgaaaacacacactggagagaaaccctttatctgtgaaatctgtggcaaaagcttcaccagccgccccaacatgaagagacaccgcagaactcacacaggcgagaagccctatccatgtgatgtgtgtggccagcggttccgcttctcgaacatgcttaaggcccacaaggagaagtgctttcgggtgaccagccccgtgaatgtgccacctgctgtccagatcccacttacaacttccccagccaccccagttccttctgtggtgaacacagccacaaccccaacccctccaatcaatatgaatcctgtaagcactcttccccctcggcccatcccccaccccttctcacacctgcacatccacccacaccctcaccacccacaccaccttcccatccctccagtccctcacctcccgccacctccagctctctttaagagtgagcctttaaatcatagaggccagagtgaggacaactttctgcggcacctggcagagaagaacagttcagcacagcatcattaacatccgtctccttagtgtgttctccaggagacacgtccccatgtgtgagcgtgcacagagggagtcggtgagcatttccttagttctcagactctcctccgcctctaccaagagcttcgccagtgtcactgaatcaacagatccaagggaatgaacaagaagactaccttgagctcacagagggactgtcatctaaaccaggggaaccactgaactaaagcccaatttgcttgcattttctgatgacttttataagtttcaaatactcagacttgtggaattttataatttcatatcagctgatgaggtatgcttgcttttatatcccagacttctcctcaaagaggggataggcctggtttcctttgtactaatcgggaaggctgtgagattaatccagagcattaattgtatcactgtgtatggtaaggaattcttttcagcttttggtgccagctacagagttgagctggccatgtttcacagtatatcaagcattatagagaaagacagaaattttcttctttgtgtagctctcctaacgcactctttattttactacagaaattattttagagtttttgtatagacttctttggtagtctgtttctaaaatgaaatgtatttcaataagcagtgtaattttttcagtgtagctgaacctatgttgtaaaatagaaaaaaatttttataatcatcaaaatgtgattcttaaagatgcatataacttctataattcaaagctattcttacatccgtacaactcaaaaggtgcttcagagactagatgtatctgagagggtctccagaccaggttactgcaaaaatgaggttttgctttcaggatttggcgtaaatacttggtagttttgacatctctgcttaacactcaagagaggctccctaatgtgctcctgtcctccatgttctgcttggcttcgttagtgcattacatgaaatgatttgcaggggatggggccttttccagggaagtcacctaaagcttgcatgttttgaaaatttgaataaggctgtttgctgacaggaggaggaagtagtggagatcatttcatctcagtcacgtctgtttctcacttcccttaggaattgtgttgatgtttaacttttatgggatgacaaattgaaatcgctcattttgaggttgctttatttttctagaattgttataagaagctaaaatagtaaacttaaaatcacaaacatgacattgctgatagtggctgagaaattcagatgagaagacaaattggttatgaattttgaaatatctattatatgtaaaatgtggatatgttcacaaccttgagctattttaacacagtttaaatatagtgagggaaaactcctaagttttactgccctgtcctctgcaaattatgtaataccagcattcttaggcgataaagagagcagcacctctagtacctttaggcagattactttttcaagtttggggaacttcaaaagaccataatcaaccaggagcttattataggaaaggctgaacagaagggctagtgtattgattacacttaacagatcatatttatccagactcagtatagcttaaaattttgtatttctttatctgagagaactgagttcccaggctaaatcacttacctcccaccccctctccaattttttttttaagagacaaggtcttgctatgttgcccaggctagagtgcagtggctattcacaggtgcagttatagcacactacagcctccaactcttgggttcaagcaaccctgcctcagctaaccaagtagctgggactacaggtgcatgctaccatgcccagtccattttttaatcttgaaatttcttcatttttctttcttcggtttcttaaaatctttgcctgaatcagaacgctggcttttatttatttttttatttttaatattaaatgtgcagatatgcttcgagcacttttctaactaatgagctctgtggtaagaaaaaatgaactctttcaattgagattaagtccatatttttcaaacatcacgttctctattggctttttggtttagtgtttctaaattttctccttctgattttgcctgtcttatataatgagcataggaaaattttggaatgaggcagaaaagtatatcaagacatacttcctggttttggatgtaagttttaaagaatggtatttttaatatttgtacacattctttgagcacccaggtacccaagccaataaggaaagttaattccttgcatatgactgttatatctttagtggttgtctccctctccctccacagtctccttggcattccatgacaagtttgtcaacctacacttttatatagacatatcattatttcatggtcaagcctgtagtattaaaatgatttttttaaaagatgtaaa

SEQ ID NO: 57923 - protein, 759 aa, Artificial Sequence
  derived and/or modified sequence
MAGSKQSHQEAVKRHLYFLQLKMDICEGRLTCPLNSAVVLASYAVQSHFGDYNSSIHHPGYLSDSHFIPDQNEDFLTKVESLHEQHSGLKQSEAESCYINIARTLDFYGVELHSGRDLHNLDLMIGIASAGVAVYRKYICTSFYPWVNILKISFKRKKFFIHQRQKQAESREHIVAFNMLNYRSCKNLWKSCVEHHTFFQAKKLLPQEKNVLSQYWTMGSRNTKKRSPRLRHEIRKPRHSSADNLANEMTYITETEDVFYTYKGSLAPQDSDSEVSQNRSPHQESLSENNPAQSYLTQKSSSSVSPSSNAPGSCSPDGVDQQLLDDFHRVTKGGSTEDASQYYCDKNDNGDSYLVLIRITPDEDGKFGFNLKGGVDQKMPLVVSRINPESPADTCIPKLNEGDQIVLINGRDISEHTHDQVVMFIKASRESHSRELALVIRRRAVRSFADFKSEDELNQLFPEAIFPMCPEGGDTLEGSMAQLKKGLESGTVLIQFEQLYRKKPGLAITFAKLPQNLDKNRYKDVLPYDTTRVLLQGNEDYINASYVNMEIPAANLVNKYIATQGPLPHTCAQFWQVVWDQKLSLIVMLTTLTERGRTKCHQYWPDPPDVMNHGGFHIQCQSEDCTIAYVSREMLVTNTQTGEEHTVTHLQYVAWPDHGVPDDSSDFLEFVNYVRSLRVDSEPVLVHCSAGIGRTGVLVTMETAMCLTERNLPIYPLDIVRKMRDQRAMMVQTSSQYKFVCEAILRVYEEGLVQMLDPS

SEQ ID NO: 57924 - protein, 381 aa, Artificial Sequence
  derived and/or modified sequence
MPLVVSRINPESPADTCIPKLNEGDQIVLINGRDISEHTHDQVVMFIKASRESHSRELALVIRRRAVRSFADFKSEDELNQLFPEAIFPMCPEGGDTLEGSMAQLKKGLESGTVLIQFEQLYRKKPGLAITFAKLPQNLDKNRYKDVLPYDTTRVLLQGNEDYINASYVNMEIPAANLVNKYIATQGPLPHTCAQFWQVVWDQKLSLIVMLTTLTERGRTKCHQYWPDPPDVMNHGGFHIQCQSEDCTIAYVSREMLVTNTQTGEEHTVTHLQYVAWPDHGVPDDSSDFLEFVNYVRSLRVDSEPVLVHCSAGIGRTGVLVTMETAMCLTERNLPIYPLDIVRKMRDQRAMMVQTSSQYKFVCEAILRVYEEGLVQMLDPS

SEQ ID NO: 57925 - protein, 737 aa, Artificial Sequence
  derived and/or modified sequence
MDICEGRLTCPLNSAVVLASYAVQSHFGDYNSSIHHPGYLSDSHFIPDQNEDFLTKVESLHEQHSGLKQSEAESCYINIARTLDFYGVELHSGRDLHNLDLMIGIASAGVAVYRKYICTSFYPWVNILKISFKRKKFFIHQRQKQAESREHIVAFNMLNYRSCKNLWKSCVEHHTFFQAKKLLPQEKNVLSQYWTMGSRNTKKRSPRLRHEIRKPRHSSADNLANEMTYITETEDVFYTYKGSLAPQDSDSEVSQNRSPHQESLSENNPAQSYLTQKSSSSVSPSSNAPGSCSPDGVDQQLLDDFHRVTKGGSTEDASQYYCDKNDNGDSYLVLIRITPDEDGKFGFNLKGGVDQKMPLVVSRINPESPADTCIPKLNEGDQIVLINGRDISEHTHDQVVMFIKASRESHSRELALVIRRRAVRSFADFKSEDELNQLFPEAIFPMCPEGGDTLEGSMAQLKKGLESGTVLIQFEQLYRKKPGLAITFAKLPQNLDKNRYKDVLPYDTTRVLLQGNEDYINASYVNMEIPAANLVNKYIATQGPLPHTCAQFWQVVWDQKLSLIVMLTTLTERGRTKCHQYWPDPPDVMNHGGFHIQCQSEDCTIAYVSREMLVTNTQTGEEHTVTHLQYVAWPDHGVPDDSSDFLEFVNYVRSLRVDSEPVLVHCSAGIGRTGVLVTMETAMCLTERNLPIYPLDIVRKMRDQRAMMVQTSSQYKFVCEAILRVYEEGLVQMLDPS

SEQ ID NO: 57926 - DNA, 1146 bp, Artificial Sequence
  derived and/or modified sequence
atgcccctggtggtgagcagaatcaaccccgagagccccgccgacacctgcatccccaagctgaacgagggcgaccagatcgtgctgatcaacggcagagacatcagcgagcacacccacgaccaggtggtgatgttcatcaaggccagcagagagagccacagcagagagctggccctggtgatcagaagaagagccgtgagaagcttcgccgacttcaagagcgaggacgagctgaaccagctgttccccgaggccatcttccccatgtgccccgagggcggcgacaccctggagggcagcatggcccagctgaagaagggcctggagagcggcaccgtgctgatccagttcgagcagctgtacagaaagaagcccggcctggccatcaccttcgccaagctgccccagaacctggacaagaacagatacaaggacgtgctgccctacgacaccaccagagtgctgctgcagggcaacgaggactacatcaacgccagctacgtgaacatggagatccccgccgccaacctggtgaacaagtacatcgccacccagggccccctgccccacacctgcgcccagttctggcaggtggtgtgggaccagaagctgagcctgatcgtgatgctgaccaccctgaccgagagaggcagaaccaagtgccaccagtactggcccgacccccccgacgtgatgaaccacggcggcttccacatccagtgccagagcgaggactgcaccatcgcctacgtgagcagagagatgctggtgaccaacacccagaccggcgaggagcacaccgtgacccacctgcagtacgtggcctggcccgaccacggcgtgcccgacgacagcagcgacttcctggagttcgtgaactacgtgagaagcctgagagtggacagcgagcccgtgctggtgcactgcagcgccggcatcggcagaaccggcgtgctggtgaccatggagaccgccatgtgcctgaccgagagaaacctgcccatctaccccctggacatcgtgagaaagatgagagaccagagagccatgatggtgcagaccagcagccagtacaagttcgtgtgcgaggccatcctgagagtgtacgaggagggcctggtgcagatgctggaccccagctag

SEQ ID NO: 57927 - DNA, 1146 bp, Artificial Sequence
  derived and/or modified sequence
atgcctctggttgtgtccaggattaatccggagtcccctgcggatacttgtatccccaaattgaacgagggcgatcagatcgtgctgatcaacgggagagacataagcgagcatactcacgaccaggtagtaatgtttataaaagctagtcgagagtctcattctcgggaactagcgctagtgatccggcgccgggccgtgcggagctttgcagactttaagtcagaagacgaactcaatcaactgttccctgaggccattttccccatgtgccctgaaggaggggacactcttgaaggctctatggctcaactgaagaagggtcttgaatccgggacggtgctgatccagtttgagcagctgtacagaaagaaacccggcttggctatcacattcgccaagctgccccagaatctggacaaaaataggtataaagacgttcttccatacgacacgacgagggtcctgctgcagggcaacgaagattacataaacgccagttatgtcaacatggagatccccgcggctaatttagtcaataaatacatagcgacacagggcccgctgccgcatacttgcgctcagttttggcaggtggtatgggaccagaagctaagcctgatcgtgatgctgacaacattgactgaacggggtcggacgaaatgccatcagtactggcctgatccgcccgatgtgatgaatcatggaggcttccacattcagtgccagtccgaggactgcacaattgcgtacgtaagtagggagatgcttgttaccaacacacaaacaggtgaggagcacactgtgactcatttacagtacgttgcatggcctgaccatggcgtacctgacgatagctcagactttctggagttcgtgaactacgtgagaagcctgagggtagattccgaacctgtgctggtccactgctctgccggaatcggccggaccggcgtccttgtgacgatggaaacagcaatgtgcctcacagagagaaatttgccaatttaccccctggatattgtacggaagatgcgggatcagagggctatgatggtccaaactagctcgcaatacaagtttgtgtgcgaagccattctgagagtgtacgaagagggcctagtccagatgttagacccgtcctag

SEQ ID NO: 57928 - DNA, 1146 bp, Artificial Sequence
  derived and/or modified sequence
atgcccctggtggtgagccgcatcaaccctgagagccctgctgacacctgcatccccaagctgaatgaaggagaccagatcgtgctgatcaatggccgggacatcagcgagcacacccatgaccaggtggtgatgttcatcaaggccagccgggagagccacagccgggagctggccctggtgatcagaagaagagctgtgcgcagctttgctgacttcaagtcagaagatgagctgaaccagctgtttcctgaggccatcttccccatgtgcccagagggcggggacaccctggagggctccatggcccagctgaagaagggcctggagagcggcaccgtgctgatccagtttgagcagctgtacaggaagaagccaggcctggccatcacctttgccaagctgccccagaacctggacaagaaccgctacaaggatgtgctgccctatgacaccaccagggtgctgctgcagggcaatgaagactacatcaatgccagctatgtgaacatggagatcccagctgccaacctggtgaacaagtacatcgccacccagggccccctgccccacacctgtgcccagttctggcaggtggtgtgggaccagaagctgagcctcatcgtgatgctgaccaccctgacagagcggggccgcaccaagtgccaccagtactggccagaccccccagatgtgatgaaccacggcggcttccacatccagtgccagagcgaggactgcaccatcgcctacgtgtcccgggagatgctggtgaccaacacccagacaggagaggagcacacagtgacccacctgcagtatgtggcctggccagaccacggcgtgcctgatgacagcagtgacttcctggagtttgtgaactacgtgcgcagcctgcgggtggacagcgagcctgtgctggtgcactgcagcgctggcatcggccgcactggagtgctggtgaccatggagacagccatgtgcctgacagagaggaacctgcccatctaccccctggacatcgtgaggaagatgagggaccagagggccatgatggtgcagaccagcagccagtacaagtttgtgtgtgaggccatcctgcgggtgtatgaggagggcctggtgcagatgctggaccccagctag

SEQ ID NO: 57929 - DNA, 1146 bp, Artificial Sequence
  derived and/or modified sequence
atgcccctggtggtgagccggatcaaccccgagagccccgccgacacctgtataccgaagttgaacgaaggagatcagatcgtactcatcaacggccgggatatctcggagcatacccacgaccaggtggtgatgtttatcaaggctagccgggagtctcatagccgggagctggcgctggtgatcaggaggagggctgttaggtctttcgctgacttcaagagcgaagacgagctgaaccagctttttccggaggctatcttccctatgtgccccgaagggggagacacacttgaagggtccatggctcagctgaaaaagggactggagtccggaaccgtcctgatccagtttgagcagttatatcggaaaaagccaggccttgcaatcacattcgctaaactgccccagaatctggataaaaaccggtacaaagatgtactgccatatgacacaaccagggtgctgcttcaaggaaatgaagactacatcaatgcatcgtacgtgaatatggaaatcccggccgccaacctcgtgaacaagtatatcgctacacagggtcctctgccccatacatgtgcacaattctggcaggtcgtttgggatcagaaactgagcttgatcgtcatgctgaccacactgaccgagagagggcggactaaatgccatcaatattggcccgatccaccggacgtaatgaaccatggcggatttcacatccagtgtcaatccgaggattgcaccattgcctatgtgtctagggaaatgctggtgacaaacactcagaccggggaggagcatacagtgacgcacctgcagtacgtggcctggcccgatcatggagtacccgacgactcctccgactttttggagtttgtcaactatgtccggagccttcgcgtcgattcagagcccgttctggtacattgttctgccggaattggaaggactggagttttggtcaccatggagacggccatgtgtctcaccgaacgtaatttgcctatttatccgctggatatcgtgagaaaaatgagagaccagagggcaatgatggtgcagacgagctctcagtataaattcgtgtgcgaagctatattgagagtttacgaggagggtctagtacagatgttggatccttcatag

SEQ ID NO: 57930 - DNA, 1146 bp, Artificial Sequence
  derived and/or modified sequence
atgccattagtcgtgtcacgaattaacccagaatccccagcagacacgtgtatcccaaagctgaacgagggcgaccagatcgtgctaataaatggtagagacatttctgagcacacacatgatcaagtggtaatgtttatcaaagccagccgggaatcccactcccgtgaactggcgctggtgatccgccgtcgtgcagtcaggagctttgcagattttaagtcagaggatgaactcaatcagttattccccgaagccatattcccaatgtgccccgaggggggagatactttggaaggttcgatggcacagctgaaaaaaggactagagtccggtactgtgctgattcagtttgagcagctctaccggaagaaacccggtttggccatcactttcgctaagcttccccagaacttggacaagaatcggtacaaggatgtcctgccctatgatacgacaagggttctgctccagggcaatgaagattacataaacgccagttatgtgaatatggagatcccagccgcaaacctggtaaataaatacatcgccacccaagggccactgccccatacatgcgcacagttctggcaggtggtctgggatcagaaactttcactcatcgtgatgctcactacgctgaccgagcgcggaaggaccaaatgccaccagtactggcctgacccaccggatgttatgaatcatggcggttttcacatccagtgccagtcggaggattgcactattgcctacgtcagtcgcgaaatgctggttaccaacacacagacgggtgaggaacacaccgtgacccacttgcaatatgtggcttggcctgatcatggtgtccccgacgactccagcgacttcctcgaatttgtgaactatgtgaggagtttacgggtggacagcgagccagtgctggtgcattgttccgcaggcattggaaggaccggtgttctggtcaccatggaaacagcaatgtgcctcaccgagcggaatttgccaatctacccactggatatcgtaagaaaaatgcgcgatcagcgggcaatgatggtacagacttcctctcagtacaagttcgtgtgtgaggcaatacttagggtgtacgaggagggcttggtgcaaatgctagatccgtcgtag

SEQ ID NO: 57931 - protein, 481 aa, Artificial Sequence
  derived and/or modified sequence
MQLYSSVCTHYPAGAPGPTAAAPAPPAAATPFKVSLQPPGAAGAAPEPETGECQPAAAAEHREAAAVPAAKMPAFSSCFEVVSGAAAPASAAAGPPGASCKPPLPPHYTSTAQITVRALGADRLLLHGPDPVPGAAGSAAAPRGRCLLLAPAPAAPVPPRRGSSAWLLEELLRPDCPEPAGLDATREGPDRNFRLSEHRQALAAAKHRGPAATPGSPDPGPGPWGEEHLAERGPRGWERGGDRCDAPGGDAARRPDPEAEAPPAGSIEAAPSSAAEPVIVSRSDPRDEKLALYLAEVEKQDKYLRQRNKYRFHIIPDGNCLYRAVSKTVYGDQSLHRELREQTVHYIADHLDHFSPLIEGDVGEFIIAAAQDGAWAGYPELLAMGQMLNVNIHLTTGGRLESPTVSTMIHYLGPEDSLRPSIWLSWLSNGHYDAVFDHSYPNPEYDNWCKQTQVQRKRDEELAKSMAISLSKMYIEQNACS

SEQ ID NO: 57932 - DNA, 1446 bp, Artificial Sequence
  derived and/or modified sequence
atgcaactctatagttcagtgtgtacgcactacccagctggagcacccggcccaacagcagccgcacccgcccctccagccgctgccacaccttttaaagtctctctgcaaccgcccggagccgcaggcgccgctcctgagccggagacgggcgaatgccagccagctgctgctgccgagcaccgcgaggccgcagcggtgccggctgctaaaatgcctgcgttttccagttgctttgaggttgtcagcggcgcagccgccccagccagtgccgcggcggggccaccaggtgcctcctgtaaacccccccttccacctcactacacaagcacggcacagattacggtgagagcgttgggtgcggatagattactgctacacggccctgaccccgtaccaggagccgcggggtccgccgccgcacccaggggccggtgtttgctgctcgccccagcccctgctgccccggtcccccctaggcgcgggtcctcagcttggctccttgaggagctactgagaccagattgccccgagcccgcgggcttggatgccaccagggaaggtcccgatcgtaattttagactctccgaacacagacaagctctggctgcagctaagcaccgaggcccagccgcaaccccaggaagccccgatccggggcccggcccctggggcgaagaacatctcgccgaacgtggtccccgcggctgggaaagaggaggggatagatgtgacgcacctggaggcgatgcagccagaaggcctgatccagaggctgaagcgccacctgctggaagcatcgaggccgctccctcgagcgctgctgagccggtgattgtgtcccgtagtgacccaagggatgagaaactcgcactctacctggccgaggtcgagaagcaggataaatatctgcggcaaaggaataaatacagattccacatcatcccagatggaaattgtctgtacagagcagtcagtaaaacagtgtatggcgaccagagtctccaccgcgagctccgggaacagacagtgcactacatcgccgatcatctggatcacttctctccgttgatcgagggcgacgtaggagagttcatcatcgctgctgctcaagatggcgcctgggctggctatcctgaactgctggcaatgggacagatgctgaatgtgaacatccatctgaccaccggaggacgcctggagtcgcctactgtctccacaatgattcactatttggggccggaagactccctgcgcccatccatctggctcagctggctttcaaacggtcactacgatgctgtattcgaccactcctacccaaacccagaatatgacaattggtgcaagcagacccaagtgcagcggaaaagagacgaggaactcgcaaagtcaatggctatcagcctttctaagatgtatattgaacagaacgcttgctcatag

SEQ ID NO: 57933 - DNA, 1446 bp, Artificial Sequence
  derived and/or modified sequence
atgcagctgtacagctctgtgtgcacccactacccagctggggcccctggccccacagctgctgccccagcccctcctgctgctgccacccccttcaaggtgtccctgcagcccccaggagctgctggggccgcccctgagcctgagaccggggagtgccagcctgctgctgctgctgagcaccgggaggccgctgctgtgcctgctgccaagatgcctgccttcagcagctgctttgaggtggtgtctggagctgctgccccagccagcgctgctgctggccccccaggggccagctgcaagccacccctgcccccccactacaccagcacagcccagatcaccgtgcgggccctgggcgctgaccggctgctgctgcacggccctgaccctgtgcctggagctgctggcagcgctgctgccccccggggccgctgcctgctgctggccccagccccagctgcccctgtgcccccccggcggggcagcagcgcctggctgctggaggagctgctgcggccagactgcccagagcccgccggcctggatgccacccgggagggccctgacaggaacttccggctgtctgagcaccggcaggccctggccgccgccaagcaccggggccctgctgccaccccaggcagcccagaccccggccctggcccctggggcgaggagcacctggccgagcggggcccccggggctgggagcggggcggggacagatgtgatgcccctggaggagatgctgcccggcggccagaccctgaggccgaggcccccccagctggcagcattgaagctgcccccagcagcgctgctgagcctgtgattgtgtccagaagtgaccccagagatgagaagctggccctgtacctggccgaggtggagaagcaggacaagtacctgcggcagaggaacaagtaccgcttccacatcatcccagatggcaactgcctgtacagagctgtgtccaagacagtgtatggagaccagagcctgcaccgggagctgcgggagcagacagtgcactacatcgctgaccacctggaccacttcagccccctcatcgagggagatgtgggggagttcatcatcgctgctgcccaggatggagcctgggccggctacccagagctgctggccatgggccagatgctgaatgtgaacatccacctgaccaccggcggccgcctggagagccccaccgtgtccaccatgatccactacctgggccctgaggacagcctgcggcccagcatctggctgtcctggctgagcaatggccactatgatgctgtgtttgaccacagctaccccaacccagaatatgacaactggtgcaagcagacccaggtgcagaggaagagagatgaggagctggccaagtccatggccatcagcctgagcaagatgtacatcgagcagaatgcctgcagctag

SEQ ID NO: 57934 - DNA, 1446 bp, Artificial Sequence
  derived and/or modified sequence
atgcagctgtacagcagcgtgtgcacccactaccccgccggcgccccagggccaaccgctgctgctccagccccccctgcagcagccaccccgttcaaagttagcctgcagcctcctggcgcagccggtgcggcccccgagccagagaccggtgaatgtcagccggccgccgccgctgagcatcgggaagcggccgcagtccccgccgcgaagatgcccgcatttagctcctgcttcgaggtggtgagtggggctgcggctccagccagtgctgccgctggacctccgggcgcttcctgcaaaccacctctgcctccccattatacatccaccgctcaaatcactgttagagcactcggtgcggaccgtttactgctgcacggaccagaccctgtgccaggagcagccggcagtgctgcagctccccgaggtaggtgtctcctcctcgcccccgccccagctgcaccagtcccacccagacggggcagttccgcatggctgttagaagagcttctgcgcccagactgtccagagccagcaggcctcgatgctacccgagagggaccagacagaaacttccgactgtctgaacaccggcaagccctggccgccgccaagcatcgcggaccggcggctactcccggctccccagacccaggacctgggccttggggcgaggagcatctcgctgaacgtggccctaggggctgggaaagaggcggcgaccgttgcgatgcccccgggggcgatgccgctcggaggcctgatcctgaggcagaggctcctccagccggcagtatagaggcagcgccatcctcagcagccgaacccgtgattgttagcagatctgaccccagggatgaaaagcttgctctgtacctcgctgaggtagaaaaacaagacaagtacctgcgtcagcgcaacaagtaccgtttccacatcattcccgatggtaactgcttatatagggctgtgagcaagacagtatacggggaccagtcattgcaccgtgagctcagagagcagacagtccattatattgctgaccacctggaccacttctcacctctaatcgagggcgacgttggcgaattcatcatagctgccgctcaggatggggcctgggccgggtaccctgagttgctggccatgggccaaatgctgaacgtcaatatccatttgactactgggggcaggttggagtcccctacagtgtctacaatgattcactaccttggtccagaggattctcttcggcctagcatttggctctcatggctcagcaacgggcactatgacgccgtgttcgaccatagctaccctaatccggaatatgacaactggtgcaagcagacacaggttcaacggaagcgagatgaggaactcgcgaaatccatggctatttctctgagcaaaatgtatattgaacagaacgcctgtagctag

SEQ ID NO: 57935 - DNA, 3111 bp, Artificial Sequence
  derived and/or modified sequence
aggaatttggccgggacccgggcgctattcgcggctgctgactcgcggcggccggctgcctttcgctcatctctattctggggccgttgggtcaccgcgctccgccggccccctcccccgggcccggagggtgtgtcccccgctccggggctcgccgcgcctataaggggccgagcggcgggcagggacatgcagctctacagcagcgtctgcacccactaccccgccggggccccgggtcccacggccgccgcccccgcgccacccgccgccgctacccccttcaaggtctcgctgcagcccccgggagccgccggcgccgcgcccgagcccgagaccggtgagtgccagcccgccgcggccgccgagcaccgggaagccgccgctgtccccgccgccaagatgcccgccttctcctcctgcttcgaggtggtgtccggggccgccgcgcccgcctccgccgccgccggcccgcccggcgcgtcctgcaagccgccgctgccgccgcactacacgtccaccgcacagatcaccgtgcgggccctgggcgccgacaggctcctgctgcacgggcccgatcccgttcccggcgccgcgggctccgccgctgccccgcgcggccgctgcctcctgctcgccccggcgcccgcagccccggtcccgccgcggcggggctcctcggcctggctcctggaggagctgctgcggcccgactgccccgagcccgcgggcttggacgcgacacgggaggggcccgatcggaacttccgactgagcgagcaccgccaggccctggccgccgccaagcaccgaggccccgcggcgaccccggggagccccgatcccggccccggtccgtggggcgaagagcacttggcggagaggggccccaggggctgggagaggggcggcgatcgctgcgacgcgcccggtggggacgcggcgcggaggcccgacccagaggccgaggcaccccccgccgggagcatcgaggccgccccgagtagtgcggcggagccggtgatcgtctccaggtcggatcccagagacgagaagctggccctatacctggccgaggtggagaagcaggacaagtatctgcggcagaggaataagtaccgattccacatcattccagacggcaactgcctctaccgagctgtcagcaagacggtgtatggggaccagagcctgcaccgggagttgagggagcagacggtgcactacatcgccgaccatctcgaccacttcagccccctgattgagggcgacgtgggggagtttatcatcgctgctgcccaagacggggcatgggccgggtacccggagttgctggccatggggcagatgctgaatgtgaatatccatttaactactggagggaggctggagagtcccacggtgtctaccatgattcattatttgggcccagaggattccctgaggcctagtatttggctcagttggctcagtaacggacactatgatgctgtatttgatcactcctatcctaacccagagtacgacaactggtgcaaacaaactcaagtgcaaaggaaacgcgacgaagaacttgccaaatctatggccatatccttgtctaaaatgtatattgaacaaaatgcatgctcttgaaatgtctcaaaaccttacaccctgggaataattgcatatataacttgtgtttggagaatcacatgaactttaatcagggtaatagcactttcaaacttgctagtagattttactgtaggtgtaatgccttaatcatctttttgaatgttttctcagagctggaggttgctgggcacctaaatgatgtttcatgatagctttgggtgattttactgctatttataatttgctgtataaagtgagcattacttaatttgcaagctgatttctcacagtgtaaatttgttcattcctggtagtctattttctataaaaatgtatttttgcacaacatttttaaaaactggtgtaccttcatctatgacgtgttccattttgacaaacagctttcaggcgtaaatccagagaagtgctttatatgaaatgtattattttgaacagagtttgtgatttggtagttattttatgttgttgaaatttgaatttcacaattcttagataattatttcaaatggatattgatgcattcttgttaccagatgtttggcccattccattttgatgaaacagagctgttgttttggaagtcattatttttctagaaatggcgaatcttttaaagaaaattacttaatggaaggttgtgggaaggtgtttttttgtgttttttttttggtttttgttttgtttttcctcttttaagggatagtagcaggtcttacttgaatgaaagtctgatatttgctgatggcagaatgattattctgtaccctggttgatgtgtagagtagattgtctggtgctctcagttgtttttatttacatttgtcacgttgttgtaagagaatgttaacatggtataaaactctgtgacaagataagcctcctgctttatataacttcttgaatccagctaagagatttataaactaatggcataaatgtctggagccaaccttggcagttatagcaggagaacactgtcttaatatttctttacattctttcaaaaggcaaaataggattgccctgtattgatgtagaaatgtctgtaaacagagcttgtatggtttgctgggtcaaacaatgtttccaacttaaaatcaatctcattgccactttaactacttttagtcatatttattaagtaatgcagtttgtactttttttattttgtaacattttgtgatttttttgtacaaaactgtatttgtacaatagagcaattcccagctgatggaatgaatgaataaaatgcaaaattatacttttacaatgcctttttggatagagtggtttttaaattgtgatgtttgtaggaaactttcttgcatgtatgcatgtacacaattttttttttccataaagatgccacagcaatagagaggtttcctaaattatcacatgaagaggataggctaatcatgagtaatttcaaaggataagtctgaataaaatataatttaaaagtggagt

SEQ ID NO: 57936 - DNA, 1446 bp, Artificial Sequence
  derived and/or modified sequence
atgcagctgtatagcagcgtttgcacgcactaccctgcaggagctccagggccaaccgccgcagcacccgcacctccggctgccgctactccgtttaaagtttcattgcagcctccaggcgctgccggagcggctcccgagcccgagaccggagaatgccagcccgcagccgcagccgaacatcgtgaagccgctgctgtgcctgctgctaaaatgcccgcattttctagctgtttcgaagtcgtctcaggagccgcagcaccggcaagtgctgctgctgggcctcctggggcatcgtgtaaaccaccgcttcccccacactacacctctaccgctcagattacagttcgagccctcggagcggaccggcttctgctccacggtcccgatcctgtgcctggagctgctggctctgcagcggcaccaagaggcaggtgcctgctcctggcccctgctcccgcagctccagtgccccctcgtagaggctctagcgcctggctgctggaggaacttcttcgacctgattgtcccgaacccgcaggcttggacgccacacgcgaaggaccggatagaaacttccgcttgagcgaacaccggcaggcccttgcagccgcaaaacaccgaggcccagccgcaaccccaggatcccctgaccccggacctggtccatggggcgaggaacatttggcagagcgcggacctcggggatgggaaagggggggagaccgatgcgatgctcccggtggggacgcagcaagacgaccagacccagaggcagaggccccacccgcaggatcaattgaagccgctccatcgtctgctgccgagccagtcattgtgtcccgaagcgatccacgcgatgaaaagctggcactttacctcgccgaagtggagaaacaggacaaatacctgaggcagaggaataaatacagattccacatcatacccgacggcaactgtctttatagagccgtctcaaagaccgtgtacggcgaccagagcctccatcgggagctgcgagaacaaaccgtccattatatcgccgaccatctggaccacttcagtcccctcatagagggtgatgtcggggaatttattatcgccgctgcccaagatggagcctgggcaggataccccgaactgctggctatgggtcaaatgctgaatgtaaacattcatctcaccactggaggcaggctggaatctccaactgtcagtaccatgatccattatttggggcctgaagactcccttcgccctagcatctggctcagttggctgagcaacggacactatgacgccgtgtttgatcacagctatcccaaccccgaatacgataattggtgtaagcagacacaggtccaacgcaaaagagatgaggagctcgctaaatcgatggctatctcattgagtaaaatgtacattgaacagaacgcctgttcctag

SEQ ID NO: 57937 - DNA, 1446 bp, Artificial Sequence
  derived and/or modified sequence
atgcagctgtacagcagcgtgtgcacccactaccccgccggcgcccccggccccaccgccgccgcccccgccccccccgccgccgccacccccttcaaggtgagcctgcagccccccggcgccgccggcgccgcccccgagcccgagaccggcgagtgccagcccgccgccgccgccgagcacagagaggccgccgccgtgcccgccgccaagatgcccgccttcagcagctgcttcgaggtggtgagcggcgccgccgcccccgccagcgccgccgccggcccccccggcgccagctgcaagccccccctgcccccccactacaccagcaccgcccagatcaccgtgagagccctgggcgccgacagactgctgctgcacggccccgaccccgtgcccggcgccgccggcagcgccgccgcccccagaggcagatgcctgctgctggcccccgcccccgccgcccccgtgccccccagaagaggcagcagcgcctggctgctggaggagctgctgagacccgactgccccgagcccgccggcctggacgccaccagagagggccccgacagaaacttcagactgagcgagcacagacaggccctggccgccgccaagcacagaggccccgccgccacccccggcagccccgaccccggccccggcccctggggcgaggagcacctggccgagagaggccccagaggctgggagagaggcggcgacagatgcgacgcccccggcggcgacgccgccagaagacccgaccccgaggccgaggccccccccgccggcagcatcgaggccgcccccagcagcgccgccgagcccgtgatcgtgagcagaagcgaccccagagacgagaagctggccctgtacctggccgaggtggagaagcaggacaagtacctgagacagagaaacaagtacagattccacatcatccccgacggcaactgcctgtacagagccgtgagcaagaccgtgtacggcgaccagagcctgcacagagagctgagagagcagaccgtgcactacatcgccgaccacctggaccacttcagccccctgatcgagggcgacgtgggcgagttcatcatcgccgccgcccaggacggcgcctgggccggctaccccgagctgctggccatgggccagatgctgaacgtgaacatccacctgaccaccggcggcagactggagagccccaccgtgagcaccatgatccactacctgggccccgaggacagcctgagacccagcatctggctgagctggctgagcaacggccactacgacgccgtgttcgaccacagctaccccaaccccgagtacgacaactggtgcaagcagacccaggtgcagagaaagagagacgaggagctggccaagagcatggccatcagcctgagcaagatgtacatcgagcagaacgcctgcagctag

SEQ ID NO: 57938 - protein, 439 aa, Artificial Sequence
  derived and/or modified sequence
MAEAVFHAPKRKRRVYETYESPLPIPFGQDHGPLKEFKIFRAEMINNNVIVRNAEDIEQLYGKGYFGKGILSRSRPSFTISDPKLVAKWKDMKTNMPIITSKRYQHSVEWAAELMRRQGQDESTVRRILKDYTKPLEHPPVKRNEEAQVHDKLNSGMVSNMEGTAGGERPSVVNGDSGKSGGVGDPREPLGCLQEGSGCHPTTESFEKSVREDASPLPHVCCCKQDALILQRGLHHEDGSQHIGLLHPGDRGPDHEYVLVEEAECAMSEREAAPNEEAFFLVYALGCLSIYYEKEPLTIVKLWKAFTVVQPTFRTTYMAYHYFRSKGWVPKVGLKYGTDLLLYRKGPPFYHASYSVIIELVDDHFEGSLRRPLSWKSLAALSRVSVNVSKELMLCYLIKPSTMTDKEMESPECMKRIKVQEVILSRWVSSRERSDQDDL

SEQ ID NO: 57939 - DNA, 1320 bp, Artificial Sequence
  derived and/or modified sequence
atggccgaggccgtgttccacgcccccaagagaaagagaagagtgtacgagacctacgagagccccctgcccatccccttcggccaggaccacggccccctgaaggagttcaagatcttcagagccgagatgatcaacaacaacgtgatcgtgagaaacgccgaggacatcgagcagctgtacggcaagggctacttcggcaagggcatcctgagcagaagcagacccagcttcaccatcagcgaccccaagctggtggccaagtggaaggacatgaagaccaacatgcccatcatcaccagcaagagataccagcacagcgtggagtgggccgccgagctgatgagaagacagggccaggacgagagcaccgtgagaagaatcctgaaggactacaccaagcccctggagcacccccccgtgaagagaaacgaggaggcccaggtgcacgacaagctgaacagcggcatggtgagcaacatggagggcaccgccggcggcgagagacccagcgtggtgaacggcgacagcggcaagagcggcggcgtgggcgaccccagagagcccctgggctgcctgcaggagggcagcggctgccaccccaccaccgagagcttcgagaagagcgtgagagaggacgccagccccctgccccacgtgtgctgctgcaagcaggacgccctgatcctgcagagaggcctgcaccacgaggacggcagccagcacatcggcctgctgcaccccggcgacagaggccccgaccacgagtacgtgctggtggaggaggccgagtgcgccatgagcgagagagaggccgcccccaacgaggaggccttcttcctggtgtacgccctgggctgcctgagcatctactacgagaaggagcccctgaccatcgtgaagctgtggaaggccttcaccgtggtgcagcccaccttcagaaccacctacatggcctaccactacttcagaagcaagggctgggtgcccaaggtgggcctgaagtacggcaccgacctgctgctgtacagaaagggcccccccttctaccacgccagctacagcgtgatcatcgagctggtggacgaccacttcgagggcagcctgagaagacccctgagctggaagagcctggccgccctgagcagagtgagcgtgaacgtgagcaaggagctgatgctgtgctacctgatcaagcccagcaccatgaccgacaaggagatggagagccccgagtgcatgaagagaatcaaggtgcaggaggtgatcctgagcagatgggtgagcagcagagagagaagcgaccaggacgacctgtag

SEQ ID NO: 57940 - DNA, 1320 bp, Artificial Sequence
  derived and/or modified sequence
atggctgaagccgtgttccatgcccccaaaagaaagcgccgcgtgtacgaaacctacgagagcccgttgcctatccctttcgggcaggatcatggaccactgaaggagtttaaaatttttcgtgctgaaatgattaacaataatgtaattgtccggaatgcagaggacatcgaacagttatatgggaaaggatattttgggaagggtatcctgtcccgttcaaggccctcgtttacgatctctgacccgaaactggttgccaagtggaaggatatgaaaaccaacatgcctattatcacatccaagcggtatcaacattctgtcgaatgggctgccgaactgatgcgcagacaggggcaggacgaaagtacagtgcgccgcattctgaaagattacacgaaaccattagagcaccctccagtgaagcgaaacgaggaagcacaggtccatgacaagctgaactccggaatggtcagcaatatggagggtaccgccgggggcgaacgccctagcgtggttaatggcgactccggtaagtccggaggcgtcggggacccaagggagccactgggttgccttcaggaaggcagtgggtgccacccaaccaccgaatcattcgaaaagtctgtgcgggaagacgctagccccctccctcacgtctgctgctgtaagcaagatgctctgatcctccagagggggctccatcacgaggatggctcccagcacataggactgctgcatcccggcgatcgggggcctgatcacgagtacgtcttggtagaggaggctgagtgcgctatgtctgagagagaagccgccccgaatgaggaagcctttttcctggtctacgctctaggatgcctgagtatctactacgaaaaagaacctttgaccatagtaaagttgtggaaagcgtttactgttgtgcagcccacatttcgtacgacatacatggcatatcactacttccggtccaagggttgggtgccgaaagttgggttgaaatatggaacggatctgctcctataccggaagggaccacctttctaccacgcttcgtattctgtgataatagagctcgtggatgaccactttgaaggctccctgcggcgccccctcagctggaagagcctcgctgcgctgtctcgagtcagcgtgaatgttagtaaagagctgatgctttgttatctgattaaaccctctaccatgaccgacaaggaaatggaatcaccagaatgcatgaagcgcatcaaagttcaggaggtgattctgtctcgatgggtgtcatcccgcgagcgttccgaccaggatgatctgtag

SEQ ID NO: 57941 - DNA, 1320 bp, Artificial Sequence
  derived and/or modified sequence
atggccgaggccgtgttccacgccccaaagcgaaagcggcgagtttacgagacgtatgaaagcccattgccaataccatttgggcaggaccacggtcctctgaaggagttcaagatttttcgggcagagatgatcaacaacaatgtgattgtccggaacgcggaagacatagaacagttgtacggtaaagggtacttcggcaaaggtatcctatctaggagccgcccaagctttaccatctcagatccaaaattggtggcgaaatggaaggacatgaaaacaaatatgcctatcatcacctcaaagcggtaccagcattccgttgaatgggcagcagagcttatgcggagacagggtcaggacgagtcgaccgttcgaaggattttgaaagactacaccaagcccctcgagcatcctccagtcaaacgaaatgaggaggcccaggtgcacgacaagctgaattcagggatggtgagtaatatggaaggcactgcgggtggcgagcggccttcagttgttaacggagacagcggaaagagtggtggagtcggggacccaagagaacccctgggttgcctccaggaggggtctggatgtcacccaaccacagaaagtttcgagaaatctgttagggaagatgcatctcctctccctcacgtctgctgttgcaagcaggatgctctgatactacaacgagggttacatcatgaagacggttcccagcatatagggctgctccatcccggcgatagagggcccgatcatgaatacgtcctggtagaggaggcggagtgcgcgatgtcggagagggaggccgcacccaatgaagaggccttcttcctggtgtatgcactaggatgtctgagtatatactatgagaaagagcctctaacgattgtgaagctgtggaaggccttcaccgttgttcagcccacgttcagaaccacatacatggcctatcactactttcgaagcaaggggtgggtgccaaaggtgggtctcaagtatgggacagatctgctactataccgtaaaggtcctccgttctaccacgctagctattccgttattatcgagctggtcgacgaccactttgagggttccctccgccgtcctttgtcatggaaatccctggccgctttgtcccgggtcagtgtaaatgtgtccaaggagctgatgctgtgttatctgataaagcctagtacgatgactgacaaggagatggagagcccagagtgcatgaaacggatcaaggtgcaggaggtcatcctgtcccgctgggtgtcctctcgagaacgatcagaccaagatgacctttag

SEQ ID NO: 57942 - DNA, 1320 bp, Artificial Sequence
  derived and/or modified sequence
atggccgaggccgtgttccacgcccccaagaggaagagaagagtgtatgagacctatgagagccccctgcccatccccttcggccaggaccacggccccctgaaggagttcaagatcttccgggcagagatgatcaacaacaacgtcatcgtgagaaatgcagaagatattgagcagctgtatggcaagggctactttgggaagggcatcctgagccgcagccggcccagcttcaccatcagtgaccccaagctggtggccaagtggaaggacatgaagaccaacatgcccatcatcaccagcaagcgctaccagcacagcgtggagtgggccgctgagctgatgaggcggcagggccaggatgagagcacagtgcggcgcatcctgaaggactacaccaagcccctggagcacccccctgtgaagagaaatgaggaggcccaggtgcatgacaagctgaacagcggcatggtgagcaacatggagggcacagctggaggagagcggcccagcgtggtgaatggagacagcggcaagagcggcggcgtgggggacccccgggagcccctgggctgcctgcaggagggcagcggctgccaccccaccacagagagctttgagaagtctgtgcgggaggatgccagccccctgccccacgtgtgctgctgcaagcaggatgccctgatcctgcagaggggcctgcaccatgaagatggcagccagcacatcggcctgctgcaccctggggaccggggccctgaccatgaatatgtgctggtggaggaggccgagtgtgccatgtctgagcgggaggccgccccaaatgaggaggccttcttcctggtgtatgccctgggctgcctgagcatctactatgagaaggagcccctgaccatcgtgaagctgtggaaggccttcaccgtggtgcagcccaccttccgcaccacctacatggcctaccactacttccgcagcaagggctgggtgcccaaggtgggcctgaagtatggaacagacctgctgctgtacagaaaaggaccacccttctaccacgccagctacagcgtcatcatcgagctggtggatgaccactttgagggcagcctgcggcggcccctgtcctggaagagcctggccgccctgagccgggtgtctgtgaatgtgtccaaggagctgatgctgtgctacctgatcaagcccagcaccatgacagacaaggagatggagagccctgagtgcatgaagaggatcaaggtgcaggaggtgatcctgagccgctgggtgagcagccgggagaggagtgaccaggatgacctgtag

SEQ ID NO: 57943 - DNA, 1320 bp, Artificial Sequence
  derived and/or modified sequence
atggccgaggccgtgttccacgcccccaagcggaagcggcgggtgtatgaaacctatgagtccccgctgcctatcccgttcgggcaggaccacggtccattaaaggaatttaagatttttagagccgagatgataaacaacaatgtgatcgttagaaacgcagaagacatcgagcagctgtatggcaaggggtatttcggcaaggggatcctatcaagatcgcggcccagtttcactattagcgaccccaagttagtggctaaatggaaagatatgaagaccaatatgcctataatcacctctaagcggtatcagcatagcgtcgagtgggcagcagagctgatgagacggcagggacaggatgaatccacggtccgccgcatcctaaaggactacaccaagcctctggagcaccctccagttaaaagaaatgaggaggctcaggttcacgacaaactgaattccggtatggtcagtaacatggaaggaacagccggaggagaacggccgtcggtcgtgaatggagatagtggaaagtccggtggagtcggagatccaagggaacctttggggtgtcttcaggagggttctggatgccacccaaccaccgaatccttcgaaaagagtgtgagagaggatgccagcccattaccacacgtctgttgttgcaagcaggacgcgttaatcctccagcgcggccttcatcacgaagatgggtcccagcacattggacttttacatcccggtgaccgcggcccagaccacgagtacgtacttgtggaggaggcagagtgcgctatgtctgagcgggaagctgcccccaatgaggaagcgtttttcttggtgtatgccctcgggtgcctatctatttattacgagaaggagccactgactatcgtgaagttatggaaggcctttacagtggtgcagccaactttccggaccacatacatggcatatcactattttagatcaaaggggtgggtgccaaaggtggggctcaagtacgggactgaccttttactgtacaggaagggccccccgttttaccacgcctcatacagcgtcatcatcgaactggtggatgatcactttgagggtagcctgcgcagaccactgtcttggaaatcactcgcagctctctctcgagtgtctgtgaacgtctctaaggagctgatgttatgttatctcattaagccatcaaccatgactgacaaagagatggagtctcctgagtgtatgaaacgtataaaagtgcaggaagtgattctatcaaggtgggtctcctccagagaacggagtgaccaagatgacctgtag

SEQ ID NO: 57944 - DNA, 1320 bp, Artificial Sequence
  derived and/or modified sequence
atggccgaggccgtgttccacgcccccaagcggaagcggcgggtgtacgagacatatgaatctcctctgcctattcctttcggtcaggatcacggaccattaaaggagtttaagatctttcgcgcagagatgataaataataacgtaattgtaaggaacgcggaggatattgaacaactgtacgggaagggctattttggtaaaggcattcttagccgatcgcgacccagttttactatttcagaccccaaattggtggccaagtggaaggatatgaaaaccaatatgcccatcatcacctctaagaggtaccagcatagtgtggaatgggccgcagagcttatgcgcagacaaggtcaggatgagtcgaccgttagaagaatcttaaaggattatacaaagccactcgagcaccctcccgttaaaagaaatgaggaggcacaggtccacgacaaactcaatagtggaatggtctctaacatggaaggtacagccgggggcgaacggccatccgttgtgaacggcgactccggaaagagtggcggcgtcggcgaccccagggagccactcggctgtctgcaggaaggatctgggtgccatccaacgacggagtcttttgagaaatcagttcgtgaggacgcttcccctctgccgcacgtctgttgttgcaaacaggatgctctgatattgcaaagaggcctacaccacgaggatggcagccagcatattggcctgctccatcccggggacagaggaccagaccatgaatacgtgctcgtggaggaggctgaatgcgcaatgagtgagcgggaagccgcccccaacgaagaggccttcttcctagtgtatgccttgggttgcctgagcatctactacgaaaaagaacctctgaccattgtgaagttgtggaaagcatttactgtcgtgcaacctacttttcgcactacctatatggcctatcattattttcggtctaaagggtgggtcccaaaagtggggttgaaatacggtacagatctgctcttgtatcgcaagggtcctcctttttaccacgcatcttacagcgttattatcgaattggtggatgatcacttcgagggatcactcagacgacccttatcatggaagagtctggccgctctttcacgcgttagcgtgaatgtgtccaaagagcttatgctgtgctaccttataaagccaagtaccatgacggacaaagaaatggaatctcccgaatgcatgaaaagaattaaggttcaggaagtgattttatcaagatgggtcagcagtagggaaaggagcgaccaggacgacctttag

SEQ ID NO: 57945 - DNA, 1320 bp, Artificial Sequence
  derived and/or modified sequence
atggctgaagcggttttccacgcccctaaacgaaaacgcagggtgtacgagacatatgagtctcctctcccaattcctttcggtcaagaccacggcccacttaaagagtttaagatctttagagctgagatgattaataataatgttattgtcagaaacgccgaagacattgagcaattatatggcaaaggatactttggaaaaggcattctatcacgcagccgaccttctttcaccatctccgatcctaagctggttgcaaagtggaaggacatgaagactaacatgccaataattaccagcaagcggtaccagcatagcgtggaatgggccgctgaactgatgcggcgacaagggcaggacgaaagcacggttcggcgaatcctgaaagattataccaaaccactcgagcacccgccagtgaaacgaaacgaggaagcacaggtgcatgacaaattaaactcaggcatggtgtcaaatatggagggaaccgctggcggagaacgtccatctgtcgtgaacggtgactcaggcaaaagcggcggagtaggggaccccagggagcccttaggctgtttgcaagaaggctcgggatgtcaccctacgaccgagtctttcgaaaaatctgtgagggaagatgccagccctctaccccacgtttgttgctgcaagcaggacgccctcattctccagcgagggctccaccacgaagacggctcccagcacatcgggctcctgcacccaggagatcgtggccctgatcacgagtatgtattggtggaggaagctgaatgcgccatgtcggagagagaggctgcacctaatgaggaggcattttttctagtctatgccctggggtgcctgtccatctactacgaaaaagagcccctaactattgttaaactgtggaaagcttttaccgtcgtccagcctactttccgcacaacctatatggcgtatcactactttagatctaagggttgggtcccaaaggtgggtctcaaatacggcaccgatctattgttgtatcggaagggtccaccattctatcacgccagctacagtgttattatcgagctggtggacgaccattttgagggctccctccgcagacccctgagttggaagtccttagccgctctgtctcgcgtgtcagtgaatgtctctaaggagctcatgctctgctatttaatcaagcctagcactatgactgacaaagaaatggaatctccagagtgtatgaaaaggatcaaggtccaggaggtaatactaagtcggtgggtaagctccagggagcggtccgatcaggatgacctgtag

SEQ ID NO: 57946 - DNA, 1320 bp, Artificial Sequence
  derived and/or modified sequence
atggcagaagccgtgtttcacgctcctaaacggaaaaggagagtgtacgaaacctacgaatcacccctgcccatcccttttggccaggaccacgggcctctcaaggaattcaagatattcagagccgaaatgattaacaataatgttatagttagaaacgccgaagatatcgagcagctgtacggtaaagggtacttcggaaagggaatcctttcgaggtctagaccctccttcaccataagtgacccaaagctcgtggcaaaatggaaagacatgaaaacaaatatgccaataattacttcaaagagataccaacattccgtggagtgggcggcagagctgatgagacgccagggccaagacgagagtacagtcaggcgcatcctgaaagactatacaaagcctctggaacaccctcctgtgaagcgaaatgaggaggcgcaagttcatgacaagctcaattcaggcatggtctctaatatggagggcacagcagggggagaaaggccgtcagtggttaacggggatagcggaaagagcggcggagtgggagatccacgcgagccgctcgggtgccttcaggaaggaagcgggtgtcatcccaccaccgaatcatttgaaaaaagcgtgcgtgaagatgcatcccccctgcctcacgtctgctgctgcaagcaggatgctctgatcctgcagagagggcttcatcacgaggatggatctcaacatatcggactgttacatccgggagaccggggtccggatcatgaatatgtgttggtcgaagaggcggagtgcgccatgagcgagagagaggcagcccctaacgaagaagccttcttcctggtgtatgccctagggtgtttgagcatctactacgagaaagagccactcaccattgtcaagctctggaaggccttcactgtcgtgcagcctacgttcaggacaacttacatggcttatcactacttccgtagcaaaggatgggtgcccaaagtcggactgaaatatgggacagacctgctgctctatagaaagggacccccattttatcacgctagctattctgttatcatagagcttgttgatgaccacttcgaaggctctttacgccgtcccctgagctggaagagcctggctgctctgtctcgtgtctctgtgaatgtaagcaaggagctgatgttgtgttatctgataaagcccagcaccatgaccgacaaggaaatggaaagccctgaatgcatgaagcgtatcaaggtgcaagaggtaattctctccagatgggtgagctctagagagcggtcagatcaagatgatctctag

SEQ ID NO: 57947 - DNA, 2023 bp, Artificial Sequence
  derived and/or modified sequence
tttgcggccgcactgcttgacggcagcggtgtccgccccacggccggcgttgccggggtaacggcgagcgcgtggggccaagaaagaatacctcctctgaaaaatggcagaagcagttttccatgccccaaagaggaaaagaagagtgtatgagacttacgagtctccattgccaatcccttttggtcaggaccatggtcctctgaaagaattcaagatattccgtgctgaaatgattaacaacaatgtgattgtgaggaatgcggaggacattgagcagctctatgggaaaggttattttggaaaaggtattctttcaagaagccgtccaagcttcacaatttcagatcctaaactggttgctaaatggaaagatatgaagacaaacatgcctatcatcacatcaaagaggtatcagcatagtgttgagtgggcagcagagctgatgcgtagacaggggcaggatgagagtacagtgcgcagaatcctcaaggattacacgaaaccgcttgagcatcctcctgtgaaaaggaatgaagaggctcaagtgcatgacaagcttaactctggaatggtttccaacatggaaggcacagcagggggagagagaccttctgtggtaaacggggactctggaaagtcaggtggtgtgggtgatccccgtgagccattaggctgcctgcaggagggctctggctgccacccaacaacagagagctttgagaaaagcgtgcgagaggatgcctcacctctgccccatgtctgttgctgcaaacaagatgctctcatcctccagcgtggccttcatcatgaagacggcagccagcacatcggcctcctgcatcctggggacagagggcctgaccatgagtacgtgctggtcgaggaagcggagtgtgccatgagcgagagggaggctgccccaaatgaggaagcctttttcttggtctatgctctgggatgtttaagtatttactatgagaaggagcctttaacgatagtgaagctctggaaagctttcactgtagttcagcccacgttcagaaccacctacatggcctaccattactttcgaagcaagggctgggtgcccaaagtgggactcaagtacgggacagatttactgctatatcggaaaggccctccattttaccatgcaagttattctgtcattatcgagctagttgatgaccattttgaaggctctctccgcaggcctctcagttggaagtccctggctgccttgagcagagtttccgttaatgtctctaaggaacttatgctgtgctatttgattaaaccctctactatgactgacaaggaaatggagtcaccagaatgtatgaaaaggattaaagttcaggaggtgattctgagtcgatgggtttcttcacgagagaggagtgaccaagacgatctttaacaattcaacctcaaatttctaatttcaccaacaactatttattgagggctaggtaaaaagttctttttgttgtaatcgtccattaattcataagttttaaagggcatggtgctcccagcaccagaaaactatcagtgtttttaaagataaattacacaagggaggagaaagatccctgtgctaggactgcagattctatacttgcgttggcctctaactctccaatccagagcctcctgcctctggcgtcagtcttttccctcatccactcactggggagattggactagaggagtcctgagaggacacttccaacaagagacatttattctctgattttacctgaaaatggtagtagtttacatttatacagtacagtttatgaagcactttcatacgcaggcatctcttgttacctacatctaagctgttcccgaaagagtgttacagaacacaacagtattgtacaatattcgataagcatatcttcactgcacttgttataaaaatgagtggtgaaataatgtttggagacataatgaaagcgattaacatttggcaaaatataataaagcctttttgtaattggtgagaaagtca

SEQ ID NO: 57948 - DNA, 2279 bp, Artificial Sequence
  derived and/or modified sequence
aaagaatacctcctctgaaaaatggcagaagcagttttccatgccccaaagaggaaaagaagagtgtatgagacttacgagtctccattgccaatcccttttggtcaggaccatggtcctctgaaagaattcaagatattccgtgctgaaatgattaacaacaatgtgattgtgaggaatgcggaggacattgagcagctctatgggaaaggttattttggaaaaggtattctttcaagaagccgtccaagcttcacaatttcagatcctaaactggttgctaaatggaaagatatgaagacaaacatgcctatcatcacatcaaagaggtatcagcatagtgttgagtgggcagcagagctgatgcgtagacaggggcaggatgagagtacagtgcgcagaatcctcaaggattacacgaaaccgcttgagcatcctcctgtgaaaaggaatgaagaggctcaagtgcatgacaagcttaactctggaatggtttccaacatggaaggcacagcagggggagagagaccttctgtggtaaacggggactctggaaagtcaggtggtgtgggtgatccccgtgagccattaggctgcctgcaggagggctctggctgccacccaacaacagagagctttgagaaaagcgtgcgagaggatgcctcacctctgccccatgtctgttgctgcaaacaagatgctctcatcctccagcgtggccttcatcatgaagacggcagccagcacatcggcctcctgcatcctggggacagagggcctgaccatgagtacgtgctggtcgaggaagcggagtgtgccatgagcgagagggaggctgccccaaatgaggaagcctttttcttggtctatgctctgggatgtttaagtatttactatgagaaggagcctttaacgatagtgaagctctggaaagctttcactgtagttcagcccacgttcagaaccacctacatggcctaccattactttcgaagcaagggctgggtgcccaaagtgggactcaagtacgggacagatttactgctatatcggaaaggccctccattttaccatgcaagttattctgtcattatcgagctagttgatgaccattttgaaggctctctccgcaggcctctcagttggaagtccctggctgccttgagcagagtttccgttaatgtctctaaggaacttatgctgtgctatttgattaaaccctctactatgactgacaaggaaatggagtcaccagaatgtatgaaaaggattaaagttcaggaggtgattctgagtcgatgggtttcttcacgagagaggagtgaccaagacgatctttaacaattcaacctcaaatttctaatttcaccaacaactatttattgagggctaggtaaaaagttctttttgttgtaatcgtccattaattcataagttttaaagggcatggtgctcccagcaccagaaaactatcagtgtttttaaagataaattacacaagggaggagaaagatccctgtgctaggactgcagattctatacttgcgttggcctctaactctccaatccagagcctcctgcctctggcgtcagtcttttccctcatccactcactggggagattggactagaggagtcctgagaggacacttccaacaagagacatttattctctgattttacctgaaaatggtagtagtttacatttatacagtacagtttatgaagcactttcatacgcaggcatctcttgttacctacatctaagctgttcccgaaagagtgttacagaacacaacagtattgtacaatattcgataagcatatcttcactgcacttgttataaaaatgagtggtgaaataatgtttggagacataatgaaagcgattaacatttggcaaaatataataaagcctttttgtaattggtgagaaagtcatgaagacttaagttgcctcagggcatctggtggcaagaggagggagatgggtggctgggcatggtggcccatacctataatcccagcacttgggaggccttgggaggccaaggcgcatggatcgcttgagcccaggagttggagaccagcttgggcaacatggtgaaacctcctctctactaacaaaaattatccaagcattgtagcacatgcctgtaattccagctgctcaggagactaaggtaggaggatcgcttgagcccaggaggaagaggttgcagtgagcggagattgtgccactgcaatccagcctgagcaatagagcaaggtcctgtctc

SEQ ID NO: 57949 - protein, 406 aa, Artificial Sequence
  derived and/or modified sequence
MAEAVFHAPKRKRRVYETYESPLPIPFGQDHGPLKEFKIFRAEMINNNVIVRNAEDIEQLYGKGYFGKGILSRSRPSFTISDPKLVAKWKDMKTNMPIITSKRYQHSVEWAAELMRRQGQDESTVRRILKDYTKPLEHPPVKRNEEAQVHDKLNSGMVSNMEGTAGGERPSVRGLHHEDGSQHIGLLHPGDRGPDHEYVLVEEAECAMSEREAAPNEELVQRNRLICRRNPYRIFEYLQLSLEEAFFLVYALGCLSIYYEKEPLTIVKLWKAFTVVQPTFRTTYMAYHYFRSKGWVPKVGLKYGTDLLLYRKGPPFYHASYSVIIELVDDHFEGSLRRPLSWKSLAALSRVSVNVSKELMLCYLIKPSTMTDKEMESPECMKRIKVQEVILSRWVSSRERSDQDDL

SEQ ID NO: 57950 - DNA, 1221 bp, Artificial Sequence
  derived and/or modified sequence
atggccgaggccgtgttccacgcccccaagagaaagagaagagtgtacgagacctacgagagccccctgcccatccccttcggccaggaccacggccccctgaaggagttcaagatcttcagagccgagatgatcaacaacaacgtgatcgtgagaaacgccgaggacatcgagcagctgtacggcaagggctacttcggcaagggcatcctgagcagaagcagacccagcttcaccatcagcgaccccaagctggtggccaagtggaaggacatgaagaccaacatgcccatcatcaccagcaagagataccagcacagcgtggagtgggccgccgagctgatgagaagacagggccaggacgagagcaccgtgagaagaatcctgaaggactacaccaagcccctggagcacccccccgtgaagagaaacgaggaggcccaggtgcacgacaagctgaacagcggcatggtgagcaacatggagggcaccgccggcggcgagagacccagcgtgagaggcctgcaccacgaggacggcagccagcacatcggcctgctgcaccccggcgacagaggccccgaccacgagtacgtgctggtggaggaggccgagtgcgccatgagcgagagagaggccgcccccaacgaggagctggtgcagagaaacagactgatctgcagaagaaacccctacagaatcttcgagtacctgcagctgagcctggaggaggccttcttcctggtgtacgccctgggctgcctgagcatctactacgagaaggagcccctgaccatcgtgaagctgtggaaggccttcaccgtggtgcagcccaccttcagaaccacctacatggcctaccactacttcagaagcaagggctgggtgcccaaggtgggcctgaagtacggcaccgacctgctgctgtacagaaagggcccccccttctaccacgccagctacagcgtgatcatcgagctggtggacgaccacttcgagggcagcctgagaagacccctgagctggaagagcctggccgccctgagcagagtgagcgtgaacgtgagcaaggagctgatgctgtgctacctgatcaagcccagcaccatgaccgacaaggagatggagagccccgagtgcatgaagagaatcaaggtgcaggaggtgatcctgagcagatgggtgagcagcagagagagaagcgaccaggacgacctgtag

SEQ ID NO: 57951 - DNA, 1221 bp, Artificial Sequence
  derived and/or modified sequence
atggccgaggcagtgtttcacgcgcccaagcgcaagcggcgtgtgtacgaaacctacgaatcaccacttcccattcctttcggtcaggaccatgggccgttaaaagagttcaaaattttcagagcagaaatgataaacaataacgtaatcgtgagaaatgctgaggacattgagcagctctacggaaagggctatttcggaaagggcattctctctcgatccaggccgagtttcaccatctcagacccaaagctggtggctaagtggaaggatatgaaaaccaatatgccgataatcactagcaagcggtaccaacacagcgtggagtgggcggccgagctgatgagacggcagggccaggatgaatctacagtgcgcagaatactcaaagactataccaagcccctggaacacccaccagtgaagcgaaacgaagaggctcaagtgcacgacaagcttaacagtggcatggtgtcgaacatggaaggaactgctggcggggagcggccctcagtaagggggctccaccatgaagacgggagccagcatatcggcctcctccatccaggcgacagagggcctgatcacgaatatgtacttgtggaagaagctgaatgtgctatgagcgaacgggaggcagctcccaatgaggaattagtgcagcggaatagactcatctgcaggagaaatccctacagaatcttcgagtatttgcagctgtctctggaggaggcttttttccttgtgtacgctctgggctgtctgagcatctattatgagaaggaaccactgaccatcgtgaaattatggaaggcatttactgtggttcagcctacattcagaaccacctacatggcttaccattattttcgaagcaaggggtgggtgcctaaagtcggcttaaagtacggcacggatctgttactgtaccgaaaaggacctcccttctatcacgcatcttactcagtgatcatcgagttggtggatgatcactttgagggatcgctcaggcggcccctgtcctggaagtccctcgcggctttgtctagagtgtctgtaaacgtcagcaaagaattaatgttgtgttacctgatcaagcctagtacaatgacggacaaggagatggagtccccagaatgtatgaaaaggataaaggtccaggaggtcatcttgtcacggtgggttagcagccgggagagaagcgatcaggatgacttgtag

SEQ ID NO: 57952 - DNA, 1221 bp, Artificial Sequence
  derived and/or modified sequence
atggccgaggccgtgttccacgcccccaagaggaagagaagagtgtatgagacctatgagagccccctgcccatccccttcggccaggaccacggccccctgaaggagttcaagatcttccgggcagagatgatcaacaacaacgtcatcgtgagaaatgcagaagatattgagcagctgtatggcaagggctactttgggaagggcatcctgagccgcagccggcccagcttcaccatcagtgaccccaagctggtggccaagtggaaggacatgaagaccaacatgcccatcatcaccagcaagcgctaccagcacagcgtggagtgggccgctgagctgatgaggcggcagggccaggatgagagcacagtgcggcgcatcctgaaggactacaccaagcccctggagcacccccctgtgaagagaaatgaggaggcccaggtgcatgacaagctgaacagcggcatggtgagcaacatggagggcacagctggaggagagcggcccagcgtgcggggcctgcaccatgaagatggcagccagcacatcggcctgctgcaccctggggaccggggccctgaccacgagtatgtgctggtggaggaggctgaatgtgccatgtctgagcgggaggccgccccaaatgaggagctggtgcagaggaacagactcatctgcagaagaaacccctaccgcatctttgagtacctgcagctgagcctggaggaggccttcttcctggtgtatgccctgggctgcctgagcatctactatgagaaggagcccctgaccatcgtgaagctgtggaaggccttcaccgtggtgcagcccaccttccgcaccacctacatggcctaccactacttccgcagcaagggctgggtgcccaaggtgggcctgaagtatggaacagacctgctgctgtacaggaagggcccccccttctaccacgccagctacagcgtcatcatcgagctggtggatgaccactttgagggcagcctgcggcggcccctgtcctggaagagcctggccgccctgagccgggtgtctgtgaatgtgtccaaggagctgatgctgtgctacctgatcaagcccagcaccatgacagacaaggagatggagagccctgagtgcatgaagaggatcaaggtgcaggaggtgatcctgagccgctgggtgagcagccgggagaggagtgaccaggatgacctgtag

SEQ ID NO: 57953 - DNA, 1221 bp, Artificial Sequence
  derived and/or modified sequence
atggccgaggccgtgttccacgcccccaagcggaagcggcgggtgtacgaaacgtacgagagcccgctccctatccctttcgggcaggaccatggcccgctaaaagaatttaagatcttccgagccgagatgatcaataacaacgtgattgtccgcaatgccgaggatatagagcagttgtacgggaaggggtatttcggtaagggcatcctaagcaggtcaagaccgagctttaccataagcgaccccaaattagtggccaaatggaaggacatgaaaaccaacatgcctatcatcacttcaaagcgctaccagcacagtgtggagtgggcggctgaattaatgcgccggcagggtcaggacgagtccaccgtaaggaggattctgaaggactacaccaagcccctggagcaccccccagtgaagcgcaacgaggaagctcaagtgcacgacaaactgaactctgggatggttagtaatatggagggcactgcgggaggagaaagacctagcgtgcggggcctacatcatgaggatggatctcagcacatcggcctgctacaccccggggaccgaggccctgaccatgagtatgtactagtcgaggaggccgagtgcgcaatgagcgaacgggaagccgcacctaatgaggaattggtgcagcgcaaccggttaatctgccgacggaacccataccgaatttttgaatacctgcagttgagcctcgaagaggcttttttcctagtgtatgccctgggctgcctttctatatattatgagaaggagcctctcacaatcgtaaaactctggaaagcctttaccgtggtccagcctacctttcgcactacttatatggcataccactacttcagaagcaaaggctgggtgccgaaggttggtctcaaatatggtaccgatctgctcctgtatagaaaagggcctccattctaccacgcctcttattccgtgatcatcgagttagtggatgatcattttgagggatctctccggagacccctgagctggaagtccctggctgctttgtcccgcgtctctgtcaatgtttcaaaggagctcatgttgtgttacctgatcaagcctagcactatgacagacaaggagatggagagccctgagtgtatgaagcggatcaaggtccaggaggtgatactgtcgagatgggtgagctccagagagagatccgaccaggacgatctctag

SEQ ID NO: 57954 - DNA, 1221 bp, Artificial Sequence
  derived and/or modified sequence
atggcagaggcggtgttccacgcacccaagagaaagcgacgggtttacgaaacgtacgagtcccccttacctataccttttggacaggaccatggccctttgaaagagttcaagatcttccgggcagaaatgatcaataacaacgtaatagttaggaacgctgaggatatcgagcagctttatgggaaaggctacttcgggaaagggattttgtcacggtctcgcccaagttttacgatctctgacccaaagctggtcgccaaatggaaggacatgaagacgaatatgccaattataacaagcaagagataccagcatagtgtcgaatgggctgctgagcttatgagaaggcagggacaggatgaaagtacagtgcgccgtattctgaaggactacactaagccactggagcatcctcccgtcaagcggaacgaggaagctcaggtgcatgacaagctgaattccggaatggtaagtaacatggaaggaaccgccggaggagagaggccaagcgtgcgaggtctgcatcacgaggacgggagccagcacattggtttactgcaccctggagaccgagggccagaccatgaatacgtgctggtggaggaggccgagtgcgcgatgagcgaacgtgaggctgcgcctaacgaggaacttgtgcagcggaatcggctaatatgccgcaggaatccttaccgaatctttgaatacctgcaactgtcactggaagaggccttctttctggtgtacgcccttggttgtcttagcatatattacgagaaagagccccttactatcgttaaactttggaaggcctttactgtcgtccagcccactttcagaacaacttatatggcataccactactttcggagcaagggatgggttcccaaggtgggtctgaagtatgggactgatctcctgttgtataggaaaggccctccattctatcacgccagctattccgtcattattgagctggtggatgaccatttcgaggggtcgctacgccgtccactgtcctggaagagcctagcagcactgtccagggtgtcagtgaatgtgtccaaggagctaatgctatgttatttgatcaagccttctactatgacagacaaggaaatggagtcacctgaatgcatgaaacgaatcaaggtacaagaggtcatcttatctaggtgggtgtcttctagagaacgttctgatcaagacgatctttag

SEQ ID NO: 57955 - DNA, 1909 bp, Artificial Sequence
  derived and/or modified sequence
actgcttgacggcagcggtgtccgccccacggccggcgttgccggggtaacggcgagcgcgtggggccaagaaagaatacctcctctgaaaaatggcagaagcagttttccatgccccaaagaggaaaagaagagtgtatgagacttacgagtctccattgccaatcccttttggtcaggaccatggtcctctgaaagaattcaagatattccgtgctgaaatgattaacaacaatgtgattgtgaggaatgcggaggacattgagcagctctatgggaaaggttattttggaaaaggtattctttcaagaagccgtccaagcttcacaatttcagatcctaaactggttgctaaatggaaagatatgaagacaaacatgcctatcatcacatcaaagaggtatcagcatagtgttgagtgggcagcagagctgatgcgtagacaggggcaggatgagagtacagtgcgcagaatcctcaaggattacacgaaaccgcttgagcatcctcctgtgaaaaggaatgaagaggctcaagtgcatgacaagcttaactctggaatggtttccaacatggaaggcacagcagggggagagagaccttctgtgcgtggccttcatcatgaagacggcagccagcacatcggcctcctgcatcctggggacagagggcctgaccatgagtacgtgctggtcgaggaagcggagtgtgccatgagcgagagggaggctgccccaaatgaggaattggtgcaaagaaacaggttaatatgcagaagaaatccatataggatctttgagtatttgcaactcagcctagaagaggcctttttcttggtctatgctctgggatgtttaagtatttactatgagaaggagcctttaacgatagtgaagctctggaaagctttcactgtagttcagcccacgttcagaaccacctacatggcctaccattactttcgaagcaagggctgggtgcccaaagtgggactcaagtacgggacagatttactgctatatcggaaaggccctccattttaccatgcaagttattctgtcattatcgagctagttgatgaccattttgaaggctctctccgcaggcctctcagttggaagtccctggctgccttgagcagagtttccgttaatgtctctaaggaacttatgctgtgctatttgattaaaccctctactatgactgacaaggaaatggagtcaccagaatgtatgaaaaggattaaagttcaggaggtgattctgagtcgatgggtttcttcacgagagaggagtgaccaagacgatctttaacaattcaacctcaaatttctaatttcaccaacaactatttattgagggctaggtaaaaagttctttttgttgtaatcgtccattaattcataagttttaaagggcatggtgctcccagcaccagaaaactatcagtgtttttaaagataaattacacaagggaggagaaagatccctgtgctaggactgcagattctatacttgcgttggcctctaactctccaatccagagcctcctgcctctggcgtcagtcttttccctcatccactcactggggagattggactagaggagtcctgagaggacacttccaacaagagacatttattctctgattttacctgaaaatggtagtagtttacatttatacagtacagtttatgaagcactttcatacgcaggcatctcttgttacctacatctaagctgttcccgaaagagtgttacagaacacaacagtattgtacaatattcgataagcatatcttcactgcacttgttataaaaatgagtggtgaaataatgtttggagacataatgaaagcgattaacatttggcaaaatataataaagcctttttgtaattggtgagaaa

SEQ ID NO: 57956 - protein, 402 aa, Artificial Sequence
  derived and/or modified sequence
MAEAVFHAPKRKRRVYETYESPLPIPFGQDHGPLKEFKIFRAEMINNNVIVRNAEDIEQLYGKGYFGKGILSRSRPSFTISDPKLVAKWKDMKTNMPIITSKRYQHSVEWAAELMRRQGQDESTVRRILKDYTKPLEHPPVKRNEEAQVHDKLNSGMVSNMEGTAGGERPSVVNGDSGKSGGVGDPREPLGCLQEGSGCHPTTESFEKSVREDASPLPHVCCCKQDALILQRGLHHEDGSQHIGLLHPGDRGPDHEYVLVEEAECAMSEREAAPNEEAFFLVYALGCLSIYYEKEPLTIVKLWKAFTVVQPTFRTTYMAYHYFRSKGWVPKVGLKYGTDLLLYRKGPPFYHASYSVIIELVDDHFEGSLRRPLSWKSLAALSRVSVNVSKVTQHQLCHWSVT

SEQ ID NO: 57957 - DNA, 1209 bp, Artificial Sequence
  derived and/or modified sequence
atggccgaggccgtgttccacgcccccaagagaaagagaagagtgtacgagacctacgagagccccctgcccatccccttcggccaggaccacggccccctgaaggagttcaagatcttcagagccgagatgatcaacaacaacgtgatcgtgagaaacgccgaggacatcgagcagctgtacggcaagggctacttcggcaagggcatcctgagcagaagcagacccagcttcaccatcagcgaccccaagctggtggccaagtggaaggacatgaagaccaacatgcccatcatcaccagcaagagataccagcacagcgtggagtgggccgccgagctgatgagaagacagggccaggacgagagcaccgtgagaagaatcctgaaggactacaccaagcccctggagcacccccccgtgaagagaaacgaggaggcccaggtgcacgacaagctgaacagcggcatggtgagcaacatggagggcaccgccggcggcgagagacccagcgtggtgaacggcgacagcggcaagagcggcggcgtgggcgaccccagagagcccctgggctgcctgcaggagggcagcggctgccaccccaccaccgagagcttcgagaagagcgtgagagaggacgccagccccctgccccacgtgtgctgctgcaagcaggacgccctgatcctgcagagaggcctgcaccacgaggacggcagccagcacatcggcctgctgcaccccggcgacagaggccccgaccacgagtacgtgctggtggaggaggccgagtgcgccatgagcgagagagaggccgcccccaacgaggaggccttcttcctggtgtacgccctgggctgcctgagcatctactacgagaaggagcccctgaccatcgtgaagctgtggaaggccttcaccgtggtgcagcccaccttcagaaccacctacatggcctaccactacttcagaagcaagggctgggtgcccaaggtgggcctgaagtacggcaccgacctgctgctgtacagaaagggcccccccttctaccacgccagctacagcgtgatcatcgagctggtggacgaccacttcgagggcagcctgagaagacccctgagctggaagagcctggccgccctgagcagagtgagcgtgaacgtgagcaaggtgacccagcaccagctgtgccactggagcgtgacctag

SEQ ID NO: 57958 - DNA, 1209 bp, Artificial Sequence
  derived and/or modified sequence
atggccgaggcagtgtttcacgcaccaaaacggaagagacgagtgtacgaaacttatgaaagtcccctgcctatccctttcggacaggaccacggccccctaaaggagttcaagatttttagggcggagatgatcaataacaacgtgatagtaagaaatgcggaggatatagaacagctgtatggaaagggatacttcggaaaaggaatcttaagcaggagccggcccagtttcaccatctctgacccgaagctggtggccaaatggaaggacatgaagactaacatgcccatcatcacctccaagaggtatcagcactctgtcgagtgggccgcggagctgatgagacgacaggggcaggacgagtcaactgtgcggaggattcttaaagattatactaagccactggagcatcccccggtgaagcggaatgaagaggcccaggttcacgataagctaaattccggcatggtgagcaatatggagggtaccgcgggcggtgaaagaccgtcggtggttaacggagattctgggaagtccggcggtgttggcgacccacgggaacctttgggatgtcttcaggagggctcaggatgccaccccactacggagtcttttgagaaaagcgttcgagaagacgcctcacctctgccccatgtgtgttgctgtaagcaagatgctctgatacttcaacgtgggctgcaccatgaagacggtagtcagcacataggcttactgcatcctggcgacagaggccccgaccatgaatacgtgctcgttgaggaagcagagtgcgcgatgtccgagcgtgaggctgcacccaatgaagaagccttctttctggtgtacgccctcggctgcttatcgatctattatgagaaggagcccctcaccatcgtcaaactctggaaagcattcactgtggtgcaaccaaccttcagaactacttatatggcctaccattatttcaggtcaaaaggctgggtccctaaagtggggctgaagtacgggacagaccttctgctgtaccgaaaaggacctccgttctatcacgcatcatactccgtgatcatcgaattagtggacgaccatttcgagggcagcctgcggaggcccctgagttggaagagcttggccgcactgagcagagtgtccgtgaacgtgtccaaggtgacacagcatcagttatgtcattggagtgtcacttag

SEQ ID NO: 57959 - DNA, 1209 bp, Artificial Sequence
  derived and/or modified sequence
atggccgaggccgtgttccacgcccccaagaggaagagaagagtgtatgagacctatgagagccccctgcccatccccttcggccaggaccacggccccctgaaggagttcaagatcttccgggcagagatgatcaacaacaacgtcatcgtgagaaatgcagaagatattgagcagctgtatggcaagggctactttgggaagggcatcctgagccgcagccggcccagcttcaccatcagtgaccccaagctggtggccaagtggaaggacatgaagaccaacatgcccatcatcaccagcaagcgctaccagcacagcgtggagtgggccgctgagctgatgaggcggcagggccaggatgagagcacagtgcggcgcatcctgaaggactacaccaagcccctggagcacccccctgtgaagagaaatgaggaggcccaggtgcatgacaagctgaacagcggcatggtgagcaacatggagggcacagctggaggagagcggcccagcgtggtgaatggagacagcggcaagagcggcggcgtgggggacccccgggagcccctgggctgcctgcaggagggcagcggctgccaccccaccacagagagctttgagaagtctgtgcgggaggatgccagccccctgccccacgtgtgctgctgcaagcaggatgccctgatcctgcagaggggcctgcaccatgaagatggcagccagcacatcggcctgctgcaccctggggaccggggccctgaccatgaatatgtgctggtggaggaggccgagtgtgccatgtctgagcgggaggccgccccaaatgaggaggccttcttcctggtgtatgccctgggctgcctgagcatctactatgagaaggagcccctgaccatcgtgaagctgtggaaggccttcaccgtggtgcagcccaccttccgcaccacctacatggcctaccactacttccgcagcaagggctgggtgcccaaggtgggcctgaagtatggaacagacctgctgctgtacagaaaaggaccacccttctaccacgccagctacagcgtcatcatcgagctggtggatgaccactttgagggcagcctgcggcggcccctgtcctggaagagcctggccgccctgagccgggtgtctgtgaatgtgtccaaggtgacccagcaccagctgtgccactggagcgtgacctag

SEQ ID NO: 57960 - DNA, 1209 bp, Artificial Sequence
  derived and/or modified sequence
atggccgaggccgtgttccacgcccccaagcggaagcggcgggtgtacgagacctatgaatccccactgccaatacccttcggacaggaccatggtcccctgaaagagtttaagatattcagggcagaaatgatcaacaacaacgtaatcgtccgcaatgccgaggacattgaacaattatatgggaaggggtattttggtaaggggattctgagccgatcccggccttcatttaccatcagcgatccaaaacttgttgcgaagtggaaagatatgaagaccaacatgcccataattaccagcaagcgttaccagcattctgtagagtgggccgcagagctgatgagacggcagggacaagatgagtcaacggtgcggcgcatactgaaagactacaccaagcccctcgaacacccacccgtgaaaaggaacgaggaagcccaggtgcacgataagttgaatagcggcatggtgtcaaatatggaggggactgcaggtggagaacgaccctcagtcgttaatggggacagtggcaagtccggcggggttggggacccgcgcgaacctctgggttgcctccaggagggatccggctgccaccctactaccgagtcctttgaaaagagtgtgagggaggacgcatccccactgccccacgtatgctgttgtaaacaagacgccctgatacttcagagaggactgcatcacgaggatggctcacagcacattgggctgctgcatccaggcgataggggccccgaccatgagtacgttctggttgaagaggcggagtgcgcaatgtctgaaagggaggccgctccaaacgaggaagcattcttcctggtgtacgcgttaggatgtctgtcgatctactatgagaaggagccactgaccatcgtgaaactgtggaaggcatttactgtggtacagcctacgttccgaacaacatatatggcctaccactatttccgaagtaagggctgggtgcctaaagtgggactgaagtacggaactgacctgctgctgtacaggaagggacccccgttttaccacgcttcttacagtgttattattgagctcgtggacgaccactttgaagggtctttgcggcggcccctgagttggaaatcgcttgctgccctgtccagagtgtctgtcaacgtaagtaaagttacacagcaccaactctgtcactggagtgtcacctag

SEQ ID NO: 57961 - DNA, 1209 bp, Artificial Sequence
  derived and/or modified sequence
atggccgaggcggtctttcacgctcccaagcgaaagcgccgagtgtacgaaacgtacgagtcacccctccccattcccttcggccaggaccacgggccactcaaagagttcaaaattttccgcgcagagatgatcaacaacaacgtcatagttagaaacgcggaggacatcgagcagttgtacgggaaaggctatttcggcaaagggatcctgtcccgttcacgcccttccttcactatttctgacccaaagctggtcgcaaaatggaaagacatgaagactaacatgcctattatcacatccaagcggtaccagcatagcgtcgaatgggccgctgaactaatgaggagacagggacaggacgaatccaccgtgcggagaatcctgaaagattacacgaagccactcgagcacccaccggtgaagcgaaacgaggaggcccaggtgcacgacaagctcaattcaggtatggtctcaaatatggaagggacggccggtggtgaaaggccctccgttgtaaatggcgattccggaaagtccggaggcgtgggcgacccaagagagcctctgggttgcttgcaagaagggtcaggctgccacccaactaccgaatccttcgagaagtccgtcagagaagatgcttcacccctgcctcacgtttgttgttgcaaacaggatgccctgatccttcagagggggctgcaccatgaggatggatcgcagcacattggcctgctccatccaggcgaccggggacccgaccacgaatatgtcttggtggaagaggcagagtgcgctatgtccgagcgagaggctgcacctaatgaggaagctttcttcctggtgtacgcacttgggtgtttgagtatctactacgagaaggaaccactgaccatcgtgaagttatggaaggcctttacagttgtacaacctaccttcagaaccacatatatggcttaccattacttccggtccaaaggctgggtcccaaaggtcggcctcaaatatggtacagatctgctcctgtacagaaaaggtccccctttctaccacgcgagttacagcgtgattatcgagctagtggatgatcacttcgagggatccctccggaggccactctcgtggaagtcactcgcagccctctctcgcgtttctgtgaatgtgtctaaagttacccaacatcagctctgccactggtcagtcacctag

SEQ ID NO: 57962 - DNA, 2697 bp, Artificial Sequence
  derived and/or modified sequence
aagaaaggtaagggccctgggcgaggaaagcgcggccctttccgagtttggtgttttgcagcgaaaggaaatctcgctcttccgaaagtcctccagggcgagagaggaaagggcctaggtactgtgctggggtcgcacagccggccgagacagtgccgggacggggagccaggcttccgagtgcgcccggtcactgactcctccgcgctttcctcgtgcgcctgcagcccttggttcttggaaacgccggcgccttgttcagggctggtggggctggggcgcaaggtgcagctgacaatgcccgagaggagccgcagcctctggtggagttcggtcgggtgtgggggtagtcaaggaaagaagcaaagggaatacctcctctgaaaaatggcagaagcagttttccatgccccaaagaggaaaagaagagtgtatgagacttacgagtctccattgccaatcccttttggtcaggaccatggtcctctgaaagaattcaagatattccgtgctgaaatgattaacaacaatgtgattgtgaggaatgcggaggacattgagcagctctatgggaaaggttattttggaaaaggtattctttcaagaagccgtccaagcttcacaatttcagatcctaaactggttgctaaatggaaagatatgaagacaaacatgcctatcatcacatcaaagaggtatcagcatagtgttgagtgggcagcagagctgatgcgtagacaggggcaggatgagagtacagtgcgcagaatcctcaaggattacacgaaaccgcttgagcatcctcctgtgaaaaggaatgaagaggctcaagtgcatgacaagcttaactctggaatggtttccaacatggaaggcacagcagggggagagagaccttctgtggtaaacggggactctggaaagtcaggtggtgtgggtgatccccgtgagccattaggctgcctgcaggagggctctggctgccacccaacaacagagagctttgagaaaagcgtgcgagaggatgcctcacctctgccccatgtctgttgctgcaaacaagatgctctcatcctccagcgtggccttcatcatgaagacggcagccagcacatcggcctcctgcatcctggggacagagggcctgaccatgagtacgtgctggtcgaggaagcggagtgtgccatgagcgagagggaggctgccccaaatgaggaagcctttttcttggtctatgctctgggatgtttaagtatttactatgagaaggagcctttaacgatagtgaagctctggaaagctttcactgtagttcagcccacgttcagaaccacctacatggcctaccattactttcgaagcaagggctgggtgcccaaagtgggactcaagtacgggacagatttactgctatatcggaaaggccctccattttaccatgcaagttattctgtcattatcgagctagttgatgaccattttgaaggctctctccgcaggcctctcagttggaagtccctggctgccttgagcagagtttccgttaatgtctctaaggtaacacaacatcagctttgccattggagtgtcacttaaatggttcagtttttttttttttcttaaatgtagtagaatcaaaaaagttagttgtagaaacttcataacattcctgccagtgacatgctggaagatttggggtcattcgtacccttcccttattgcgctagaagttgtcctcccctcatgttacattttattgtcccctccctcccaactgctgctgagctccaatgacggagctttggagtgtcccatggtgatctgatctgggtaggcattgcttctcttcccaggggtatcgttgctatgtgacttgttttatactgcaatttaacattcactcatacacatattcacaaaggagtcaaaacattgaaagtttgcagatctcttagagaggaagggacttgatatttgttgctaagcactttcccaccctgttgttatcctcatcctgaggatgagaaaccaaggttggagccgttgagtggctaatccaagatcacacagctcatgtgcatactcgggatccaaacccacagctctctggctccctggcttttgtttcactatatccttcgtgttgccatcagagataggagggactcagcttacacaaggactatcaagaaagaaagctgtgtgtgttctcattactcagtgatttgctggctgaaaacaaattgtagataccctctaatttcatcctcatgctgctggaggtgaggtggggctgaggccagagggtcttgcagggctagagatgactgccctttagagcaggttaggttgcctaggctttagcttggtcctatagaaaattagggagcctatactgtttctagaatttttatgcccattttaggggacttgtagcatatacttaatatgtcctcacttaacattgttgatatgttcttggaaactgcaactttaatgtcgtataacaaaaccgttttttcttctcatcatttcaagaaaacaatgttgaagtttatttgaagacctgctgtacatctgtattagtccattctcatgctgctataaagaaatacttgagactgggtaatttataatgaaaagaggtttaattgactcacagttccatgtggctggggaggcctcaggaaacttaca

SEQ ID NO: 57963 - protein, 751 aa, Artificial Sequence
  derived and/or modified sequence
MAATRAGPRAREIFTSLEYGPVPESHACALAWLDTQDRCLGHYVNGKWLKPEHRNSVPCQDPITGENLASCLQAQAEDVAAAVEAARMAFKGWSAHPGVVRAQHLTRLAEVIQKHQRLLWTLESLVTGRAVREVRDGDVQLAQQLLHYHAIQASTQEEALAGWEPMGVIGLILPPTFSFLEMMWRICPALAVGCTVVALVPPASPAPLLLAQLAGELGPFPGILNVLSGPASLVPILASQPGIRKVAFCGAPEGGLRLLIQESVWDEAMRRLQERMGRLRSGRGLDGAVDMGARGAAACDLVQRFVREAQSQGAQVFQAGDVPSERPFYPPTLVSNLPPASPCAQVEVPWPVVVASPFRTAKEALLVANGTPRGGSASVWSERLGQALELGYGLQVGTVWINAHGLRDPSVPTGGCKESGCSWHGGPDGLYEYLRPSGTPARLSCLSKNLNYDTFGLAVPSTLPAGPEIGPSPAPPYGLFVGGRFQAPGARSSRPIRDSSGNLHGYVAEGGAKDIRGAVEAAHQAFPGWAGQSPGARAALLWALAAALERRKSTLASRLERQGAELKAAEAEVELSARRLRAWGARVQAQGHTLQVAGLRGPVLRLREPLGVLAVVCPDEWPLLAFVSLLAPALAYGNTVVMVPSAACPLLALEVCQDMATVFPAGLANVVTGDRDHLTRCLALHQDVQAMWYFGSAQGSQFVEWASAGNLKPVWASRGCPRAWDQEAEGAGPELGLRVARTKALWLPMGD

SEQ ID NO: 57964 - DNA, 2256 bp, Artificial Sequence
  derived and/or modified sequence
atggcagccaccagggctggtccacgcgctcgcgaaatcttcacgtcgcttgagtatggacctgttccagagtcacatgcctgtgccctcgcttggttggacacacaggaccggtgtctagggcactacgtcaacggaaaatggttgaagccagagcacagaaacagcgtcccatgccaggatcctattaccggcgagaacctggcttcttgtctgcaggcccaagcagaggatgtagctgccgcagttgaagctgcgaggatggcgttcaaggggtggagcgctcacccgggggtggtgcgggctcagcacttgacgaggctggcggaggtgatccagaagcatcagcggctgttatggacactcgagtcacttgtgactgggagggcagtacgcgaagtccgcgacggagatgtgcagttggcccagcagctcttgcattaccacgcaattcaggccagcactcaagaagaggcgctggcagggtgggaaccaatgggcgtcatcgggctgattttgccacctacattttcgttcctcgagatgatgtggcggatctgtcctgccctcgctgtaggctgcacagtcgtcgctcttgtgccacccgcaagccccgctcctctcctgttggcccagctagccggcgagctggggccttttcctgggatactgaacgtgttgagcggaccagcctcccttgtgcccatcctcgcatcacagcccgggatccgtaaagtggctttttgtggcgcacccgagggcggcctgaggctgctgatacaggaatctgtctgggatgaggctatgaggaggttgcaggagcggatgggacgtctgcgatccggtcgcgggctggacggcgctgtagatatgggtgccaggggtgccgccgcatgtgacctcgttcagcggtttgtgcgtgaggcccagtcccagggtgcccaggtcttccaagctggagacgtaccaagtgagcgccctttttatccaccgacgctcgtgtctaacttgccacccgcttctccttgtgcacaggttgaggtgccgtggcccgttgtggtagcgagcccattccgaactgccaaagaagccttgttagtcgcgaatggtacgccgcggggcggtagcgcaagcgtttggtccgagagactcggccaggcgctcgagctgggatatggtcttcaagtgggaacagtgtggattaatgctcatggtctgcgagatccttcagtgccaaccggcgggtgtaaagagtcaggatgctcttggcacggggggccggatggcctctatgagtatctcaggcccagcgggacccctgcacgactttcctgcctgtcaaaaaatttgaactacgacaccttcggactggctgtgccgtcaactctccccgccggccctgagattggccccagccccgcccctccctatggactgttcgtcggagggcgttttcaggcccctggcgcccggtcttcacgccccatacgcgactcctcaggtaatttacacggatatgtggcagagggaggtgctaaggatataaggggagcggtagaggctgctcaccaggcctttcctggctgggctggccaatcccctggcgcgagagctgctttgctctgggctttggcggctgcattggaacgccgaaaatccaccctggcgtctagactggaacgccaaggcgccgaactaaaggctgcagaagcagaagtggaactctcagcccggaggctgcgagcctggggggcacgggtgcaggcccaaggtcacaccctgcaggtggcaggtctgcgtggtccagtgctgaggctgcgcgagccactgggcgtgcttgcagtagtttgtcctgatgaatggcctcttctcgccttcgttagtctcctggccccggctctggcctatggcaacacagtcgtaatggtccccagcgcggcgtgccccctgctggccctggaggtctgccaagacatggccaccgtctttcctgcagggctggccaacgtggtgaccggcgacagagaccatctgaccaggtgcctggcactgcaccaggacgtccaggccatgtggtacttcggatcagcccagggttcccaattcgtggaatgggcaagcgctggcaacctgaaaccagtgtgggccagccggggttgtccacgagcgtgggatcaggaagccgagggcgcaggcccggagctggggctccgagtggcaagaaccaaggcgctgtggttgcccatgggggactag

SEQ ID NO: 57965 - DNA, 2256 bp, Artificial Sequence
  derived and/or modified sequence
atggccgccacccgggccggcccccgggcccgggagatcttcaccagcctggagtatggccctgtgcctgagagccacgcctgtgccctggcctggctggacacccaggaccgctgcctgggccactacgtgaatggcaagtggctgaagccagagcacaggaacagcgtgccctgccaggaccccatcaccggggagaacctggccagctgcctgcaggcccaggctgaagatgtggccgctgctgtggaggccgccaggatggccttcaagggctggagcgcccaccctggggtggtgcgggcccagcacctgacccggctggccgaggtgatccagaagcaccagaggctgctgtggaccctggagagcctggtgacaggccgggctgtgcgggaggtgagagatggagatgtgcagctggcccagcagctgctgcactaccacgccatccaggccagcacccaggaggaggccctggccggctgggagcccatgggcgtgattggcctcatcctgccccccaccttctccttcctggagatgatgtggaggatctgcccagccctggccgtgggctgcaccgtggtggccctggtgcccccagccagccctgcccccctgctgctggcccagctggccggggagctgggccccttccctggcatcctgaatgtgctgagcggccctgccagcctggtgcccatcctggccagccagcccggcatcaggaaggtggccttctgtggggcccctgagggcggcctgcggctgctgatccaggagagcgtgtgggatgaggccatgaggcggctgcaggagaggatgggccgcctgcggagcggccggggcctggatggagctgtggacatgggcgcccggggagctgctgcctgtgacctggtgcagagatttgtgcgggaggcccagagccagggcgcccaggtgttccaggccggagatgtgcccagcgagcggcccttctacccacccaccctggtgagcaacctgcccccagccagcccctgtgcccaggtggaggtgccctggcctgtggtggtggccagccccttcagaacagccaaggaggccctgctggtggccaacggcaccccccggggcggcagcgcctctgtgtggagcgagcggctgggccaggccctggagctgggctacggcctgcaggtgggcaccgtgtggatcaatgcccacggcctgcgggaccccagcgtgcccactggaggctgcaaggagagcggctgctcctggcacggcggcccagatggcctgtatgagtacctgcggcccagcggcaccccagcccggctgagctgcctgagcaagaacctgaactatgacaccttcggcctggccgtgcccagcaccctgcctgctggccctgagatcggccccagccctgccccaccctacggcctgtttgtgggcggccgcttccaggcccctggggcccggagcagccggcccatccgggacagcagcggcaacctgcacggctacgtggccgagggcggggccaaggacatcagaggagctgtggaggccgcccaccaggccttccctggctgggccggccagagccctggggcccgggccgccctgctgtgggccctggccgccgccctggagaggaggaagagcaccctggccagccggctggagcggcagggcgctgagctgaaggctgctgaggccgaggtggagctgagcgcccggcggctgcgggcctggggcgcccgggtgcaggcccagggccacaccctgcaggtggccggcctgcggggccctgtgctgcggctgcgggagcccctgggcgtgctggccgtggtgtgcccagatgagtggcccctgctggcctttgtgtccctgctggccccagccctggcctacggcaacacagtggtgatggtgcccagcgctgcctgccccctgctggccctggaggtgtgccaggacatggccaccgtcttccctgctggcctggccaacgtggtgactggagaccgggaccacctgacccgctgcctggccctgcaccaggatgtgcaggccatgtggtacttcggcagcgcccagggcagccagtttgtggagtgggccagcgctggcaacctgaagcctgtgtgggccagccggggctgcccccgggcctgggaccaggaggccgagggcgccggccctgagctgggcctgcgggtggcccggaccaaggccctgtggctgcccatgggagactag

SEQ ID NO: 57966 - DNA, 2952 bp, Artificial Sequence
  derived and/or modified sequence
attcccattagccccgcccctttgggctggaaccggaggtgtcgctcttcggacctcaaggttccccttaacacagagcgccccgcagtcttcgcggaaagcgttcggggtaggcgatggctgcgacgcgtgcagggccccgcgcccgcgagatcttcacctcgctggagtacggaccggtgccggagagccacgcatgcgcactggcctggctggacacccaggaccggtgcttgggccactatgtgaatgggaagtggttaaagcctgaacacagaaattcagtgccttgccaggatcccatcacaggagagaacttggccagttgcctgcaggcacaggccgaggatgtggctgcagccgtggaggcagccaggatggcatttaagggctggagtgcgcaccccggcgtcgtccgggcccagcacctgaccaggctggccgaggtgatccagaagcaccagcggctgctgtggaccctggaatccctggtgactgggcgggctgttcgagaggttcgagacggggacgtccagctggcccagcagctgctccactaccatgcaatccaggcatccacccaggaggaggcactggcaggctgggagcccatgggagtaattggcctcatcctgccacccacattctccttccttgagatgatgtggaggatttgccctgccctggctgtgggctgcaccgtggtggccctcgtgcccccggcctccccggcgcccctcctcctggcccagctggcgggggagctgggccccttcccgggaatcctgaatgtcctcagtggccctgcgtccctggtgcccatcctggcctcccagcctggaatccggaaggtggccttctgcggagccccggagggtggcctcaggctcctcatccaggagtctgtgtgggatgaagccatgagacggctgcaggagcggatggggcggcttcggagtggccgagggctggatggggccgtggacatgggggcccggggggctgccgcatgtgacctggtccagcgctttgtgcgtgaggcccagagccagggtgcacaggtgttccaggctggtgatgtgccttcggaacgcccattctatcccccaaccttggtctccaacctgcccccagcctccccatgtgcccaggtggaggtgccgtggcctgtggtcgtggcctcccccttccgcacagccaaggaggcactgttggtggccaacgggacgccccgcgggggcagcgccagtgtgtggagcgagaggctggggcaggcgctggagctgggctatgggctccaggtgggcactgtctggatcaacgcccacggcctcagagacccttcggtgcccacaggcggctgcaaggagagtgggtgttcctggcacgggggcccagacgggctgtatgagtatctgcggccctcagggacccctgcccggctgtcctgcctctccaagaacctgaactatgacacctttggcctcgctgttccctcaaccctgccggctgggcctgaaatagggcccagcccagcacccccctatgggctcttcgttgggggccgtttccaggctcctggggcccgaagctccaggcccatccgggattcgtctggcaacctccatggctacgtggctgagggtggagccaaggacatccgaggtgctgtggaggccgctcaccaggctttccctggctgggcgggccagtccccaggagcccgggcagccctgctgtgggccctggcggctgcactggagcgccggaagtctaccctggcctcgaggctggagaggcagggagcggagctcaaggctgcggaggcggaggtggagctgagcgcaagacgacttcgggcgtggggggcccgggtgcaggcccaaggccacaccctgcaggtagccgggctgagaggccctgtgctgcgcctgcgggagccgctgggtgtgctggctgtggtgtgtccggacgagtggcccctgcttgccttcgtgtccctgctggctcccgccctggcctacggcaacactgtggtcatggtgcccagtgcggcctgtcctctgctggccctggaggtctgccaggacatggccaccgtgttcccagcaggcctggccaacgtggtgacaggagaccgggaccatctgacccgctgcctggccttgcaccaagacgtccaggccatgtggtatttcggatcagcccagggttcccagtttgtcgagtgggcctcggcaggaaacctcaaaccggtgtgggcgagcaggggctgcccgcgggcctgggaccaggaggccgagggggcaggcccagagctggggctgcgagtggcgcggaccaaggccctgtggctgcctatgggggactgatgcctgagcgccacctactgcattttggacacctcacaccaaggggagatgcaccccacagacacctgggactttccccttctggttcctgtgtctcccaataaactctctgaccaaccctagctgtgcttctgcgagaagaaagggtgtagcaacttctggcagatatgaggcttttttcttttttttttttttttttgagacaacgtctggctctgtcacccaggctggagcgcagtggcacaatctcggcccactgcagcctcgacctctggggctcaagggatcctcatgcctcagcctcatatgtagctggggccacagacatgcaccaccacacctggctcgaggccattttagttctgaggttgagcagctcaggagccggctccagcacggtgctgtgtttgtgaaacagagaaaggggacccccgaggaccccagacagggccttaggactctcatatcttcttgtcttctccatctggtggctcttgctctctggttttctctaccttttcatggccccagaatccatatgcagtaaaggaactctctggaataaaattaaagtcctcct

SEQ ID NO: 57967 - DNA, 2256 bp, Artificial Sequence
  derived and/or modified sequence
atggccgccacccgggccggcccccgggcccgggagatcttcacctccttggagtatggccctgtgcccgagagccacgcgtgtgctctggcatggcttgatacccaggaccgctgtctagggcactatgtaaatgggaaatggctcaagcctgagcatcggaactccgtcccatgccaggatcctatcaccggtgaaaatctcgcgtcttgcctccaggctcaggcagaggatgtggcggccgctgtggaggctgctagaatggccttcaaagggtggtccgcacacccaggagtagtgcgcgcccaacacctgactaggctggccgaggtgattcagaagcaccagaggttactgtggacattggagagcctggtaactggccgggctgtgcgcgaggtcagagacggcgatgttcagctggcccaacagctcctccattatcacgcgattcaagcaagcactcaagaggaagctcttgcaggttgggagccaatgggcgttatcggtctcattctacctcccacatttagtttcttggagatgatgtggagaatctgccctgccttggccgtgggttgtactgtagtagctttggttccccctgcaagccctgctccgctgctcttggcccaactcgccggagagctaggccctttccccggaatcctgaacgtgctgagcgggccagcctccctggtgccaatcctggcctcgcagcccgggattcgcaaggtagccttttgcggcgctcctgaggggggtctgcgattactcatacaggaatcagtatgggacgaggctatgcgcaggctccaagagcggatgggacgcctaagaagtggcagggggttggatggcgccgtcgacatgggcgccaggggcgcagctgcatgtgacctggtgcagcggtttgtcagggaggcgcagagtcagggggcacaggtgttccaggccggggatgtgccttccgagaggccgttttacccaccgacactcgtcagcaaccttcccccagcctctccatgcgcacaggtggaagttccttggcccgtggttgttgctagtccttttcgcacagccaaggaggctctgctcgtggctaacgggaccccacgcgggggttcagctagcgtgtggtcggaacgattgggtcaggccctggagcttggatacgggctgcaggtgggaactgtatggatcaatgcacatggcctcagagaccccagtgtgcctacgggcggatgtaaagagagtggatgttcgtggcatggtggtccagacggtctgtatgagtacctgaggccctcaggtactccagcgcggctgagctgcctttcaaaaaacctcaattatgacacttttgggcttgctgtgccttccacactgcccgctggacctgagattggcccatcacctgcacctccctacggtctgttcgtgggcggacgatttcaagccccaggtgcccgttcttctcggccaatccgtgattcgtcaggcaatttgcacgggtacgttgcagagggcggcgcaaaagacattcgcggagccgtggaggccgcccatcaggccttcccaggatgggcgggacaaagcccaggtgcgcgcgctgctctgctgtgggctctggccgctgccctggagcggcgcaagtctacccttgcatcccgcttagagcggcaaggtgctgagctgaaggctgccgaagcggaagtcgagctgtccgctcgccgtctgcgcgcttggggcgccagagtgcaggcgcagggacataccctccaggtcgcaggacttaggggcccagttctgcgtctcagggaacccctgggcgttctggccgtggtgtgcccagatgaatggcctctgctagcgtttgtgagcctcttggcccctgctcttgcctatggtaacacggttgtaatggtgcctagtgctgcgtgcccgctgctggccctggaggtctgtcaggacatggccactgtgttccccgccggtctggccaacgtcgtaacaggtgaccgggaccatttaacccggtgtctggctctgcaccaggatgtgcaggccatgtggtactttggaagcgcccagggcagccaatttgtggagtgggcctccgcaggaaacctgaagcccgtgtgggcaagccgtggctgtcctcgtgcatgggaccaagaagccgagggcgcagggcctgaactgggtttgagggtggccaggactaaggccctatggttacctatgggtgactag

SEQ ID NO: 57968 - DNA, 132 bp, Artificial Sequence
  derived and/or modified sequence
tgaagccggaacgacgacatctgcatctacggcggcctgggcctgggcggcttgctgctcctggccgtggtcttactgtccgcctgcctgtgttggctgcacagacgtgaggccgcttccgcccagcagtag

SEQ ID NO: 57969 - DNA, 2256 bp, Artificial Sequence
  derived and/or modified sequence
atggcagctacgagggccggaccacgggctcgcgaaatctttacaagcctggagtatggcccagtgcccgagtcacatgcatgcgcccttgcctggctggacacacaggatcggtgtctgggacattatgtgaacggaaaatggctcaagccagagcatagaaacagtgtgccatgccaggatcccattacgggcgaaaacctggcatcgtgcctccaggcccaggcagaggacgtggccgcagccgtggaagctgctcggatggctttcaaggggtggtctgcgcacccaggggtggtaagggcccagcacctgacccgcctagccgaagtgattcaaaaacaccagaggctgctttggaccttggaatctcttgtcacaggccgtgcggttagggaggtgcgcgacggagatgtacagcttgctcagcagctgttacattatcatgccatccaggcaagtacacaggaggaagccctcgccggatgggaaccaatgggcgtgataggcctgatacttccccctacattctcattcctggaaatgatgtggaggatctgcccggctctcgcagtgggatgtaccgttgtcgctctggtgcctcctgcctctccggctcccctgctgctcgcgcagctagccggagagctgggacctttcccaggaattctgaatgtgctgagtggaccagcatcactggttcctattctggcttcacagcctggcattagaaaagtcgccttttgtggagccccagaaggaggactgcgcctactgatacaggaaagcgtttgggacgaggcaatgcggaggctgcaagagagaatgggaagactaaggtcgggccgaggattggatggcgctgtggatatgggggcacgcggagcggctgcatgtgacctcgtgcagcgatttgtccgtgaagctcagtctcagggggctcaggttttccaggcaggtgacgtgccatctgaacgccctttttacccccctaccctcgtctccaacctgccgcctgcaagtccatgcgcccaggtggaggtgccttggcctgtcgtggtggcctccccattcagaaccgctaaggaggctcttctggtggccaatggaactcccaggggaggctctgcgtccgtgtggtccgagcgtctgggacaggctctagaattgggctacggtctccaggttggtacggtctggatcaatgcccatggactccgtgatccctcagtgcctaccgggggttgcaaggagtccggctgttcgtggcacggtgggccagatggcctttatgaatatctgagaccttctgggacccctgccagactgtcttgcctgagcaagaacctcaactacgacacttttgggctggcagtgccctccactctacctgcaggcccagagatcggcccttcacctgctccaccatacggtctgtttgtgggtgggcgtttccaagccccaggcgctaggagttctcggccaattagggactcttcaggcaacctccatggatacgttgcagagggaggagccaaagatatcagaggagcagtggaagcagcccatcaagccttccctggttgggcaggtcagtctcctggcgctcgcgctgcgctcctgtgggccctggccgcagcgctggagagaagaaaatccacattggcgagtcgactagagaggcagggagccgagctcaaggccgctgaggccgaggtcgagttgtccgctaggcgattgagagcgtggggagcgagagtgcaggctcagggacacaccctgcaggtcgctggtcttaggggacccgtgcttaggttaagagagcccctgggagtgttagctgtcgtttgcccagacgagtggccactcctggccttcgtaagcctgcttgcccctgctctggcctatggcaacactgtcgttatggtgccctcagccgcatgccctctcctcgctctggaggtgtgccaggatatggccactgtctttcctgcagggcttgctaacgtcgtaacaggtgatcgagaccacctaacacgctgtttggctcttcaccaggacgtccaggcgatgtggtacttcggctctgctcaaggctcccagttcgtggagtgggcttctgccggaaatctgaagccagtgtgggcatccagaggatgtccaagagcctgggaccaggaggccgaaggggctggaccagaactaggcctgcgagtggctagaacaaaagctctgtggcttcccatgggagattag

SEQ ID NO: 57970 - DNA, 2256 bp, Artificial Sequence
  derived and/or modified sequence
atggccgccaccagagccggccccagagccagagagatcttcaccagcctggagtacggccccgtgcccgagagccacgcctgcgccctggcctggctggacacccaggacagatgcctgggccactacgtgaacggcaagtggctgaagcccgagcacagaaacagcgtgccctgccaggaccccatcaccggcgagaacctggccagctgcctgcaggcccaggccgaggacgtggccgccgccgtggaggccgccagaatggccttcaagggctggagcgcccaccccggcgtggtgagagcccagcacctgaccagactggccgaggtgatccagaagcaccagagactgctgtggaccctggagagcctggtgaccggcagagccgtgagagaggtgagagacggcgacgtgcagctggcccagcagctgctgcactaccacgccatccaggccagcacccaggaggaggccctggccggctgggagcccatgggcgtgatcggcctgatcctgccccccaccttcagcttcctggagatgatgtggagaatctgccccgccctggccgtgggctgcaccgtggtggccctggtgccccccgccagccccgcccccctgctgctggcccagctggccggcgagctgggccccttccccggcatcctgaacgtgctgagcggccccgccagcctggtgcccatcctggccagccagcccggcatcagaaaggtggccttctgcggcgcccccgagggcggcctgagactgctgatccaggagagcgtgtgggacgaggccatgagaagactgcaggagagaatgggcagactgagaagcggcagaggcctggacggcgccgtggacatgggcgccagaggcgccgccgcctgcgacctggtgcagagattcgtgagagaggcccagagccagggcgcccaggtgttccaggccggcgacgtgcccagcgagagacccttctacccccccaccctggtgagcaacctgccccccgccagcccctgcgcccaggtggaggtgccctggcccgtggtggtggccagccccttcagaaccgccaaggaggccctgctggtggccaacggcacccccagaggcggcagcgccagcgtgtggagcgagagactgggccaggccctggagctgggctacggcctgcaggtgggcaccgtgtggatcaacgcccacggcctgagagaccccagcgtgcccaccggcggctgcaaggagagcggctgcagctggcacggcggccccgacggcctgtacgagtacctgagacccagcggcacccccgccagactgagctgcctgagcaagaacctgaactacgacaccttcggcctggccgtgcccagcaccctgcccgccggccccgagatcggccccagccccgcccccccctacggcctgttcgtgggcggcagattccaggcccccggcgccagaagcagcagacccatcagagacagcagcggcaacctgcacggctacgtggccgagggcggcgccaaggacatcagaggcgccgtggaggccgcccaccaggccttccccggctgggccggccagagccccggcgccagagccgccctgctgtgggccctggccgccgccctggagagaagaaagagcaccctggccagcagactggagagacagggcgccgagctgaaggccgccgaggccgaggtggagctgagcgccagaagactgagagcctggggcgccagagtgcaggcccagggccacaccctgcaggtggccggcctgagaggccccgtgctgagactgagagagcccctgggcgtgctggccgtggtgtgccccgacgagtggcccctgctggccttcgtgagcctgctggcccccgccctggcctacggcaacaccgtggtgatggtgcccagcgccgcctgccccctgctggccctggaggtgtgccaggacatggccaccgtgttccccgccggcctggccaacgtggtgaccggcgacagagaccacctgaccagatgcctggccctgcaccaggacgtgcaggccatgtggtacttcggcagcgcccagggcagccagttcgtggagtgggccagcgccggcaacctgaagcccgtgtgggccagcagaggctgccccagagcctgggaccaggaggccgagggcgccggccccgagctgggcctgagagtggccagaaccaaggccctgtggctgcccatgggcgactag

SEQ ID NO: 57971 - protein, 184 aa, Artificial Sequence
  derived and/or modified sequence
  misc_feature (1)..(1): Xaa can be any naturally occurring amino acid
XFIFLPRPGTSLGRIRKADKEKGKEKLEEDEAAAASTMAVSASLMPPIWDKTIPYDGESFHLEYMDLDEFLLENGIPASPTHLAHNLLLPVAELEGKESASSSTASPPSSSTAIFQPSETVSSTESSLEKERETPSPIDPNCVEVDVNFNPDPADLVLSSVPGGELFNPRKHKFAEEDLKPQPM

SEQ ID NO: 57972 - protein, 273 aa, Artificial Sequence
  derived and/or modified sequence
MDMPEVLKSLLEHSLPWPEKRTDKEKGKEKLEEDEAAAASTMAVSASLMPPIWDKTIPYDGESFHLEYMDLDEFLLENGIPASPTHLAHNLLLPVAELEGKESASSSTASPPSSSTAIFQPSETVSSTESSLEKERETPSPIDPNCVEVDVNFNPDPADLVLSSVPGGELFNPRKHKFAEEDLKPQPMIKKAKKVFVPDEQKDEKYWTRRKKNNVAAKRSRDARRLKENQITIRAAFLEKENTALRTEVAELRKEVGKCKTIVSKYETKYGPL

SEQ ID NO: 57973 - DNA, 555 bp, Artificial Sequence
  derived and/or modified sequence
tgattcatcttcctgcccagacccggcaccagcctgggcagaatcagaaaggccgacaaggagaagggcaaggagaagctggaggaggacgaggccgccgccgccagcaccatggccgtgagcgccagcctgatgccccccatctgggacaagaccatcccctacgacggcgagagcttccacctggagtacatggacctggacgagttcctgctggagaacggcatccccgccagccccacccacctggcccacaacctgctgctgcccgtggccgagctggagggcaaggagagcgccagcagcagcaccgccagcccccccagcagcagcaccgccatcttccagcccagcgagaccgtgagcagcaccgagagcagcctggagaaggagagagagacccccagccccatcgaccccaactgcgtggaggtggacgtgaacttcaaccccgaccccgccgacctggtgctgagcagcgtgcccggcggcgagctgttcaaccccagaaagcacaagttcgccgaggaggacctgaagccccagcccatgtag

SEQ ID NO: 57974 - DNA, 822 bp, Artificial Sequence
  derived and/or modified sequence
atggacatgcccgaggtgctgaagagcctgctggagcacagcctgccctggcccgagaagagaaccgacaaggagaagggcaaggagaagctggaggaggacgaggccgccgccgccagcaccatggccgtgagcgccagcctgatgccccccatctgggacaagaccatcccctacgacggcgagagcttccacctggagtacatggacctggacgagttcctgctggagaacggcatccccgccagccccacccacctggcccacaacctgctgctgcccgtggccgagctggagggcaaggagagcgccagcagcagcaccgccagcccccccagcagcagcaccgccatcttccagcccagcgagaccgtgagcagcaccgagagcagcctggagaaggagagagagacccccagccccatcgaccccaactgcgtggaggtggacgtgaacttcaaccccgaccccgccgacctggtgctgagcagcgtgcccggcggcgagctgttcaaccccagaaagcacaagttcgccgaggaggacctgaagccccagcccatgatcaagaaggccaagaaggtgttcgtgcccgacgagcagaaggacgagaagtactggaccagaagaaagaagaacaacgtggccgccaagagaagcagagacgccagaagactgaaggagaaccagatcaccatcagagccgccttcctggagaaggagaacaccgccctgagaaccgaggtggccgagctgagaaaggaggtgggcaagtgcaagaccatcgtgagcaagtacgagaccaagtacggccccctgtag

SEQ ID NO: 57975 - DNA, 555 bp, Artificial Sequence
  derived and/or modified sequence
tgatttatctttctgccaagacccggcacgtctctgggcaggatccgtaaagcagataaggagaaaggtaaagagaagctcgaagaggacgaggctgccgccgccagcacgatggcagtctctgcctcattgatgccaccgatttgggataaaaccatcccttacgacggcgagagcttccaccttgaatatatggacctcgacgagtttctgctagagaacgggatcccagcctcccctacacacttggcccataacctgcttctccccgttgctgagcttgagggtaaggaaagcgcatcaagtagtacagcctctccccccagctcctccactgccatcttccagccatccgagaccgtaagcagtacagagtcaagcctcgaaaaagaacgagagaccccatcaccaatcgaccccaactgtgtggaggttgatgtcaatttcaaccccgacccagccgacctggtgctgtcttccgtgccaggaggtgaactattcaatcctaggaagcataaatttgccgaagaagacctgaagccgcagcccatgtag

SEQ ID NO: 57976 - DNA, 822 bp, Artificial Sequence
  derived and/or modified sequence
atggacatgcctgaagtgttgaaatccttactggaacactccttgccatggcctgaaaaacgtactgataaagagaaaggcaaagaaaaacttgaagaagatgaagccgccgcggcttcaaccatggcggtgagcgctagtctgatgccgcctatttgggataaaaccatcccttatgacggcgaatcatttcacctcgagtacatggatctcgacgagttcttgttagaaaacggaattccagcctctcccactcacctggcccataacctgctgctccccgtcgctgaactcgaaggaaaagaatccgccagttcttcgactgcctccccgccctcaagttctaccgcgatttttcagccttccgagactgtgagctctactgagtcctctttggaaaaagagagagaaacaccgtctccaattgaccccaactgcgtcgaggtggatgtgaactttaatccagatcccgccgatctggttctgtcctcagttcctggtggagaactgtttaaccctcggaaacacaaattcgcagaggaagacttgaaaccacaacctatgattaagaaagcgaaaaaggtcttcgtgcctgacgagcagaaagatgagaaatattggactaggagaaagaagaataatgttgcagccaaacgcagtagagatgcccggcggctgaaggaaaaccagattaccatcagagctgcctttttagagaaggagaacacagcattgcgcacagaggtagccgagctgagaaaggaggttggcaaatgcaagactatcgtgtctaagtacgagactaaatatggccccctgtag

SEQ ID NO: 57977 - DNA, 822 bp, Artificial Sequence
  derived and/or modified sequence
atggacatgcccgaggtgctgaagtccctgctagagcacagcctgccctggcccgaaaagaggactgacaaagaaaagggtaaggaaaaactagaggaagatgaggctgctgccgcctctacaatggctgtttccgccagtttgatgccacctatctgggataaaacaattccttatgacggcgagtcatttcacctcgagtatatggacctggatgaatttttgctcgagaacggcattcccgccagtcctacacacctggcccacaatttgttactccctgtggcagagctggagggcaaggaatctgccagtagcagtacagcctctcccccctcctccagcactgctattttccaaccctctgaaaccgtttcctccacagagtcatctctggagaaggagagggaaactccgagtcccattgatccgaactgcgttgaggtcgatgtgaactttaaccccgaccccgcagacttggtgctctcttccgtccccggcggcgagttattcaaccccaggaaacataagtttgctgaagaagacctcaaaccccagccaatgataaaaaaagcgaaaaaggtgtttgtccctgatgagcagaaggatgaaaagtattggacgagaagaaaaaagaacaatgtggctgcaaagaggtcgagagatgccaggcggttaaaagaaaaccaaattacaatccgggccgctttcctcgaaaaggagaacacagctctaaggacggaagtcgccgaactgcgcaaagaggtcgggaagtgtaaaacgatagtaagcaaatatgaaaccaagtacggtcctctgtag

SEQ ID NO: 57978 - DNA, 555 bp, Artificial Sequence
  derived and/or modified sequence
tgattcatcttcctgccccggcccggcaccagcctgggccgcatcaggaaggctgacaaggagaagggcaaggagaagctggaggaggatgaggccgccgccgccagcaccatggctgtgtctgccagcctgatgccacccatctgggacaagaccatcccctatgatggagagagcttccacctggagtacatggacctggatgagttcctgctggagaatggcatcccagccagccccacccacctggcccacaacctgctgctgcctgtggccgagctggagggcaaggagagcgccagcagcagcacagccagcccccccagcagcagcacagccatcttccagcccagcgagaccgtgagcagcacagagagcagcctggagaaggagcgggagacccccagccccatcgaccccaactgtgtggaggtggatgtgaacttcaacccagaccctgctgacctggtgctgagctctgtgcctggaggagagctgttcaaccccaggaagcacaagtttgctgaggaggacctgaagccccagcccatgtag

SEQ ID NO: 57979 - DNA, 822 bp, Artificial Sequence
  derived and/or modified sequence
atggacatgcctgaggtgctgaagagcctgctggagcacagcctgccctggccagagaagaggacagacaaggagaagggcaaggagaagctggaggaggatgaggccgccgccgccagcaccatggctgtgtctgccagcctgatgccacccatctgggacaagaccatcccctatgatggagagagcttccacctggagtacatggacctggatgagttcctgctggagaatggcatcccagccagccccacccacctggcccacaacctgctgctgcctgtggccgagctggagggcaaggagagcgccagcagcagcacagccagcccccccagcagcagcacagccatcttccagcccagcgagaccgtgagcagcacagagagcagcctggagaaggagcgggagacccccagccccatcgaccccaactgtgtggaggtggatgtgaacttcaacccagaccctgctgacctggtgctgagctctgtgcctggaggagagctgttcaaccccaggaagcacaagtttgctgaggaggacctgaagccccagcccatgatcaagaaggccaagaaggtgtttgtgcctgatgagcagaaggatgagaagtactggaccaggaggaagaagaacaacgtggccgccaagaggagcagagatgcccggcggctgaaggagaaccagatcaccatccgggccgccttcctggagaaggaaaatacagccctgaggacagaggtggccgagctgaggaaggaggtgggcaagtgcaagaccatcgtgtccaaatatgagaccaagtatggccccctgtag

SEQ ID NO: 57980 - DNA, 555 bp, Artificial Sequence
  derived and/or modified sequence
tgattcatcttcctgccccggcccggcaccagcctgggccggatccgtaaagcagataaggagaagggcaaggaaaaattggaggaggacgaggcagcagctgcttcgaccatggctgtaagcgcttccctgatgccacccatttgggacaagacaatcccatacgacggggaatcatttcacctcgaatatatggacctcgacgaattcctcctcgaaaatggaattccagcttcacctacccacttagctcacaacctgcttctgcctgttgctgaactggagggtaaggaatccgcaagctcctcaacagcatctccccctagctcaagtacagccattttccaaccaagcgagaccgttagcagcacagagtccagcctggaaaaagagcgtgagacaccttcaccaatcgacccaaactgtgttgaggttgacgtcaatttcaatccagatcccgctgacttggttctcagcagtgtgccaggcggtgagctttttaatccaagaaagcataagttcgcagaggaggacctgaagcctcaacctatgtag

SEQ ID NO: 57981 - DNA, 822 bp, Artificial Sequence
  derived and/or modified sequence
atggacatgcccgaggtgctgaagagcctgctggagcacagcctgccctggccggaaaagaggactgataaggagaaaggcaaagagaaactcgaggaggacgaagccgccgcggccagcaccatggctgttagtgcctcgctgatgccccccatatgggataagaccattccctatgacggggagtcctttcatcttgaatacatggacctggacgagttccttctggaaaatggaattcccgccagccccacacacttggctcacaacctgctccttccagtcgctgagttggagggaaaagagtccgcctctagctcgacagcttctccgccttcttcttctaccgcaatatttcagccaagcgaaactgtgagcagtacagagtccagcctagagaaggaaagggaaactccatcacccatagatcccaactgtgttgaagtggatgtgaacttcaacccagatcctgccgatcttgtcctgtccagtgtgcccggaggcgagctctttaatccacgcaagcacaaattcgccgaagaagacctgaagccccagcccatgatcaagaaagcaaagaaagtctttgtgccagacgaacaaaaagatgagaaatactggacacgtcggaagaagaataacgtggctgcaaagaggtccagggatgcccggcgcttaaaggagaaccagataaccattagagcagcatttctggagaaggagaacacagctttacggactgaggtcgccgagctccggaaagaagtcggaaaatgcaagacaattgtctccaaatatgagacgaagtatgggccactctag

SEQ ID NO: 57982 - DNA, 822 bp, Artificial Sequence
  derived and/or modified sequence
atggacatgcccgaggtgctgaagagcctgctggagcacagcctgccttggcctgagaagcggacggacaaggaaaaaggcaaagaaaaattggaggaagacgaggctgcggccgcatcaacaatggcagtgtcagcatctctgatgcctccaatttgggacaaaactattccatatgatggggaatccttccatctggaatacatggatctggatgagtttttactagaaaacggcatcccagcttctccgacgcacctcgctcataacctactcttacccgtggctgaactggaggggaaagagtcggccagcagctcaactgcctctcctccatcatcgtccacagccatcttccaaccttcggagaccgtgtccagcactgaatcttccctggagaaggagagagagaccccttcccctatcgacccgaactgcgtggaggtggatgtgaattttaaccccgaccccgccgatttggtcttatcttccgtcccaggcggggaactgttcaaccctcggaagcacaaattcgcagaagaggacctcaagccccagcccatgattaaaaaagcaaagaaagtttttgttcccgacgaacagaaagacgagaagtattggaccagacgtaagaagaataatgttgcagcaaaacgcagtagagatgcccgaagattgaaagaaaaccagattacaatccgggctgcattcttggagaaggagaatacagcgttgcggacggaggtggcagagttgcggaaggaggtgggcaagtgtaagacaattgtttccaagtatgagaccaagtatggccccttatag

SEQ ID NO: 57983 - DNA, 555 bp, Artificial Sequence
  derived and/or modified sequence
taatttatattcctgcctcggcctggcacctcacttggcagaattcggaaagctgacaaggaaaagggcaaggagaagctggaggaggatgaggcagcggctgcttcgaccatggctgtttcagcctccctgatgccaccaatttgggacaaaactattccttatgatggagaatccttccacctagagtacatggatcttgacgaatttctgctcgaaaacgggataccagcttcccctacccacttggcacacaatctgcttctgcccgtggccgagttagaaggcaaagaaagcgcttcgtcgagtactgcttcccctcccagctcctccaccgccattttccaaccatccgagactgtaagtagcacggaatcctccctggaaaaagagcgtgagactccttccccaattgatccaaattgcgtagaagtcgatgttaacttcaatcccgatcctgccgaccttgtcctgtcgagcgtgccgggaggagaactgttcaatcctagaaaacacaagttcgcagaggaggacctcaagccgcagcccatgtag

SEQ ID NO: 57984 - DNA, 822 bp, Artificial Sequence
  derived and/or modified sequence
atggatatgccagaggttctgaaatctctgcttgaacacagcctgccttggcccgaaaagcggaccgataaggaaaaaggcaaggaaaaactggaagaggatgaagccgcagcagcctccacgatggccgtgagcgcgtcactgatgcccccaatctgggataagaccatcccctatgatggcgaatctttccatttggagtacatggatctagacgaattccttctggagaatgggatccctgcttccccaacccacttggcacacaacctcctgttaccagtggcggagttggagggtaaggagtccgcttctagcagcactgctagtccccctagcagctcaacagctatttttcagccgagtgagacagtcagcagtacagagtcaagtttagaaaaggagagagaaacccctagccccatcgaccccaattgcgtcgaggtcgacgtgaacttcaaccctgaccctgctgatcttgtcctcagtagcgttcctggtggagagctgtttaacccacgcaaacataaattcgccgaggaagatctgaagcctcagcccatgattaagaaagctaaaaaggtatttgtgcccgatgaacagaaagacgaaaaatactggactcgcagaaagaagaataacgtcgctgcgaagagaagcagagacgcgaggagactcaaggagaatcaaatcacaatccgcgctgctttcctggagaaagagaacaccgccctgagaaccgaggttgcagagctgcgaaaagaagttgggaaatgtaagaccatagtctctaaatacgaaacaaagtatgggccattatag

SEQ ID NO: 57985 - DNA, 822 bp, Artificial Sequence
  derived and/or modified sequence
atggatatgccggaggtgttgaaatcactgttggagcactccctgccgtggcctgagaaaaggacagacaaagagaagggcaaagaaaaattggaggaagacgaggccgctgccgctagcacaatggctgtgagtgcctccttaatgcctccaatttgggacaagacaattccttacgatggggaaagtttccacttagagtatatggatttggacgagtttctgcttgaaaatggaataccagcttcccccacccacttagcccacaatctgttgcttcccgtggccgagttggagggcaaagagtccgccagttcttccaccgccagcccacccagtagcagcacggctatcttccagccctccgaaacggtgagctcgacggagtccagtctagagaaggaacgggagaccccgtctcctatcgatccgaactgcgtggaagtggatgtgaatttcaacccggaccctgcggacctggtgctctcctctgtaccaggcggtgagctttttaaccccagaaaacacaagttcgcggaggaggatctgaagccccagcctatgattaagaaggcaaagaaggtgttcgttcccgatgagcaaaaggacgagaaatactggacccgtcgaaagaagaacaatgtcgctgccaagaggtctcgagatgcccgaagacttaaagaaaaccagatcacaatcagggcggctttcttggagaaggagaacaccgctttgcggactgaggttgctgagctccgcaaagaggtaggaaagtgcaagaccattgtttcaaagtacgagacgaagtatgggccactgtag

SEQ ID NO: 57986 - DNA, 551 bp, Artificial Sequence
  derived and/or modified sequence
gcttcatctttttgcctaggccaggaacgtcactggggcgtatacggaaagcagataaggaaaaggggaaggaaaagctggaggaggacgaggccgcagccgccagcaccatggctgtctcagcctccctcatgccacccatctgggacaagaccatcccatatgatggcgaatctttccacctggagtacatggacctggatgagttcctgctggagaatggcatccccgccagccccacccacctggcccacaacctgctgctgcctgtagcagagctagaagggaaggagtctgccagctcttccacagcatccccaccatcctcctccactgccatctttcagccctctgaaaccgtgtccagcacagaatcttccctggagaaggagagggagactcccagtcccatcgaccccaattgtgtggaagtggatgtgaacttcaatccggaccccgccgacctggtgctctccagtgtgccaggcggggagctcttcaaccctcggaagcacaagtttgctgaggaggacctgaagccccagcctatg

SEQ ID NO: 57987 - DNA, 2810 bp, Artificial Sequence
  derived and/or modified sequence
agctgcctctgaactccctggagcaagcacctcctgctgggctgtgtgagctgcgactggttctcagtggcccctgccatggacatgcctgaggtcctcaagtccctgctggagcactctctgccttggccagagaagagaacagataaggaaaaggggaaggaaaagctggaggaggacgaggccgcagccgccagcaccatggctgtctcagcctccctcatgccacccatctgggacaagaccatcccatatgatggcgaatctttccacctggagtacatggacctggatgagttcctgctggagaatggcatccccgccagccccacccacctggcccacaacctgctgctgcctgtagcagagctagaagggaaggagtctgccagctcttccacagcatccccaccatcctcctccactgccatctttcagccctctgaaaccgtgtccagcacagaatcttccctggagaaggagagggagactcccagtcccatcgaccccaattgtgtggaagtggatgtgaacttcaatccggaccccgccgacctggtgctctccagtgtgccaggcggggagctcttcaaccctcggaagcacaagtttgctgaggaggacctgaagccccagcctatgatcaaaaaggccaagaaggtctttgtccccgacgagcagaaggatgaaaagtactggacaagacgcaagaagaacaacgtggcagctaaacggtcacgggatgcccggcgcctgaaagagaatcagatcaccatccgggcagccttcctggagaaggagaacacagccctgcggacggaggtggccgagctacgcaaggaggtgggcaagtgcaagaccatcgtgtccaagtatgagaccaaatacgggcccttgtaacccgtgccccccgcccgggcggggtactgcctgcacctcagacctctgcctgggggctccctgtaacccctcacacgcgtggagacttatgactcgtcgtgggcgcatggcggcgcacctgctgcaggagcggccacgtctcagcttcattataccatggcctgcgcacgtggcgacgtccctgaggggccagtctcctcactggtggggaacgcaagagaatctgcgtagatgggtgactcagccttagtttctattcttggatgtcccagttgaatcagaaggggacctctggagtacacacctctctcctgggcgctcagggtccctggactctccctcagtctccagcctgggctgccgagggctatctctgcagaatgagttgtgatcattgtcaccctatgtcttctcaggtagcagggcgcgtttccacttaaggtgtgtctgtcacgcacctcattctccccagacagtctttgagtaacatctgttcccatcttccttggaagcaggacacaccagctcctccgtcagtgtctgcatgggtagcaggctgcaggagtggggtctctgcacagcctgggatggggcttggggctggggcctgcagcagaagtgtgcccagcgtttctcggctcccgcaccccttttcccttatggctctgaggccatcggctgtctctgcatttcattggctgtggaggagagactcctaggatggctgctgtctgagccatgagtgccagggctgagagaggcctcttcatttcctctccaggctactcagaggccatgtgaagctcgtttgtcccactagaccaggcctctgggcctgctctttctttccacccaatgtccagtcttggatcatagatttaaaaggaaaacccctcttatctaggaggctttaacttcctggaccccaggattcaccttcctagtggtgtttagaaaatgcctccacagcccccttccaccatgggcatgagagctggggtgtgtttcttgagaagctcccttttttcttgctctgctcaccggtgtggcctgggctggagtgcactctccctgggggcagctggggcctcgcaattcttgcttcaggatctctcccatgcgagctgcccggagggtgtcagcagggcaagacacctagtctagagtcaccaaggtcacagtgccactttcacgggatagcaggctcttgggacttttacacaggcctagggtcccctcagtcttggtcccaggagatgggggccactcgtgaggctggccatgctgtggcttctcacagctgtggtctcccctgcctcacaacgactcctttctcttgtgtggcgggactcgcccttttgctgtgctcagaagattcactgaggaaactcatggaagcctctgctcatttgggtcactgggacacccctgagatgggtgtgtttatttgctcagggcgggcagcctatggtgaagaggagacagaggcgatgggcgtgcttcgtcctccgtaacactggctttatttaccgtggtggttcagagtcccaggccctgacctctaaagacttttcataacagacgttaagaccaagccgtggacctcaccccaggggaatgccacggccctttggggacctgcacacccacctctccgggggacttgacaaggggccctgaggccaagggaggtcactcctccctccaggcccctgacttttactttgtggttctctaaaaaccatgtacacactttcactctattgtaaccacacagaagcagaccgtagcccattggccttatgtgcgtgtgtgcgtgcgagtgtgtcactgctggtgggccggagtgatgtggtgggagggaagccgggaatgtatccttttcagacaaaattaaatattttgaaatg

SEQ ID NO: 57988 - DNA, 4386 bp, Artificial Sequence
  derived and/or modified sequence
agctggcaggtggccgagccgggggtggacgggcgggctgggactggtgctggccattggctgcctcaaggctcccaccccgcctgcctccctagcctgcggctggcggcccctgcctctccagctgcctctgaactccctggagcaagcacctcctgctgggctgtgtgagctgcgactggttctcagtggcccctgccatggacatgcctgaggtcctcaagtccctgctggagcactctctgccttggccagagaagagaacagataaggaaaaggggaaggaaaagctggaggaggacgaggccgcagccgccagcaccatggctgtctcagcctccctcatgccacccatctgggacaagaccatcccatatgatggcgaatctttccacctggagtacatggacctggatgagttcctgctggagaatggcatccccgccagccccacccacctggcccacaacctgctgctgcctgtagcagagctagaagggaaggagtctgccagctcttccacagcatccccaccatcctcctccactgccatctttcagccctctgaaaccgtgtccagcacagaatcttccctggagaaggagagggagactcccagtcccatcgaccccaattgtgtggaagtggatgtgaacttcaatccggaccccgccgacctggtgctctccagtgtgccaggcggggagctcttcaaccctcggaagcacaagtttgctgaggaggacctgaagccccagcctatgatcaaaaaggccaagaaggtctttgtccccgacgagcagaaggatgaaaagtactggacaagacgcaagaagaacaacgtggcagctaaacggtcacgggatgcccggcgcctgaaagagaatcagatcaccatccgggcagccttcctggagaaggagaacacagccctgcggacggaggtggccgagctacgcaaggaggtgggcaagtgcaagaccatcgtgtccaagtatgagaccaaatacgggcccttgtaacccgtgccccccgcccgggcggggtactgcctgcacctcagacctctgcctgggggctccctgtaacccctcacacgcgtggagacttatgactcgtcgtgggcgcatggcggcgcacctgctgcaggagcggccacgtctcagcttcattataccatggcctgcgcacgtggcgacgtccctgaggggccagtctcctcactggtggggaacgcaagagaatctgcgtagatgggtgactcagccttagtttctattcttggatgtcccagttgaatcagaaggggacctctggagtacacacctctctcctgggcgctcagggtccctggactctccctcagtctccagcctgggctgccgagggctatctctgcagaatgagttgtgatcattgtcaccctatgtcttctcaggtagcagggcgcgtttccacttaaggtgtgtctgtcacgcacctcattctccccagacagtctttgagtaacatctgttcccatcttccttggaagcaggacacaccagctcctccgtcagtgtctgcatgggtagcaggctgcaggagtggggtctctgcacagcctgggatggggcttggggctggggcctgcagcagaagtgtgcccagcgtttctcggctcccgcaccccttttcccttatggctctgaggccatcggctgtctctgcatttcattggctgtggaggagagactcctaggatggctgctgtctgagccatgagtgccagggctgagagaggcctcttcatttcctctccaggctactcagaggccatgtgaagctcgtttgtcccactagaccaggcctctgggcctgctctttctttccacccaatgtccagtcttggatcatagatttaaaaggaaaacccctcttatctaggaggctttaacttcctggaccccaggattcaccttcctagtggtgtttagaaaatgcctccacagcccccttccaccatgggcatgagagctggggtgtgtttcttgagaagctcccttttttcttgctctgctcaccggtgtggcctgggctggagtgcactctccctgggggcagctggggcctcgcaattcttgcttcaggatctctcccatgcgagctgcccggagggtgtcagcagggcaagacacctagtctagagtcaccaaggtcacagtgccactttcacgggatagcaggctcttgggacttttacacaggcctagggtcccctcagtcttggtcccaggagatgggggccactcgtgaggctggccatgctgtggcttctcacagctgtggtctcccctgcctcacaacgactcctttctcttgtgtggcgggactcgcccttttgctgtgctcagaagattcactgaggaaactcatggaagcctctgctcatttgggtcactgggacacccctgagatgggtgtgtttatttgctcagggcgggcagcctatggtgaagaggagacagaggcgatgggcgtgcttcgtcctccgtaacactggctttatttaccgtggtggttcagagtcccaggccctgacctctaaagacttttcataacagacgttaagaccaagccgtggacctcaccccaggggaatgccacggccctttggggacctgcacacccacctctccgggggacttgacaaggggccctgaggccaagggaggtcactcctccctccaggcccctgacttttactttgtggttctctaaaaaccatgtacacactttcactctattgtaaccacacagggcaggcgcatccagcatgtcagtgtcctgccccgggcagctctccctcccgggcacgctccctctggcctggtggatcaccaagagggcggttctcattttgttattagtggaagagccttgagcttaaaagctcttcattttctttgccggaaagtatatggtttgtgtttttgcagttttatttttttaaggatggacactaaatctctggtgtccatgttccgagcccggtggctgggatggtggctcgatgtgtctcctctttatcccgccctctgcctgtttggtgccctcccttctttcccccaggcagtgggtatcgggttctttcccaaagtgcttacttggaaagagtgtggctgctggactcttttcgaaatgcccctctgagtcaggagcctggtggggacaagatggaggatgtccacagaggctgacctgtgggggaaaagaagtgctcaggtaaggttgtctcctctcctgtcctaaaaaaatccatgcttgcaggagagggttggtgcctgctcagtttctgtcgagggaatgggagtctcctcggctccctcctgggccctctgcttcttggaggccgaccgctggagactgcggctcctgtgcttggatctttgacatctgtcagtcactggaggctagagaagttgactttaccttggctttctgtgggttcccgatgggcttggaagtgccgtctacttcctaagcatcctgtctaaagctttgtggcaccctcagtgcaacctcagaacagacaaatcatgaatgagctggaactttgcaagaatattcatattataaatgtctcatctgatggaggaacgtgtgcatttagagagagggagagttttcaaggtttatggcaactttgtggaggacctgggtaactcttacccttggccaaaggaagaggttttcctgtctggcttctgaggttggagggggcacttagcagtgaaccttaagtctgggtacatgtaaccctgctgaggggctgtgcaggccgctcctacggtcctttggcctgaggcagggcgggaggcatgcaagccagtgggggaaaacccctctgaagctgggcagccctctacctgggccccgggagccgtgctccttggaacgcaaagggccgaggagcatctggttttcatggcaaagctctactccagagctcctttaacatctgctaattaagtgcaataaatttttctagaaaatggcaaagatgacttccaggtggatattgctctcttacggtgttggggatgccagaacaccacttggttttatttttctaagtgcatgtgatgtgatagagtgtgtggggctctgtgtccttccctgggagctggcattccagcgggcccctctctttacctttgttgggggaaggaggcaagagagaaattccttcttcccagccagagagggcagaagcagaccgtagcccattggccttatgtgcgtgtgtgcgtgcgagtgtgtcactgctggtgggccggagtgatgtggtgggagggaagccgggaatgtatccttttcagacaaaattaaatattttgaaatgag

SEQ ID NO: 57989 - protein, 277 aa, Artificial Sequence
  derived and/or modified sequence
MAHGIPSQGKVTITVDEYSSNPTQAFTHYNINQSRFQPPHVHMVDPIPYDTPKPAGHTRFVCISDTHSRTDGIQMPYGDILLHTGDFTELGLPSEVKKFNDWLGNLPYEYKIVIAGNHELTFDKEFMADLVKQDYYRFPSVSKLKPEDFDNVQSLLTNSIYLQDSEVTVKGFRIYGAPWTPWFNGWGFNLPRGQSLLDKWNLIPEGIDILMTHGPPLGFRDWVPKELQRVGCVELLNTVQRRVRPKLHVFGGIHEVNPVSISKALRTKICSLPSKTS

SEQ ID NO: 57990 - protein, 43 aa, Artificial Sequence
  derived and/or modified sequence
MAHGIPSQGKVTITVDEYSSNPTQAFTHYNINQSRFQPPHVHM

SEQ ID NO: 57991 - DNA, 834 bp, Artificial Sequence
  derived and/or modified sequence
atggcgcacggaattccctcccaggggaaggtgacaatcacggttgatgagtatagctcaaatcccactcaggctttcacacattacaatattaatcagagcaggttccagcctccacacgtccacatggtcgaccccatcccctatgatacccccaagccggcaggacatacacgatttgtatgtattagcgacactcacagccgcacagacggaatccaaatgccttacggtgatatcctcctccataccggggacttcacagagctcggcttgccatcagaggtaaagaagttcaatgattggttaggcaacctgccttacgaatacaagattgtgatagccggcaatcatgagctcacctttgacaaggaatttatggccgacctggtgaagcaagattattatcgatttcctagcgtttcaaagctgaagcctgaagatttcgataatgtacagagcttgctgactaacagcatttatctgcaggattccgaggtcacagttaaggggtttagaatctacggagccccctggacaccgtggttcaacggatggggatttaatctacctcggggccagtcacttcttgataaatggaaccttatccccgagggcatcgacatcctgatgacgcacgggccacccctgggctttcgagattgggtgcctaaggaacttcagagagtcgggtgtgtcgagttgctgaatacagtccagcgtagagtgcgacctaaactccacgtattcggggggatccacgaagtaaaccccgtaagcatttctaaagcgctccgaaccaaaatttgcagcctgccttccaagacgtcatag

SEQ ID NO: 57992 - DNA, 834 bp, Artificial Sequence
  derived and/or modified sequence
atggcccacggcatccccagccagggcaaggtgaccatcaccgtggatgagtacagcagcaaccccacccaggccttcacccactacaacatcaaccagagccgcttccagcccccccacgtgcacatggtggaccccatcccctatgacacccccaagccagctggccacaccaggtttgtgtgcatcagtgacacccacagcaggacagatggcatccagatgccctatggagacatcctgctgcacactggagacttcacagagctgggcctgcccagcgaggtgaagaagttcaatgactggctgggcaacctgccctatgagtacaagatcgtgattgctggcaaccacgagctgacctttgacaaggagttcatggctgacctggtgaagcaggactactaccgcttccccagcgtgtccaagctgaagccagaagattttgacaacgtgcagagcctgctgaccaacagcatctacctgcaggacagcgaggtgacagtgaagggcttccgcatctatggagccccctggaccccctggttcaacggctggggcttcaacctgccccggggccagagcctgctggacaagtggaacctgatccctgagggcatcgacatcctgatgacccacggcccccccctgggcttccgggactgggtgcccaaggagctgcagagggtgggctgtgtggagctgctgaacacagtgcagaggagagtgcggcccaagctgcacgtgtttggaggcatccacgaggtgaaccctgtgtccatcagcaaggccctgcggaccaagatctgcagcctgcccagcaagaccagctag

SEQ ID NO: 57993 - DNA, 5591 bp, Artificial Sequence
  derived and/or modified sequence
cccagatcgaggctgctcgggtcctttctccccccgcctccctctagcgccgcgccccctggcccccagccccagcctgcggcgggacctccggggtcgaaggttctggcccgctcgcgcccctcgccgcccccgcgcgcccccagcgctcctccagccggctcgggccgctcggctatggatcgcctgctcgccgggcgctgaaggcatccccgggatccggagcgcagcccgggaaagaaatgcacagcggtattgatgagtagatccttggattcagaggttggctgaaacgcaccatgcctgcttccatcttttgctctgtaaagttgtgaattgctcatgcctatagggaggaaggatggcacatgggattccttctcaaggcaaagttaccataacggtggatgagtacagctcaaaccccacccaggcattcacgcactacaacatcaaccagagcagattccagcctccacatgtacatatggtcgaccccatcccatatgacactccaaaaccagcgggccacacgcggtttgtctgcatctcagacacacactccagaacagatggtatccagatgccttatggggacatccttctccacacaggcgatttcaccgagctgggactgccctcagaggttaagaagtttaatgactggttaggaaacctgccatatgaatataaaatagtgattgctgggaatcatgaactgacatttgataaggaattcatggcagaccttgttaaacaggactactaccgtttcccctctgtgtccaaattgaaaccagaggactttgacaatgttcagtccctcctgacaaacagtatttacttacaagattcggaggtaacagtgaagggattcaggatatacggtgcaccttggaccccgtggtttaatggatggggctttaacctacccagaggtcagtctctgctggacaagtggaacctcatccctgagggcattgacatactcatgacacatggacctcctctaggttttcgagactgggttccaaaggagcttcaaagagtgggctgtgtggagctgttaaacacggttcagaggcgagtccggcccaagctccatgtgtttggtggaatccatgaagtaaaccctgtgagcatctccaaggcactgaggacaaaaatatgttctctgccttcaaaaacttcctagtctagaggaaactggcatagacacaattaattgatgatctgatgaattagcattgtgtgagctacaatcctggcatgaatcaagaactagagaggcacacaggaaggaaggaagatgcctctccttggtgaagacaaagaaggcatgaggaggaggcgacagggaagctcacctggtggacaacaggaaagactgcggaggagggctctgctggaagaggaaacagactggggaggtggggccagtgcataaagggccactgcaggaaggggttgtaggagaaaaggaaagacagatcagtcactgatgaccccctccaccccaggtctgcagacagagctgattccttctctaagcctcggcatcccctaccaacagtccctcctgctccttctctcccaagtcctctaaacagcttcatgcccaaaccacaaagagaacattctcaggcctaaggcaggccttcccagcacagaatgtttggagccctctgtgggagagcggctggcccccttaactgtcccccttccctccgggagccaaggcaggcactgtgcacctgcccctgaattgtgtgcggcagttgccggcctggagctgagtgacacagcaggtgcctccagcctgaagacaattccatatttcaatggagcgtcgccaccaaagcttattatctagggcaataaagtttaggattagggggattcaggatgattgtgtgattctccacaaagcttatcttctaatagaccagctgctttattaggccgcccccacccgcaccaggcccttcccaaagcatcccaagtcccaggcagccgacgggggccttgaaggcggcagtggtagacagctgggggtatcatatcaccctcagtctccatctgcgattattaaattacgggcggcttccagctgggcacaccccagctcccaccttcctcctacaaagccagcatcatcgtcaggcatctgccaaggacacgatgtggctgcctctcccctgctgatccctactgttgaactctaaaagggccaggtctgggtatttacttgctattagggctgtcactgtcacagtgtggaatgcagtggagtggaggcctggagagagggggggaccatggaaatttctgttgcaaatggggctttgctgggactgttcactataaacaaaaaaagaagatggaatcatgcaccacagaacctcaaagaagctggcatgcttaccaagctcccacatatttctcccaaaatgaaattcattaacgttgagtgttctagggaccacctccacatgctccctgatcccattgctccgttccttttctgatgggagcagagcatgggatggtgtctctccaaccccgtgtggtcagcagcactgaggctactctcgtttcctatccctccctgacagtctcctttatcctcagcccctgacagactatctgttcagagtaggaatttatcaataagtactgataagcatgctgaaaggaatatgggggactgggaatatgcctgaaacataatgaatgtttcaaagaaatgaaacgttctgaaaatggaattttcaaagattctgacaagcacacagcatctgcttgcagattttaggaaaacttagtcatagaattattcagagttcacatttcagccatggggatgttgtgtgcctgttgacagcagaggtccctgtagacgtttgttttttactgtgtctatgtgtgattcactaatgagagagtggcttagatgctcagagtaattaattgtagtattgagataatagtggctttgaaatccagctgtgcttatatgcgtgcacgctgtgcagttagatgctcccaggttcagatctgcttccatcactactaactatgtggccttgttttctgatctgcaagccatggattgtattgcttactttgcgggactgtggtaaacgttaggcatatatgaggcaagtgcaatgcccaacatttggcagatgcttaataagtgttggctattattattactactactactactattgcttttgctattgctattatgtgtgacctgtataataatcctactaatatgagtgaaggcaagaatcatggactatgcacccagcataatcaggagggtttgactgttgtgaatgaattcaagggcaggacaagcagcgacaagagttactgaagttcatctgatttgagttctgttcattcatttatttgggatccaaattctgaaccccagctctgtgctagacactgttctaggtgctgggaaaacagtcatgtgttagtctgtttttgctgccataaaggaatccctgagactgggtattttataaagaaaagaggtttatttaaatcacagttctgcaagcctaacacctggtggaagctgccaaggcttacagcttataccctctcaagcagcaccctaatctataccttgagccaagactggaattggagctgccatgatgcaggaagcagtgtcccaaggatgtgcagagcagtggggtcctgaatgtggccccccaaaccattcttttctcctaggcctctaggcctgtgatgggggggtggccttgaaaatctctgaaatgccttcaaggcctttttcccattgtcttggttattagcacttggctcccctttagccatgctaatctgtctagcaagtggttgctccacagcctgctcatatttcactcctgaaaatgttctttccttctccaccacacaaccagtttgtgaattttccaaacttttatgctctgcttcccttttaattatcaatttcccagcctcagatattcctttatagtaatgcaaatggactaacagaagcaatgaataagaaggggtcctggcccctctacaactcatcttctattgagaaagaaagaagaaaaaatgaaaataagttaaaaaaactcaaattttgataaaccctatgaagaaaataagaaatgggatagaagttagctggcatggcagggtggagtgggtgagtgacattaaggagggtgacaacagagaaactttctgataaaaaacccagtaagtaaaggtctaagtgatgtggatgaggcagccacttgaagacctgggacaaaagtgttcaggcagagaatatagcaggtacagagctttttgtataagaaggtagcaaaaaggccagtatagccagagaacagaggaggtaaggagaaagataggggatgaggcaggtgctaactcatcaacatccttgcaggccttgatgagagttaagatttcattataattgcaataagaagacagtggaaggttttttggcgggggtgggggtggtcaatgacatgattggattgatatgttggaaaagcccatctggcgactgtgttcagtaacagtgtgcttgcatgaagatccctcacagcagcagacaacacaaatgccccctcccacccatcatgaaaatttggaaagccaagccaataggaaactgaagctacaaagacccagcccctagaaagcaatataaacaagaccagaaaaagcatgtgttcaggacaagttcacattgaagtaaaaccatattgacattgattgcattccctacctgcttaggggttttgcttcacctaaactagtaccttgagaatctgtaaaagcttacaatttgagaaaagcaagagatgacacctgattatcctttgaattggcttccatgtctgtggctgttttccctaagttcctgtcccttacacacacgttacaaaactttgtctcaattctttgcttttaaaggatttgactttaacaaattcacattgggtacttgcttagtaggaaaggaaataatgactctcaccccctatgttataaaacttttaggagtattacacacaggcacatacagggcacactggtatggcttgtcattttgtgacaaattcttgtcagtttgtggtctggtggaaagcatatggaattagcaatcaagaaaggtgagatttagttctggctctgcttctaactagcaatgcaatcttggacaagagatttattctttcaagtctcagtttcatcttgtcatatggacatagagtgatacttccttttaaaagaacctgggtatcctggccaggcgcggtggctcatgcctcccagcactttgggaggccgaggcgggtggatcacaaggtcaggagatcgagaccatcctggccaacatggtgaaaccccgtctctactaaaaatacaaaaattagttgggcgtggtagtcccagctactcgggagactgaggcaggagaatttcttgaaccctggaggcggaggtagcagtgagccccgaggtcgtgccactgaactccagcctggcaacagagcgagactctgtct

SEQ ID NO: 57994 - DNA, 834 bp, Artificial Sequence
  derived and/or modified sequence
atggcccacggcatccccagccagggcaaggtgaccatcaccgtggatgagtatagttcaaacccaacccaggcctttactcactacaacataaaccagagccggttccagcctccccatgtgcatatggtagaccccattccttacgatacaccaaagcctgctggtcataccaggtttgtgtgcatcagcgacacccactctcgaacggacggaatacagatgccttatggcgacattttgctgcatacaggtgatttcacagagcttggcctgcctagtgaagttaaaaagttcaacgattggctcggaaatttgccctatgagtacaaaatagtgatcgccggaaatcatgagcttacctttgataaagagtttatggcagatctagtgaagcaggattactataggttcccttctgtatcgaaacttaaacctgaggacttcgacaatgtgcagtctctcctgaccaattccatctatcttcaggattccgaagtgacagtgaaaggttttcgcatttacggagctccatggacgccctggtttaacggctggggttttaatttacctcgtggacaatctctgttagacaagtggaacctcatccctgagggaatcgatatcctgatgactcacggcccccccttaggctttcgggattgggttcctaaggagctacaacgcgtgggctgtgttgagttactgaacaccgtacagcgcagggtgagacccaagctacacgtctttggggggatccatgaggttaatcctgtgagcatttcaaaagcgttgcggacaaagatctgctcactaccatccaaaacatcatag

SEQ ID NO: 57995 - DNA, 834 bp, Artificial Sequence
  derived and/or modified sequence
atggctcacggtatcccaagtcagggtaaggtcacaatcacagttgacgaatatagtagcaatccaacacaagcatttactcactacaatatcaatcaaagccgcttccaaccaccacatgtgcatatggtggacccaattccctacgatacacccaagccagcaggacacactcggttcgtgtgcatctcagacacccattcacgaactgatggaatccagatgccttacggagacattttgctgcatacaggcgattttaccgagctcggccttccaagtgaggtgaagaagtttaatgattggctgggtaacctcccctatgaatacaaaatcgtgatagctgggaatcacgagttgacattcgacaaggaattcatggcggatctcgtgaaacaggattattaccgcttcccaagtgttagcaaattgaagccagaggactttgacaacgttcagtctttgctgacaaactcgatttacctgcaggatagtgaagtcacagtgaagggttttcggatttatggggctccatggacgccctggttcaacggctggggattcaacttaccacgcggtcagtctttgctagataagtggaatctgattccagaggggatcgacattttgatgactcacggccctccgcttggttttagagattgggtgcccaaggaacttcaaagagtcggctgtgtggagctcctcaacactgttcagagaagggtccgacctaagttacacgtgttcggcggtattcatgaggttaatccagtatcaatctctaaggctttgcgtacaaaaatttgtagcttaccttcaaagactagttag

SEQ ID NO: 57996 - DNA, 834 bp, Artificial Sequence
  derived and/or modified sequence
atggcccacggcatccccagccagggcaaggtgaccatcaccgtggacgagtacagcagcaaccccacccaggccttcacccactacaacatcaaccagagcagattccagcccccccacgtgcacatggtggaccccatcccctacgacacccccaagcccgccggccacaccagattcgtgtgcatcagcgacacccacagcagaaccgacggcatccagatgccctacggcgacatcctgctgcacaccggcgacttcaccgagctgggcctgcccagcgaggtgaagaagttcaacgactggctgggcaacctgccctacgagtacaagatcgtgatcgccggcaaccacgagctgaccttcgacaaggagttcatggccgacctggtgaagcaggactactacagattccccagcgtgagcaagctgaagcccgaggacttcgacaacgtgcagagcctgctgaccaacagcatctacctgcaggacagcgaggtgaccgtgaagggcttcagaatctacggcgccccctggaccccctggttcaacggctggggcttcaacctgcccagaggccagagcctgctggacaagtggaacctgatccccgagggcatcgacatcctgatgacccacggcccccccctgggcttcagagactgggtgcccaaggagctgcagagagtgggctgcgtggagctgctgaacaccgtgcagagaagagtgagacccaagctgcacgtgttcggcggcatccacgaggtgaaccccgtgagcatcagcaaggccctgagaaccaagatctgcagcctgcccagcaagaccagctag

SEQ ID NO: 57997 - protein, 471 aa, Artificial Sequence
  derived and/or modified sequence
MQSNKTFNLEKQNHTPRKHHQHHHQQQHHQQQQQQPPPPPIPANGQQASSQNEGLTIDLKNFRKPGEKTFTQRSRLFVGNLPPDITEEEMRKLFEKYGKAGEVFIHKDKGFGFIRLETRTLAEIAKVELDNMPLRGKQLRVRFACHSASLTVRNLPQYVSNELLEEAFSVFGQVERAVVIVDDRGRPSGKGIVEFSGKPAARKALDRCSEGSFLLTTFPRPVTVEPMDQLDDEEGLPEKLVIKNQQFHKEREQPPRFAQPGSFEYEYAMRWKALIEMEKQQQDQVDRNIKEAREKLEMEMEAARHEHQVMLMRQDLMRRQEELRRMEELHNQEVQKRKQLELRQEEERRRREEEMRRQQEEMMRRQQEGFKGTFPDAREQEIRMGQMAMGGAMGINNRGAMPPAPVPAGTPAPPGPATMMPDGTLGLTPPTTERFGQAATMEGIGAIGGTPPAFNRAAPGAEFAPNKRRRY

SEQ ID NO: 57998 - protein, 248 aa, Artificial Sequence [sequence omitted]

SEQ ID NO: 57999 - protein, 235 aa, Artificial Sequence
  derived and/or modified sequence
  misc_feature (1)..(1): Xaa can be any naturally occurring amino acid
XPDITEEEMRKLFEKYGKAGEVFIHKDKGFGFIRLVERAVVIVDDRGRPSGKGIVEFSGKPAARKALDRCSEGSFLLTTFPRPVTVEPMDQLDDEEGLPEKLVIKNQQFHKEREQPPRFAQPGSFEYEYAMRWKALIEMEKQQQDQVDRNIKEAREKLEMEMEAARHEHQVMLMRQDLMRRQEELRRMEELHNQEVQKRKQLELRQEEERRRREEEMRRQQEEMMRRQQEGFKGT

SEQ ID NO: 58000 - protein, 124 aa, Artificial Sequence
  derived and/or modified sequence
MQSNKTFNLEKQNHTPRKHHQHHHQQQHHQQQQQQPPPPPIPANGQQASSQNEGLTIDLKNFRKPGEKTFTQRSRLFVGNLPPDITEEEMRKLFEKYGKETRTLAEIAKVELDNMPLRGKQLRV

SEQ ID NO: 58001 - protein, 66 aa, Artificial Sequence
  derived and/or modified sequence
MQSNKTFNLEKQNHTPRKHHQHHHQQQHHQQQQQQPPPPPIPANGQQASSQNEGLTIDLKNFRKPG

SEQ ID NO: 58002 - protein, 207 aa, Artificial Sequence
  derived and/or modified sequence
MQSNKTFNLEKQNHTPRKHHQHHHQQQHHQQQQQQPPPPPIPANGQQASSQNEGLTIDLKNFRKPGEKTFTQRSRLFVGNLPPDITEEEMRKLFEKYGKAGEVFIHKDKGFGFIRLETRTLAEIAKVELDNMPLRGKQLRVRFACHSASLTVRNLPQYVSNELLEEAFSVFGQVERAVVIVDDRGRPSGKGIVEFSGKPAARKALDR

SEQ ID NO: 58003 - protein, 382 aa, Artificial Sequence
  derived and/or modified sequence
MRKLFEKYGKAGEVFIHKDKGFGFIRLETRTLAEIAKVELDNMPLRGKQLRVRFACHSASLTVRNLPQYVSNELLEEAFSVFGQVERAVVIVDDRGRPSGKGIVEFSGKPAARKALDRCSEGSFLLTTFPRPVTVEPMDQLDDEEGLPEKLVIKNQQFHKEREQPPRFAQPGSFEYEYAMRWKALIEMEKQQQDQVDRNIKEAREKLEMEMEAARHEHQVMLMRQDLMRRQEELRRMEELHNQEVQKRKQLELRQEEERRRREEEMRRQQEEMMRRQQEGFKGTFPDAREQEIRMGQMAMGGAMGINNRGAMPPAPVPAGTPAPPGPATMMPDGTLGLTPPTTERFGQAATMEGIGAIGGTPPAFNRAAPGAEFAPNKRRRY

SEQ ID NO: 58004 - DNA, 84 bp, Artificial Sequence
  derived and/or modified sequence
atgagccccgccctgaccttcccccggcggtggatcgccgagggcctggtggagaatttgaaccctcccggcgccgatgcttag

SEQ ID NO: 58005 - DNA, 1416 bp, Artificial Sequence
  derived and/or modified sequence
atgcagagcaataagacattcaatcttgaaaaacaaaaccatactccgcggaaacaccaccaacaccatcatcagcaacagcaccatcagcaacagcagcagcaacctccacctccacctattccagccaatggccaacaagcctcctcccaaaacgagggtcttaccatagatctgaaaaacttccgcaagcctggagagaagaccttcacacagcgcagcaggctgttcgtcggaaatcttccccccgacatcacggaggaggagatgcgcaagctgttcgagaaatatgggaaggccggggaggtgttcatccataaggacaaggggttcggattcatccggcttgaaaccagaactctggccgagatcgctaaagttgaattggacaacatgcctctgcgaggtaagcagttacgggttcggttcgcctgtcactcagccagtctgaccgtccgtaatcttccccagtacgtcagcaatgagcttctggaggaagcgttctcagtgtttggccaagtggagagggccgtggtgatagttgatgaccgaggccgccccagcgggaagggtatcgtggagttctctgggaagcccgcggcgcggaaagcactggatcggtgtagtgagggctcctttcttctaacaacttttcctagaccagtcaccgtggagccaatggatcagttggacgatgaagagggactacctgaaaagctggttattaagaatcagcagtttcacaaggagcgggagcagccgccccgatttgcccagcccggcagcttcgagtatgagtatgctatgagatggaaggccctgatcgagatggagaagcagcagcaggaccaggtggaccggaacatcaaggaggcccgggaaaagctggagatggagatggaggctgctcggcacgagcaccaggtgatgctgatgcgtcaggacctcatgcggagacaggaagagctgagacgaatggaagagctgcacaatcaagaggtgcagaagcgtaagcagctggaactgcggcaagaagaagagcggcgtcgcagggaggaagaaatgaggagacagcaggaagagatgatgaggcggcagcaagagggcttcaagggcacattccccgatgctcgggagcaggaaatcagaatgggccagatggcaatgggaggtgcgatgggcattaacaatcgaggtgccatgccacccgccccggtgcctgcaggaacccctgcacccccaggaccggccacaatgatgccagacggcacactggggctaactccgcccaccacagagagatttgggcaagcagcaacaatggaaggcatcggggccataggaggaacacctcctgccttcaaccgggcagcacctggggcagaattcgcgccgaataagcgaaggcgatactag

SEQ ID NO: 58006 - DNA, 1416 bp, Artificial Sequence
  derived and/or modified sequence
atgcagtctaataaaaccttcaacctcgaaaaacagaatcataccccccgtaaacaccatcagcaccaccaccaacagcagcatcaccagcaacagcaacagcagccaccaccccccccaatccccgcgaacggacaacaggcatcctcgcagaatgaaggcttgacaatcgacctcaaaaattttaggaagcccggagagaaaaccttcacacaacgatctagactctttgtgggcaacctgccacccgacataactgaagaagagatgcgcaaactgttcgaaaaatatggcaaggcaggtgaggtgttcatacataaggacaagggatttggattcattcgtctggagacacggactctcgcagagattgccaaagtggagctggacaatatgccgctgagaggtaaacagcttagggtgaggtttgcttgtcattcggcctctcttaccgttaggaatcttccacagtacgtgtctaatgagctgcttgaagaagccttctccgttttcgggcaggtagagcgcgcagtcgtaattgtggacgatcgcgggaggcctagtggcaagggaatagtggagttcagcggaaagccagcggcaaggaaggcgcttgatagatgctccgaagggtcattcctgctgaccacctttccacggccagtcacagtcgagccgatggaccagttggacgacgaggaagggcttcccgagaaactggttatcaaaaatcaacagtttcacaaggagagagaacagcccccccgttttgcccagcccgggtcattcgagtatgaatatgccatgagatggaaggcccttatagagatggagaaacagcaacaggatcaagtggataggaacatcaaagaagcccgggaaaaactggagatggaaatggaggccgcccgtcatgagcaccaggttatgcttatgagacaggacctgatgcggagacaagaggaactgcggagaatggaagagttgcataatcaagaagttcagaaaagaaaacagcttgagctccggcaggaagaggaaaggaggcggcgcgaagaagagatgagaaggcagcaagaggaaatgatgagacgtcagcaggagggcttcaaaggtacttttccagacgcgagggaacaggagatccggatggggcaaatggcaatgggaggcgccatgggaatcaacaaccgtggcgctatgccacccgctcctgtgcccgcaggaacccctgcgcccccaggccccgcaacaatgatgccggatggtaccctggggttgacccccccaactactgaaaggtttggccaggcagccactatggagggcatcggagctattggaggaacccctccggcctttaatcgggcagccccgggagccgagttcgcccccaacaaacgccgcagatattag

SEQ ID NO: 58007 - DNA, 1416 bp, Artificial Sequence
  derived and/or modified sequence
atgcagtctaacaagaccttcaacctcgaaaagcagaatcatacgcctaggaaacaccatcaacaccaccatcaacagcaacatcatcagcagcagcaacagcaaccaccaccgcctcccatcccagcaaacggccagcaagcatcctcccagaatgaggggctcacaattgatttgaaaaactttagaaaaccgggagaaaaaacattcactcagagaagtcggctgttcgttggcaacctacccccagacataaccgaagaagaaatgagaaagctgtttgagaaatacgggaaagctggcgaggtatttattcataaagataagggatttggatttattcggcttgagacccggactttggcagaaatcgctaaggtggaactcgataacatgccactccggggcaagcagctgcgggtccgcttcgcctgtcacagtgcttccctgactgttcgaaacttgccacagtatgtgtcgaacgaattgctcgaagaggccttcagcgtgttcggccaggtggaaagggccgtggtgatagtcgacgaccgtgggcgcccatccggaaagggcattgtagagtttagtggaaagcctgctgctaggaaagcactggataggtgctccgagggttctttcctgctcacaacattcccaagaccagtaacagtggaacctatggatcagctcgatgacgaggaaggactgcccgagaagctggtcatcaagaatcagcagttccacaaggagcgcgagcagcccccacgatttgcccagccaggtagcttcgaatatgagtatgctatgaggtggaaggcactcatcgaaatggagaagcagcaacaggatcaggtggataggaacatcaaggaggccagagagaaactggagatggaaatggaggccgcacggcacgaacaccaggtgatgctgatgcggcaggatcttatgcggcgacaggaagaattgcggagaatggaggaattgcacaatcaggaagtccagaagcgtaaacagctagaactgcggcaggaggaagagcgacggagaagggaagaggagatgaggcgacagcaggaggagatgatgcgtagacagcaggagggctttaagggcacgttccctgatgcccgcgagcaggagatccgcatgggccagatggcgatgggtggggctatgggtatcaataaccgcggcgcaatgccccctgctccagtgcctgcgggaacccccgcacctcccggacccgccacaatgatgccagacgggaccctgggcctcacccctccaacaacagagcgattcggacaggccgctaccatggagggtatcggagcgataggcggcactccgccggcctttaatcgcgccgctccgggtgccgagtttgcccctaacaagagacgacgctattag

SEQ ID NO: 58008 - DNA, 747 bp, Artificial Sequence
  derived and/or modified sequence
atgcaaagcaataagacattcaacttggaaaaacagaaccacactcctcggaaacatcaccagcatcatcatcagcagcagcaccatcaacagcagcaacaacagccgcctccaccacctatcccggcaaacggccagcaggctagttctcaaaacgagggactcactatcgatttgaaaaactttcgcaagcccggcgagaaaacatttacacaacgttctcgcttatttgttggcaacctgccacctgacatcacagaggaggaaatgagaaagctatttgaaaaatatgggaaagcgggggaagtattcatccataaagataagggtttcgggttcatacgcctagagaccaggaccttagcagaaatcgctaaagtggagctggacaatatgcccctgcggggcaaacagcttcgggtacgattcgcatgtcactccgccagccttacagtaagaaacctccctcaggaaagggagcaacccccccgtttcgcccaaccgggttcgtttgaatatgagtacgccatgagatggaaggccctgattgagatggagaagcagcagcaagaccaggtggaccgcaacataaaggaggctcgagagaaactcgagatggagatggaagcagctaggcacgaacatcaagtgatgctgatgcgccaggatcttatgagacgccaggaggagctccgtaggatggaggaactgcacaatcaggaagtgcaaaaaaggaagcagttgtag

SEQ ID NO: 58009 - DNA, 375 bp, Artificial Sequence
  derived and/or modified sequence
atgcaatccaacaaaaccttcaatttggagaaacagaatcacaccccaaggaaacatcaccagcaccaccaccagcagcaacatcaccaacagcagcagcagcagcctccccctcctccaattccagcaaacggtcagcaggcttcctcgcagaacgaagggttgaccattgacctcaaaaactttcggaagccaggagagaaaacctttacgcaacggagtagactattcgtggggaacctccctccagacatcaccgaagaggagatgcgcaagctctttgaaaagtacgggaaggagacacggactctggccgagatagccaaggtggaacttgacaacatgcccctaaggggcaagcagctgcgagtttag

SEQ ID NO: 58010 - DNA, 201 bp, Artificial Sequence
  derived and/or modified sequence
atgcaaagtaataagacgttcaacctcgaaaagcagaatcataccccacgaaaacatcaccaacatcaccatcagcagcagcaccaccagcagcagcaacagcagccacctccaccccccattcccgccaatgggcaacaggcttcctctcagaacgaagggctcactatcgacctgaagaatttcagaaaaccaggctag

SEQ ID NO: 58011 - DNA, 624 bp, Artificial Sequence
  derived and/or modified sequence
atgcaatcaaacaagacctttaacctggagaaacagaaccacacccccagaaagcatcatcaacatcaccatcagcagcaacatcaccagcaacaacaacagcaaccaccccctccccccatcccagcaaacggccagcaggcttccagccagaatgagggactgaccatcgacttaaagaactttcggaaacccggtgagaagacgtttacacagcgctccagattatttgtgggaaatctcccacctgacatcaccgaagaggagatgcgcaaactctttgagaaatatgggaaggctggagaagtgtttatccacaaagataaggggttcggctttattaggcttgaaactcggacattggccgaaatcgccaaagtcgagcttgataacatgccccttcgtggtaagcaactgagagttagatttgcctgtcacagcgcctcactcacagtccggaatctgcctcagtacgtgagtaacgaactcctagaagaggcgttcagcgttttcggtcaggtcgagagagctgtggtgattgtggacgacagggggcggccctccggcaaagggatcgtggagttttctggtaagcccgccgcccgaaaagcacttgacaggtag

SEQ ID NO: 58012 - DNA, 1416 bp, Artificial Sequence
  derived and/or modified sequence
atgcagagcaacaagaccttcaacctggagaagcagaaccacacccccaggaagcaccaccagcaccaccaccagcagcagcaccaccagcagcagcagcagcagcccccacctccacccatcccagccaacggccagcaggccagcagccagaatgaaggcctgaccatcgacctgaagaacttcaggaagccaggagagaagaccttcacccagaggagccggctgtttgtgggcaacctgcccccagacatcacagaggaggagatgaggaagctgtttgagaagtatggcaaggccggggaggtgttcatccacaaggacaagggcttcggcttcatccggctggagaccaggaccctggccgagatcgccaaggtggagctggacaacatgcccctgcggggcaagcagctgcgggtgcgctttgcctgccacagcgccagcctgactgtgaggaacctgccccagtatgtgtccaatgagctgctggaggaggccttctctgtgtttggccaggtggagagagctgtggtgattgtggatgaccggggccggcccagcggcaagggcatcgtggagttcagcggcaagccagctgccaggaaggccctggaccgctgcagcgagggcagcttcctgctgaccaccttccccaggcctgtgacagtggagcccatggaccagctggatgatgaggagggcctgcctgagaagctggtgatcaagaaccagcagttccacaaggagcgggagcagccccccaggtttgcccagcccggcagctttgaatatgaatatgccatgcgctggaaggccctgattgagatggagaagcagcagcaggaccaggtggacaggaacatcaaggaggcccgggagaagctggagatggagatggaggccgcccggcatgagcaccaggtgatgctgatgaggcaggacctgatgaggcggcaggaggagctgcggaggatggaggagctgcacaaccaggaggtgcagaagaggaagcagctggagctgcggcaggaggaggagaggagaagaagagaggaggagatgaggcggcagcaggaggagatgatgaggcggcagcaggagggcttcaagggcaccttcccagatgcccgggagcaggagatccgcatgggccagatggccatgggcggggccatgggcatcaacaacagaggagccatgcccccagcccctgtgcctgctggcaccccagcccctcctggccctgccaccatgatgccagatggcaccctgggcctgaccccacccaccacagaaagatttggccaggccgccaccatggagggcatcggggccatcggcggcaccccaccagccttcaacagagctgcccctggagctgagtttgcccccaacaagagaagacgctactag

SEQ ID NO: 58013 - DNA, 747 bp, Artificial Sequence
  derived and/or modified sequence
atgcagagcaacaagaccttcaacctggagaagcagaaccacacccccaggaagcaccaccagcaccaccaccagcagcagcaccaccagcagcagcagcagcagcccccacctccacccatcccagccaacggccagcaggccagcagccagaatgaaggcctgaccatcgacctgaagaacttcaggaagccaggagagaagaccttcacccagaggagccggctgtttgtgggcaacctgcccccagacatcacagaggaggagatgaggaagctgtttgagaagtatggcaaggccggggaggtgttcatccacaaggacaagggcttcggcttcatccggctggagaccaggaccctggccgagatcgccaaggtggagctggacaacatgcccctgcggggcaagcagctgcgggtgcgctttgcctgccacagcgccagcctgactgtgaggaacctgccccaggagcgggagcagccccccaggtttgcccagcccggcagctttgaatatgaatatgccatgcgctggaaggccctgattgagatggagaagcagcagcaggaccaggtggacaggaacatcaaggaggcccgggagaagctggagatggagatggaggccgcccggcatgagcaccaggtgatgctgatgaggcaggacctgatgaggcggcaggaggagctgcggaggatggaggagctgcacaaccaggaggtgcagaagaggaagcagctgtag

SEQ ID NO: 58014 - DNA, 375 bp, Artificial Sequence
  derived and/or modified sequence
atgcagagcaacaagaccttcaacctggagaagcagaaccacacccccaggaagcaccaccagcaccaccaccagcagcagcaccaccagcagcagcagcagcagcccccacctccacccatcccagccaacggccagcaggccagcagccagaatgaaggcctgaccatcgacctgaagaacttcaggaagccaggagagaagaccttcacccagaggagccggctgtttgtgggcaacctgcccccagacatcacagaggaggagatgaggaagctgtttgagaagtatggcaaggagaccaggaccctggccgagatcgccaaggtggagctggacaacatgcccctgcggggcaagcagctgcgggtgtag

SEQ ID NO: 58015 - DNA, 201 bp, Artificial Sequence
  derived and/or modified sequence
atgcagagcaacaagaccttcaacctggagaagcagaaccacacccccaggaagcaccaccagcaccaccaccagcagcagcaccaccagcagcagcagcagcagcccccacctccacccatcccagccaacggccagcaggccagcagccagaatgaaggcctgaccatcgacctgaagaacttcaggaagccaggatag

SEQ ID NO: 58016 - DNA, 624 bp, Artificial Sequence
  derived and/or modified sequence
atgcagagcaacaagaccttcaacctggagaagcagaaccacacccccaggaagcaccaccagcaccaccaccagcagcagcaccaccagcagcagcagcagcagcccccacctccacccatcccagccaacggccagcaggccagcagccagaatgaaggcctgaccatcgacctgaagaacttcaggaagccaggagagaagaccttcacccagaggagccggctgtttgtgggcaacctgcccccagacatcacagaggaggagatgaggaagctgtttgagaagtatggcaaggccggggaggtgttcatccacaaggacaagggcttcggcttcatccggctggagaccaggaccctggccgagatcgccaaggtggagctggacaacatgcccctgcggggcaagcagctgcgggtgcgctttgcctgccacagcgccagcctgactgtgaggaacctgccccagtatgtgtccaatgagctgctggaggaggccttctctgtgtttggccaggtggagagagctgtggtgattgtggatgaccggggccggcccagcggcaagggcatcgtggagttcagcggcaagccagctgccaggaaggccctggacagatag

SEQ ID NO: 58017 - DNA, 1416 bp, Artificial Sequence
  derived and/or modified sequence
atgcagagcaacaagaccttcaacctggagaagcagaaccacaccccccgaaaacatcaccagcaccaccaccagcagcagcaccaccagcaacagcagcaacagccaccccccccaccaatccctgccaatggccagcaagcaagcagccagaacgaagggctgacaatcgatctaaagaactttcggaagccgggggagaaaacatttacacagaggtctcgactgtttgttggcaacctgccccccgatatcaccgaagaggagatgagaaagctgttcgagaagtatgggaaggccggcgaggtgttcatccacaaggacaaaggatttggcttcattaggctggaaacacggaccttggccgagatagcgaaggtggaattggataatatgcctctgcggggcaaacaactgagggtgcggtttgcctgccactccgcgtccttgacagtcagaaacctgccccagtacgtgagtaacgagctgctggaggaagcttttagcgttttcggccaagtggagagagctgtggttattgtggacgaccgcggacgcccttctgggaagggaattgtagagttctccggaaaacccgcagcaaggaaagctcttgacagatgcagcgaaggaagcttccttctgaccaccttccccaggccagtcacggtggagcccatggatcagctcgatgatgaagaagggctgccagagaaactggtaatcaaaaaccagcagttccataaggaacgggagcagcctccgcgattcgcccagccagggagcttcgagtacgagtacgctatgaggtggaaggccctgatcgaaatggaaaagcagcagcaagaccaggttgacaggaatatcaaggaagcacgtgaaaagcttgaaatggagatggaggcagcacggcacgagcaccaagtgatgctgatgcggcaggacctgatgcggcggcaggaggagctccggagaatggaggaactgcataatcaggaagtccagaaacggaagcaactggagctgagacaggaggaggagagacgccgtagagaggaggaaatgaggcgtcagcaagaagaaatgatgagaaggcagcaagaagggttcaaggggacttttcctgacgcacgagagcaggagatacgaatgggacagatggcgatgggaggagcgatgggcatcaacaatcggggggctatgcccccagcacccgtccctgccggaacgcctgccccacccgggcctgcaacaatgatgcctgacggcacactagggttaacacctcccaccaccgagaggttcggccaagccgctaccatggagggcatcggtgccatcggcggcacaccccccgcctttaaccgcgccgccccaggcgctgagtttgccccgaacaagagacggcgatattag

SEQ ID NO: 58018 - DNA, 1416 bp, Artificial Sequence
  derived and/or modified sequence
atgcagagcaacaagaccttcaacctggagaagcagaaccacaccccacgcaaacaccaccagcaccaccatcagcagcagcatcaccagcagcagcagcagcagcctccccctccccctattccggccaatggtcagcaggcttctagtcaaaatgagggtttgaccattgatctgaagaactttcggaagccgggagagaagacctttactcagcggtctcgactctttgtgggaaatcttcccccagacatcaccgaggaggaaatgagaaagctttttgagaaatatggcaaggcaggagaggtcttcattcataaagacaaaggtttcggctttatccggctggaaacacggactctagcggagatcgccaaagtagaattggataacatgccactgcgtggcaagcagctccgggtgagatttgcctgtcattcggcctctcttaccgtgcgcaacctgccccagtatgttagcaatgaactgctggaggaggcgttcagcgtcttcgggcaggtcgagcgggctgtcgtcattgttgacgataggggcagacctagcggaaagggcattgtggagttctctgggaagcccgcagcccgcaaagctctggataggtgttctgagggctcctttctccttaccaccttccctagaccagttaccgtggagccaatggatcaactggacgatgaggagggtctccccgagaaactggtgatcaaaaaccagcaattccacaaggagcgcgagcagcctccacgcttcgcgcagcccggttccttcgagtatgaatatgccatgagatggaaggctcttatcgaaatggagaaacagcaacaggatcaggtggaccgcaatatcaaggaggcaagggaaaaactggaaatggaaatggaggccgcacgtcatgagcatcaagtcatgcttatgcgccaggaccttatgcgcaggcaagaggaactgagacgaatggaggaactccataaccaagaggtacagaaacggaaacagctcgaactccgacaggaggaggagagaagacgccgggaagaggagatgcggcgacagcaggaggagatgatgcgccggcagcaggagggattcaaagggacattccctgacgcacgcgagcaagaaatacggatggggcaaatggccatgggcggggcaatgggcattaacaatcggggcgccatgcccccggcccctgtgcccgctggaacccccgccccacccggacctgcaacgatgatgcccgacgggacgctcggactgacgccacctactaccgaacggttcggccaggctgcaactatggaagggataggagcaattggcggcacgccacctgcattcaaccgagctgcaccgggcgctgaatttgcaccaaataagagaaggcggtattag

SEQ ID NO: 58019 - DNA, 1416 bp, Artificial Sequence
  derived and/or modified sequence
atgcagagcaacaagaccttcaacctggagaagcagaaccacaccccacggaagcaccatcagcatcatcaccaacaacagcaccatcaacaacaacagcagcagccaccacctccacctatccccgccaacgggcagcaggctagctctcagaatgagggtctgacaatcgacctgaaaaacttccggaagccaggcgaaaaaacattcacccagagaagcaggttgttcgtgggcaaccttcctccagacattacagaagaggaaatgcgcaaactgttcgagaaatatggcaaggcaggggaggtctttatacacaaggacaaaggtttcggcttcatccgtctggagacacgcacgctggccgaaatcgcgaaagtggaactggataatatgcccttgagggggaaacagctcagggtcagattcgcgtgccattcagccagcctgactgttcgtaacctgccgcaatatgtcagtaacgagctactggaagaagccttctccgtgttcggtcaggtggagagggcggtagtcattgtggacgatcgcggccggccatctggaaaaggaatcgtcgagttctctggaaagccagccgcacgcaaagcattagacagatgttcagagggaagtttcctactgaccacattcccgagacccgtcaccgtggaacctatggatcagttggacgatgaagagggcctccctgagaagctggttatcaagaaccagcagttccataaggagcgcgagcagccaccccgcttcgcccagcctggcagcttcgaatacgagtatgccatgcggtggaaagccctcatagaaatggagaagcagcaacaggaccaggtggataggaacataaaagaagcacgggagaaactggaaatggaaatggaggcagctcgacacgagcatcaggtgatgcttatgcgccaggatcttatgaggagacaggaggaattacggcggatggaggagcttcataaccaggaagtgcaaaaaagaaaacagctggagcttcgccaggaagaggaaaggagaaggcgggaggaggagatgagacggcagcaggaggagatgatgcgcaggcaacaagaaggcttcaaaggaacattcccagacgcccgcgaacaggagatccgtatgggacagatggccatgggcggcgccatggggattaacaaccggggcgctatgccgcctgcaccagtcccagccggtactccagcgcctcctggtccagccacaatgatgccagacggcactctgggcctaacaccccccacgactgagcggtttggacaggcagcgaccatggagggcattggtgctattggcggtacgcctccagcttttaatcgtgccgcaccgggcgctgagtttgcccccaataagcggcgaaggtactag

SEQ ID NO: 58020 - DNA, 747 bp, Artificial Sequence
  derived and/or modified sequence
atgcagagcaacaagaccttcaacctggagaagcagaaccacaccccacgcaagcaccatcagcatcaccaccagcaacagcatcaccaacaacagcaacagcagccacctccccctccaattcccgccaacggtcagcaggctagcagccagaacgagggtctgaccattgacctgaaaaatttccgtaagccaggggaaaaaacttttacgcagagaagccgactcttcgtgggcaacctcccacctgacatcactgaggaagagatgaggaagctgttcgagaaatatgggaaagctggtgaagtgttcatccataaggacaagggtttcggatttattcggctcgaaacacgcacactggcggaaatcgctaaggtggagctggataacatgcctcttcggggtaaacagctgcgcgttcggttcgcgtgtcactctgccagtctgaccgtgcgaaacctgccccaggaaagagagcagcccccacggttcgcccagcctgggtccttcgagtacgagtacgctatgaggtggaaagccctaattgagatggaaaaacagcagcaggatcaggtggaccgtaatattaaagaggccagagaaaagctggagatggagatggaggccgctcgacacgagcatcaggtgatgcttatgagacaggatctgatgcgccggcaggaggagctgcgaaggatggaagaactccataaccaggaggtgcagaagcggaaacaactgtag

SEQ ID NO: 58021 - DNA, 375 bp, Artificial Sequence
  derived and/or modified sequence
atgcagagcaacaagaccttcaacctggagaagcagaaccacaccccccgtaagcatcaccaacatcatcaccaacagcagcaccatcagcaacagcagcagcagcctccaccccccccgatcccggccaatggtcagcaggccagtagtcagaatgaagggctcacaatagatctgaaaaacttcagaaaacccggtgaaaagaccttcacccagagatcaaggttattcgtggggaatctgccccctgatatcacagaagaagaaatgcggaagcttttcgagaaatatgggaaggagacaaggacactcgctgagatagcaaaggtggaattggataatatgcctttgaggggaaaacagctcagagtctag

SEQ ID NO: 58022 - DNA, 201 bp, Artificial Sequence
  derived and/or modified sequence
atgcagagcaacaagaccttcaacctggagaagcagaaccacacccccagaaagcatcatcagcatcaccaccagcagcagcatcaccagcaacagcagcagcagccacccccaccgccaatccccgccaacggccagcaggcttcctctcagaatgaagggctgaccattgatttaaaaaattttagaaagcccgggtag

SEQ ID NO: 58023 - DNA, 624 bp, Artificial Sequence
  derived and/or modified sequence
atgcagagcaacaagaccttcaacctggagaagcagaaccacaccccccgtaagcaccatcaacatcaccatcaacagcagcaccaccagcagcagcagcagcagcccccccccccgccaatccccgctaacgggcagcaagcttcaagtcagaacgagggtttgacaatcgacttgaaaaatttcagaaagcctggagagaagacctttactcagagaagtcggctgtttgtcgggaacctgcctcccgacataacagaagaggaaatgaggaagttgtttgagaaatacggcaaagccggtgaggtgttcattcataaggataaaggcttcgggtttattaggttggagacacgaacactggcagaaatcgctaaggttgaactggataatatgccactgcgcggcaaacagttaagagttcgattcgcctgtcactctgctagtcttaccgttcgcaatcttccacaatacgtgtctaatgagctcttggaagaggctttttcagtgttcggccaggttgaaagggccgtggtcatcgttgatgatcgagggcgtcccagcggaaagggcatcgtggagttcagtggcaagccagcggcccgcaaagctttagatagatag

SEQ ID NO: 58024 - DNA, 2713 bp, Artificial Sequence
  derived and/or modified sequence
aatcgagaacgccattttgtaccccttggcaggcaccgagctccgtcgtctcgtttccggcggtcgcgcgctcttttctcgggacgggagaggccgtgtagcgtcgccgttactccgaggagataccagtcggtagaggagaagtcgaggttagagggaactgggaggcactttgctgtctgcaatcgaagttgagggtgcaaaaatgcagagtaataaaacttttaacttggagaagcaaaaccatactccaagaaagcatcatcaacatcaccaccagcagcagcaccaccagcagcaacagcagcagccgccaccaccgccaatacctgcaaatgggcaacaggccagcagccaaaatgaaggcttgactattgacctgaagaattttagaaaaccaggagagaagaccttcacccaacgaagccgtctttttgtgggaaatcttcctcccgacatcactgaggaagaaatgaggaaactatttgagaaatatggaaaggcaggcgaagtcttcattcataaggataaaggatttggctttatccgcttggaaacccgaaccctagcggagattgccaaagtggagctggacaatatgccactccgtggaaagcagctgcgtgtgcgctttgcctgccatagtgcatcccttacagttcgaaaccttcctcagtatgtgtccaacgaactgctggaagaagccttttctgtgtttggccaggtagagagggctgtagtcattgtggatgatcgaggaaggccctcaggaaaaggcattgttgagttctcagggaagccagctgctcggaaagctctggacagatgcagtgaaggctccttcctgctaaccacatttcctcgtcctgtgactgtggagcccatggaccagttagatgatgaagagggacttccagagaagctggttataaaaaaccagcaatttcacaaggaacgagagcagccacccagatttgcacagcctggctcctttgagtatgaatatgccatgcgctggaaggcactcattgagatggagaagcagcagcaggaccaagtggaccgcaacatcaaggaggctcgtgagaagctggagatggagatggaagctgcacgccatgagcaccaggtcatgctaatgagacaggatttgatgaggcgccaagaagaacttcggaggatggaagagctgcacaaccaagaggtgcaaaaacgaaagcaactggagctcaggcaggaggaagagcgcaggcgccgtgaagaagagatgcggcggcagcaagaagaaatgatgcggcgacagcaggaaggattcaagggaaccttccctgatgcgagagagcaggagattcggatgggtcagatggctatgggaggtgctatgggcataaacaacagaggtgccatgccccctgctcctgtgccagctggtaccccagctcctccaggacctgccactatgatgccggatggaactttgggattgaccccaccaacaactgaacgctttggtcaggctgctacaatggaaggaattggggcaattggtggaactcctcctgcattcaaccgtgcagctcctggagctgaatttgccccaaacaaacgtcgccgatactaataagttgcagtgtctagtttctcaaaacccttaaaagaaggaccctttttggactagccagaattctaccctggaaaagtgttagggattccttccaatagttagatctaccctgcctgtactactctagggagtatgctggaggcagagggcaagggaggggtggtattaaacaagtcaattctgtgtggtatattgtttaatcagttctgtgtggtgcattcctgaagtctctaatgtgactgttgagggcctggggaaaccatggcaaagtggatccagttagagcccattaatcttgatcattccggttttttttttttttgtccatcttgtttcatttgcttgccccgcccccgagacggagtcttactctgtcgcccaggctggagtgtagtggcatgatctcggctcactgcaatctctgcctcccgggttcaagcttgtccaggttgatcttgaactcctgacctcgtgatctacccacctcggcctcccaaaatgctgggattacaggggtgagccaccgtgcccaacctcacttgcttcttatccttacactcccccagccccagagaaactgccacatacaccacaaaaaccaaacatcccccaatgaccttagccccattgctccattcactcccaggtgagaattcaggcaaacgtccacaaaggtcacaggcagcgtacatacggttctgttataccccatatattaccccttcatgtcctaaagaagacattttctcttagagattttcattttagtgtatctttaaaaaaaaatcttgtgttaacttgcctccatctttttcttgggtgaggacacccaggaatgacccttttgtgtctatgatgttgctgttcacagcttttcttgataggcctagtacaatcttgggaacagggttactgtatactgaaggtctgacagtagctcttagactcgcctatcttaggtagtcatgctgtgcattttttttttcattggtgtactgtgtttgatttgtctcatatatttggagtttttctgaaaaatggagcagtaatgcagcatcaacctattaaaatacattttaagccttttaa

SEQ ID NO: 58025 - DNA, 2606 bp, Artificial Sequence
  derived and/or modified sequence
tcgtttccggcggtcgcgcgctcttttctcgggacgggagaggccgtgtagcgtcgccgttactccgaggagataccagtcggtagaggggtgcaaaaatgcagagtaataaaacttttaacttggagaagcaaaaccatactccaagaaagcatcatcaacatcaccaccagcagcagcaccaccagcagcaacagcagcagccgccaccaccgccaatacctgcaaatgggcaacaggccagcagccaaaatgaaggcttgactattgacctgaagaattttagaaaaccaggagagaagaccttcacccaacgaagccgtctttttgtgggaaatcttcctcccgacatcactgaggaagaaatgaggaaactatttgagaaatatggaaaggcaggcgaagtcttcattcataaggataaaggatttggctttatccgcttggaaacccgaaccctagcggagattgccaaagtggagctggacaatatgccactccgtggaaagcagctgcgtgtgcgctttgcctgccatagtgcatcccttacagttcgaaaccttcctcagtatgtgtccaacgaactgctggaagaagccttttctgtgtttggccaggtagagagggctgtagtcattgtggatgatcgaggaaggccctcaggaaaaggcattgttgagttctcagggaagccagctgctcggaaagctctggacagatgcagtgaaggctccttcctgctaaccacatttcctcgtcctgtgactgtggagcccatggaccagttagatgatgaagagggacttccagagaagctggttataaaaaaccagcaatttcacaaggaacgagagcagccacccagatttgcacagcctggctcctttgagtatgaatatgccatgcgctggaaggcactcattgagatggagaagcagcagcaggaccaagtggaccgcaacatcaaggaggctcgtgagaagctggagatggagatggaagctgcacgccatgagcaccaggtcatgctaatgagacaggatttgatgaggcgccaagaagaacttcggaggatggaagagctgcacaaccaagaggtgcaaaaacgaaagcaactggagctcaggcaggaggaagagcgcaggcgccgtgaagaagagatgcggcggcagcaagaagaaatgatgcggcgacagcaggaaggattcaagggaaccttccctgatgcgagagagcaggagattcggatgggtcagatggctatgggaggtgctatgggcataaacaacagaggtgccatgccccctgctcctgtgccagctggtaccccagctcctccaggacctgccactatgatgccggatggaactttgggattgaccccaccaacaactgaacgctttggtcaggctgctacaatggaaggaattggggcaattggtggaactcctcctgcattcaaccgtgcagctcctggagctgaatttgccccaaacaaacgtcgccgatactaataagttgcagtgtctagtttctcaaaacccttaaaagaaggaccctttttggactagccagaattctaccctggaaaagtgttagggattccttccaatagttagatctaccctgcctgtactactctagggagtatgctggaggcagagggcaagggaggggtggtattaaacaagtcaattctgtgtggtatattgtttaatcagttctgtgtggtgcattcctgaagtctctaatgtgactgttgagggcctggggaaaccatggcaaagtggatccagttagagcccattaatcttgatcattccggttttttttttttttgtccatcttgtttcatttgcttgccccgcccccgagacggagtcttactctgtcgcccaggctggagtgtagtggcatgatctcggctcactgcaatctctgcctcccgggttcaagcttgtccaggttgatcttgaactcctgacctcgtgatctacccacctcggcctcccaaaatgctgggattacaggggtgagccaccgtgcccaacctcacttgcttcttatccttacactcccccagccccagagaaactgccacatacaccacaaaaaccaaacatcccccaatgaccttagccccattgctccattcactcccaggtgagaattcaggcaaacgtccacaaaggtcacaggcagcgtacatacggttctgttataccccatatattaccccttcatgtcctaaagaagacattttctcttagagattttcattttagtgtatctttaaaaaaaaatcttgtgttaacttgcctccatctttttcttgggtgaggacacccaggaatgacccttttgtgtctatgatgttgctgttcacagcttttcttgataggcctagtacaatcttgggaacagggttactgtatactgaaggtctgacagtagctcttagactcgcctatcttaggtagtcatgctgtgcattttttttttcattggtgtactgtgtttgatttgtctcatatatttggagtttttctgaaaaatggagcagtaatgcagcatcaacctattaaaatacattttaagccttttaa

SEQ ID NO: 58026 - DNA, 1921 bp, Artificial Sequence
  derived and/or modified sequence
aacgccattttgtaccccttggcaggcaccgagctccgtcgtctcgtttccggcggtcgcgcgctcttttctcgggacgggagaggccgtgtagcgtcgccgttactccgaggagataccagtcggtagaggagaagtcgaggttagagggaactgggaggcactttgctgtctgcaatcgaagttgagaggcccagtatttaggcgacagtgaatttattactctgaagagggttctgcacatatttccaaattatattggtggtcatcagaagtaggtgataggaagaaatacttctcaagggtgcaaaaatgcagagtaataaaacttttaacttggagaagcaaaaccatactccaagaaagcatcatcaacatcaccaccagcagcagcaccaccagcagcaacagcagcagccgccaccaccgccaatacctgcaaatgggcaacaggccagcagccaaaatgaaggcttgactattgacctgaagaattttagaaaaccaggagagaagaccttcacccaacgaagccgtctttttgtgggaaatcttcctcccgacatcactgaggaagaaatgaggaaactatttgagaaatatggaaaggcaggcgaagtcttcattcataaggataaaggatttggctttatccgcttggaaacccgaaccctagcggagattgccaaagtggagctggacaatatgccactccgtggaaagcagctgcgtgtgcgctttgcctgccatagtgcatcccttacagttcgaaaccttcctcagtatgtgtccaacgaactgctggaagaagccttttctgtgtttggccaggtagagagggctgtagtcattgtggatgatcgaggaaggccctcaggaaaaggcattgttgagttctcagggaagccagctgctcggaaagctctggacagatgcagtgaaggctccttcctgctaaccacatttcctcgtcctgtgactgtggagcccatggaccagttagatgatgaagagggacttccagagaagctggttataaaaaaccagcaatttcacaaggaacgagagcagccacccagatttgcacagcctggctcctttgagtatgaatatgccatgcgctggaaggcactcattgagatggagaagcagcagcaggaccaagtggaccgcaacatcaaggaggctcgtgagaagctggagatggagatggaagctgcacgccatgagcaccaggtcatgctaatgagacaggatttgatgaggcgccaagaagaacttcggaggatggaagagctgcacaaccaagaggtgcaaaaacgaaagcaactggagctcaggcaggaggaagagcgcaggcgccgtgaagaagagatgcggcggcagcaagaagaaatgatgcggcgacagcaggaaggattcaagggaaccttccctgatgcgagagagcaggagattcggatgggtcagatggctatgggaggtgctatgggcataaacaacagaggtgccatgccccctgctcctgtgccagctggtaccccagctcctccaggacctgccactatgatgccggatggaactttgggattgaccccaccaacaactgaacgctttggtcaggctgctacaatggaaggaattggggcaattggtggaactcctcctgcattcaaccgtgcagctcctggagctgaatttgccccaaacaaacgtcgccgatactaataagttgcagtgtctagtttctcaaaacccttaaaagaaggaccctttttggactagccagaattctaccctggaaaagtgttagggattccttccaatagttagatctaccctgcctgtactactctagggagtatgctggaggcagagggcaagggaggggtggtattaaacaagtcaattctgtgtggta

SEQ ID NO: 58027 - DNA, 855 bp, Artificial Sequence
  derived and/or modified sequence
ccgtgtagcgtcgccgttactccgaggagataccagtcggtagaggagaagtcgaggttagagggaactgggaggcactttgctgtctgcaatcgaagttgagggtgcaaaaatgcagagtaataaaacttttaacttggagaagcaaaaccatactccaagaaagcatcatcaacatcaccaccagcagcagcaccaccagcagcaacagcagcagccgccaccaccgccaatacctgcaaatgggcaacaggccagcagccaaaatgaaggcttgactattgacctgaagaattttagaaaaccaggagagaagaccttcacccaacgaagccgtctttttgtgggaaatcttcctcccgacatcactgaggaagaaatgaggaaactatttgagaaatatggaaaggcaggcgaagtcttcattcataaggataaaggatttggctttatccgcttggaaacccgaaccctagcggagattgccaaagtggagctggacaatatgccactccgtggaaagcagctgcgtgtgcgctttgcctgccatagtgcatcccttacagttcgaaaccttcctcaggaacgagagcagccacccagatttgcacagcctggctcctttgagtatgaatatgccatgcgctggaaggcactcattgagatggagaagcagcagcaggaccaagtggaccgcaacatcaaggaggctcgtgagaagctggagatggagatggaagctgcacgccatgagcaccaggtcatgctaatgagacaggatttgatgaggcgccaagaagaacttcggaggatggaagagctgcacaaccaagaggtgcaaaaacgaaagcaact

SEQ ID NO: 58028 - DNA, 622 bp, Artificial Sequence
  derived and/or modified sequence
ctcttttctcgggacgggagaggccgtgtagcgtcgccgttactccgaggagataccagtcggtagaggagaagtcgaggttagagggaactgggaggcactttgctgtctgcaatcgaagttgagaggcccagtatttaggcgacagtgaatttattactctgaagagggttctgcacatatttccaaattatattggtggtcatcagaagtaggtgataggaagaaatacttctcaagggtgcaaaaatgcagagtaataaaacttttaacttggagaagcaaaaccatactccaagaaagcatcatcaacatcaccaccagcagcagcaccaccagcagcaacagcagcagccgccaccaccgccaatacctgcaaatgggcaacaggccagcagccaaaatgaaggcttgactattgacctgaagaattttagaaaaccaggagagaagaccttcacccaacgaagccgtctttttgtgggaaatcttcctcccgacatcactgaggaagaaatgaggaaactatttgagaaatatggaaaggaaacccgaaccctagcggagattgccaaagtggagctggacaatatgccactccgtggaaagcagctgcgtgtgc

SEQ ID NO: 58029 - DNA, 491 bp, Artificial Sequence
  derived and/or modified sequence
gtgggatttcttggaacaatcagcgaaggaagaggctagggcgaagctaggtttggagggtggatggcgcttccgaggccccttgaggccttgtctctgccgccacactgccttctcagcccacccgcggggggccacctttctcaactcgcttcgcttcgggctttccccattttcgttcctgccctgtttctttgtgcaactcatctccgaatcttacccgtgtcaagaagtcgaggttagagggaactgggaggcactttgctgtctgcaatcgaagttgagggtgcaaaaatgcagagtaataaaacttttaacttggagaagcaaaaccatactccaagaaagcatcatcaacatcaccaccagcagcagcaccaccagcagcaacagcagcagccgccaccaccgccaatacctgcaaatgggcaacaggccagcagccaaaatgaaggcttgactattgacctgaagaattttagaaaaccagg

SEQ ID NO: 58030 - DNA, 726 bp, Artificial Sequence
  derived and/or modified sequence
gcatatccagagcccgccgctttcgtagtcagatttctagaagtcgaggttagagggaactgggaggcactttgctgtctgcaatcgaagttgagggtgcaaaaatgcagagtaataaaacttttaacttggagaagcaaaaccatactccaagaaagcatcatcaacatcaccaccagcagcagcaccaccagcagcaacagcagcagccgccaccaccgccaatacctgcaaatgggcaacaggccagcagccaaaatgaaggcttgactattgacctgaagaattttagaaaaccaggagagaagaccttcacccaacgaagccgtctttttgtgggaaatcttcctcccgacatcactgaggaagaaatgaggaaactatttgagaaatatggaaaggcaggcgaagtcttcattcataaggataaaggatttggctttatccgcttggaaacccgaaccctagcggagattgccaaagtggagctggacaatatgccactccgtggaaagcagctgcgtgtgcgctttgcctgccatagtgcatcccttacagttcgaaaccttcctcagtatgtgtccaacgaactgctggaagaagccttttctgtgtttggccaggtagagagggctgtagtcattgtggatgatcgaggaaggccctcaggaaaaggcattgttgagttctcagggaagccagctgctcggaaagctctggacagat

SEQ ID NO: 58031 - DNA, 2882 bp, Artificial Sequence
  derived and/or modified sequence
caggcgcagtgcaggactgctccgagcacgcctacgcgcgcattttctccccttcctctccctctttccactttcctctccctttttctcctctcctttccccctcccaccacttggtctttcagtctttcagtcagttcgtttaggtctctccttccgacccccacccccagctcctctccctttccttttccccctccccctttcctttcccgtctcacgcgccaggccgcttgcacatgcgcattaggtacaaagcctcgctctttgtccccatctgtcgttcacacgaactcaagcctttggcattcggcagccaatagaatctaagaaatggcggaaaaatgattccgcctcgggagctaaaccttgattggcagtttagctaaccaatcgagaacgccattttgtaccccttggcaggcaccgagctccgtcgtctcgtttccggcggtcgcgcgctcttttctcgggacgggagaggccgtgtagcgtcgccgttactccgaggagataccagtcggtagaggatgaaggcttgactattgacctgaagaattttagaaaaccaggagagaagaccttcacccaacgaagccgtctttttgtgggaaatcttcctcccgacatcactgaggaagaaatgaggaaactatttgagaaatatggaaaggcaggcgaagtcttcattcataaggataaaggatttggctttatccgcttggaaacccgaaccctagcggagattgccaaagtggagctggacaatatgccactccgtggaaagcagctgcgtgtgcgctttgcctgccatagtgcatcccttacagttcgaaaccttcctcagtatgtgtccaacgaactgctggaagaagccttttctgtgtttggccaggtagagagggctgtagtcattgtggatgatcgaggaaggccctcaggaaaaggcattgttgagttctcagggaagccagctgctcggaaagctctggacagatgcagtgaaggctccttcctgctaaccacatttcctcgtcctgtgactgtggagcccatggaccagttagatgatgaagagggacttccagagaagctggttataaaaaaccagcaatttcacaaggaacgagagcagccacccagatttgcacagcctggctcctttgagtatgaatatgccatgcgctggaaggcactcattgagatggagaagcagcagcaggaccaagtggaccgcaacatcaaggaggctcgtgagaagctggagatggagatggaagctgcacgccatgagcaccaggtcatgctaatgagacaggatttgatgaggcgccaagaagaacttcggaggatggaagagctgcacaaccaagaggtgcaaaaacgaaagcaactggagctcaggcaggaggaagagcgcaggcgccgtgaagaagagatgcggcggcagcaagaagaaatgatgcggcgacagcaggaaggattcaagggaaccttccctgatgcgagagagcaggagattcggatgggtcagatggctatgggaggtgctatgggcataaacaacagaggtgccatgccccctgctcctgtgccagctggtaccccagctcctccaggacctgccactatgatgccggatggaactttgggattgaccccaccaacaactgaacgctttggtcaggctgctacaatggaaggaattggggcaattggtggaactcctcctgcattcaaccgtgcagctcctggagctgaatttgccccaaacaaacgtcgccgatactaataagttgcagtgtctagtttctcaaaacccttaaaagaaggaccctttttggactagccagaattctaccctggaaaagtgttagggattccttccaatagttagatctaccctgcctgtactactctagggagtatgctggaggcagagggcaagggaggggtggtattaaacaagtcaattctgtgtggtatattgtttaatcagttctgtgtggtgcattcctgaagtctctaatgtgactgttgagggcctggggaaaccatggcaaagtggatccagttagagcccattaatcttgatcattccggttttttttttttttgtccatcttgtttcatttgcttgccccgcccccgagacggagtcttactctgtcgcccaggctggagtgtagtggcatgatctcggctcactgcaatctctgcctcccgggttcaagcttgtccaggttgatcttgaactcctgacctcgtgatctacccacctcggcctcccaaaatgctgggattacaggggtgagccaccgtgcccaacctcacttgcttcttatccttacactcccccagccccagagaaactgccacatacaccacaaaaaccaaacatcccccaatgaccttagccccattgctccattcactcccaggtgagaattcaggcaaacgtccacaaaggtcacaggcagcgtacatacggttctgttataccccatatattaccccttcatgtcctaaagaagacattttctcttagagattttcattttagtgtatctttaaaaaaaaatcttgtgttaacttgcctccatctttttcttgggtgaggacacccaggaatgacccttttgtgtctatgatgttgctgttcacagcttttcttgataggcctagtacaatcttgggaacagggttactgtatactgaaggtctgacagtagctcttagactcgcctatcttaggtagtcatgctgtgcattttttttttcattggtgtactgtgtttgatttgtctcatatatttggagtttttctgaaaaatggagcagtaatgcagcatcaacctattaaaatacattttaagcctttt

SEQ ID NO: 58032 - DNA, 1416 bp, Artificial Sequence
  derived and/or modified sequence
atgcagagtaacaaaacatttaatttggagaagcagaaccacacccctcggaaacatcatcaacaccaccaccagcagcagcatcaccagcaacagcagcaacagcctccgccaccgccaatcccagcgaacgggcagcaggccagctctcaaaacgaggggctcaccatagatctgaagaattttcgaaagcccggagaaaagacatttactcagcggtctaggctgtttgtggggaacttgcctcccgacatcaccgaagaggagatgaggaaactgtttgagaagtatggcaaggctggagaggtttttatccacaaggacaaggggttcggattcattagactggaaacccggacactcgccgagatcgccaaggtggagctcgacaatatgccactacgagggaagcagctgcgagttaggttcgcttgtcatagcgcatccctaaccgtccgtaacctcccacagtatgtctccaacgagctgctagaggaggccttcagcgtcttcggtcaagtggagcgcgcagtcgtgatcgtcgatgacagagggaggccgagtgggaaaggcatcgtggagtttagcggcaagcctgcagcaagaaaggccctggatagatgtagcgaaggctctttcttgctgacgacgtttccacgacctgtgacagtggagcccatggatcagcttgatgatgaggagggcctgcctgaaaagttggtgatcaaaaatcaacaatttcataaggaaagggagcaacccccacggttcgcgcagccaggctccttcgaatacgaatacgccatgcgctggaaagctttaattgagatggagaaacagcagcaggaccaagtagaccggaacataaaagaggctcgggaaaaacttgagatggaaatggaggccgcaagacacgagcaccaagtgatgcttatgaggcaggatctgatgcgacgccaggaggaactgcgcaggatggaggaactccataatcaagaagtgcagaagagaaagcaactggagcttaggcaggaggaagaacgccgacgaagagaggaagagatgcggagacaacaggaggagatgatgaggagacagcaagaaggctttaaaggcacttttcccgatgcccgagaacaagaaatacgaatgggccagatggctatgggcggagccatgggtatcaacaatagaggggctatgcctccggcacccgtgcctgccggaacccctgcccctcctggacccgctaccatgatgcccgacgggacattaggcttgacccctcccaccaccgagaggttcggccaagccgcaacgatggaggggatcggggctattggagggacacccccagcgtttaatcgtgccgctcctggggcagaatttgccccaaataaacgtcggcgatattag

SEQ ID NO: 58033 - DNA, 1416 bp, Artificial Sequence
  derived and/or modified sequence
atgcagtcaaacaaaacatttaatcttgagaaacagaaccacaccccaagaaaacaccatcaacaccaccatcagcagcagcaccaccagcaacagcagcaacaaccacccccaccacccattcctgccaacggacagcaagctagcagccagaatgagggtttgaccatcgacctgaagaattttcgtaaacccggtgagaaaactttcacccagcggagccggctgtttgtaggaaacctgcctcctgatatcaccgaggaagagatgaggaaactgtttgagaagtatggcaaggccggtgaggtgttcatacacaaggacaaaggcttcggattcatcagactggaaacccgcactttagcggagatcgcaaaagttgagttggataacatgccgttgcgcggtaagcagctccgcgttcggtttgcctgccacagcgcatcactgactgtgagaaatctgccacagtacgtatccaacgagctactggaggaagcatttagcgtgttcggccaggtggaaagagccgtcgttatcgttgacgataggggtcggccatcaggcaaaggcatcgtggaattcagcggcaagcccgcagctaggaaagcattggatcgctgttctgaggggtcttttcttcttacaacgttcccgagacccgtcactgttgagcctatggaccaactagacgacgaagagggccttcccgaaaaacttgttattaagaaccaacagttccataaagaaagggagcagcctcccagatttgcgcagcctggctcttttgaatacgaatatgctatgcggtggaaagccctcatagaaatggagaagcagcagcaggatcaagtcgatcgcaatattaaggaagccagagagaagcttgaaatggaaatggaagccgctcggcacgagcaccaggtcatgctcatgcggcaagacttaatgcgtcggcaagaggaactgcggcgaatggaggaattgcataatcaggaggtgcaaaagcgcaagcagttagaactgcgccaggaggaagagcggcgaaggagagaagaggagatgcgcagacagcaggaagagatgatgagacgccagcaggaagggtttaagggaacgtttcctgatgcacgggagcaggagattcgcatgggccagatggctatgggaggggcaatgggaattaataatcgcggagcgatgcctcccgctccagtgccagctggaacacccgctccacctggccctgctaccatgatgcccgatggaacactcggacttaccccgcctacaaccgagcggttcggccaagccgcaaccatggagggtattggggctattggcggaaccccaccagctttcaaccgggcagcccctggcgctgagttcgcccctaataaacggaggcgatattag

SEQ ID NO: 58034 - DNA, 1416 bp, Artificial Sequence
  derived and/or modified sequence
atgcagagtaacaagacgtttaatttagaaaagcagaaccacaccccaagaaagcaccaccagcaccaccatcagcagcaacatcaccagcagcaacagcaacagcccccaccccctcccatccctgccaacggtcagcaggcgtcttcccaaaacgaggggcttaccatcgatcttaagaacttccggaagcccggagagaagacgttcacacagagatcccgccttttcgtaggcaatctcccccctgacatcaccgaagaagagatgaggaaattgtttgagaaatatgggaaggctggtgaagtcttcatacataaggataagggattcggcttcattaggctagagacccggacgttagctgagattgcaaaagtcgaactggacaatatgcctctgaggggtaaacagctaagagtgcgattcgcatgccattcagcctccctcacagtccggaacctcccgcagtatgtgagtaatgagctactggaagaggcattttcggtcttcggtcaggtggagcgagcggtcgttatcgtggatgaccgaggacgcccttcaggtaaggggatcgtggaattctccggtaagcccgctgctagaaaggccctggatagatgttcggaggggtccttcctgctcaccacattccctcgtccagtgaccgtagagcctatggaccaattagacgatgaggaggggttgcctgagaagttagtaataaaaaatcagcaattccacaaggagcgagaacaaccgccaagattcgcccagcctgggagcttcgagtacgaatatgctatgcgctggaaagccctgatagagatggagaagcaacagcaggatcaggtggacaggaatattaaagaggcccgagagaagctcgaaatggagatggaagcagcccgtcacgaacaccaggtgatgcttatgcgccaagacttaatgagacggcaggaagagctgcgccgtatggaggaattacataatcaggaggtgcaaaagagaaaacagctcgagttaagacaggaggaggagcgccgtaggagggaggaggaaatgcgacgtcaacaggaagaaatgatgcggaggcagcaggaaggcttcaaggggacattcccagacgcccgtgagcaagaaatacggatgggacagatggccatgggtggggctatgggcataaataatcgaggtgccatgccccctgcacctgttcccgctggcactccagcaccacccggacccgctacaatgatgccagacggcactctcggtctcacacccccaacaacagagagattcgggcaagccgctacaatggaggggattggcgcaattggagggacaccccctgctttcaatagggcagccccaggagcagagtttgccccaaataaacggaggaggtattag

SEQ ID NO: 58035 - DNA, 747 bp, Artificial Sequence
  derived and/or modified sequence
atgcagtctaataagactttcaacctggaaaagcagaatcacactccacgaaagcaccaccagcaccaccaccagcagcagcatcatcagcagcagcagcagcaaccccctccacctccaatcccagctaatggccaacaggcgtctagccagaacgagggattgaccattgacctgaagaactttcgcaaaccaggagaaaaaacatttacccagcgatctcgcctgtttgtcggcaacctgcccccagatattactgaagaagagatgaggaaactattcgaaaagtatggtaaagcgggtgaggtcttcatacacaaggacaagggttttgggtttatcaggctggagactcgcactctggctgaaattgcaaaggtggagcttgacaacatgcctctacgtgggaagcagctccgcgtccggtttgcctgccatagcgctagcctgaccgtccgaaacttgccccaggagcgcgaacagccccctcggttcgcacagccagggtccttcgagtatgagtatgccatgcggtggaaggccctcatcgagatggagaagcagcaacaagaccaggtggatagaaatataaaggaggcgcgagaaaagctcgagatggaaatggaggcagccagacatgagcatcaggtgatgctgatgagacaggatctcatgcgacgccaggaggagctgcggcgtatggaagagctgcacaaccaggaagttcaaaaaagaaagcagctgtag

SEQ ID NO: 58036 - DNA, 375 bp, Artificial Sequence
  derived and/or modified sequence
atgcagagcaataaaacgtttaacttggaaaaacagaaccataccccccgtaagcaccaccagcaccaccatcagcagcagcatcatcagcagcagcaacaacagccccctccaccacccatccccgcaaatggccagcaagcgtcctcacaaaacgaaggattaaccatcgatctcaaaaacttccggaagcccggagagaagacatttactcagcgtagtcggctgtttgtcgggaatctaccccctgatatcactgaggaggagatgcggaaattgtttgaaaagtatgggaaggagactagaaccctggccgaaatcgcaaaagtggaacttgataatatgcccctcagaggcaaacagctgcgggtgtag

SEQ ID NO: 58037 - DNA, 201 bp, Artificial Sequence
  derived and/or modified sequence
atgcagagtaacaagacattcaatcttgaaaagcaaaaccatacacccaggaagcaccaccaacatcaccatcaacagcaacatcatcagcagcagcagcagcaaccacccccacctccgatccctgcgaatggccagcaggcaagctctcagaatgaaggactgactatcgacctcaagaacttcagaaaacccggatag

SEQ ID NO: 58038 - DNA, 624 bp, Artificial Sequence
  derived and/or modified sequence
atgcagtccaacaagactttcaatttagagaaacagaatcatactcctcgcaagcaccaccagcatcaccatcagcagcaacatcaccagcagcaacaacaacaaccaccaccccctccaatccccgctaacggacaacaggccagctcccagaacgaaggattgaccatagatttaaagaactttcgcaagccaggggaaaaaacattcacacagagatctcggctttttgtcgggaatttgccacccgatatcaccgaagaggaaatgcgcaagctctttgagaagtatggcaaagcaggggaggtgtttatccacaaggacaaagggttcgggttcatcaggctggagacaaggactctggccgagattgcaaaagttgagttggacaacatgcctctaagagggaaacagctgagggtccgctttgcttgtcactcagcctccctgaccgtgcgtaatctgccccagtacgtcagcaacgagcttctggaggaagcttttagcgtttttggccaggtggaaagggccgttgtgattgttgacgatagaggcagaccgagcggtaaaggaatcgtcgaattcagcggcaaacccgcagcccgaaaagcccttgatagatag

SEQ ID NO: 58039 - DNA, 1416 bp, Artificial Sequence
  derived and/or modified sequence
atgcagagcaacaagaccttcaacctggagaagcagaaccacacccccagaaagcaccaccagcaccaccaccagcagcagcaccaccagcagcagcagcagcagcccccccccccccccatccccgccaacggccagcaggccagcagccagaacgagggcctgaccatcgacctgaagaacttcagaaagcccggcgagaagaccttcacccagagaagcagactgttcgtgggcaacctgccccccgacatcaccgaggaggagatgagaaagctgttcgagaagtacggcaaggccggcgaggtgttcatccacaaggacaagggcttcggcttcatcagactggagaccagaaccctggccgagatcgccaaggtggagctggacaacatgcccctgagaggcaagcagctgagagtgagattcgcctgccacagcgccagcctgaccgtgagaaacctgccccagtacgtgagcaacgagctgctggaggaggccttcagcgtgttcggccaggtggagagagccgtggtgatcgtggacgacagaggcagacccagcggcaagggcatcgtggagttcagcggcaagcccgccgccagaaaggccctggacagatgcagcgagggcagcttcctgctgaccaccttccccagacccgtgaccgtggagcccatggaccagctggacgacgaggagggcctgcccgagaagctggtgatcaagaaccagcagttccacaaggagagagagcagccccccagattcgcccagcccggcagcttcgagtacgagtacgccatgagatggaaggccctgatcgagatggagaagcagcagcaggaccaggtggacagaaacatcaaggaggccagagagaagctggagatggagatggaggccgccagacacgagcaccaggtgatgctgatgagacaggacctgatgagaagacaggaggagctgagaagaatggaggagctgcacaaccaggaggtgcagaagagaaagcagctggagctgagacaggaggaggagagaagaagaagagaggaggagatgagaagacagcaggaggagatgatgagaagacagcaggagggcttcaagggcaccttccccgacgccagagagcaggagatcagaatgggccagatggccatgggcggcgccatgggcatcaacaacagaggcgccatgccccccgcccccgtgcccgccggcacccccgccccccccggccccgccaccatgatgcccgacggcaccctgggcctgaccccccccaccaccgagagattcggccaggccgccaccatggagggcatcggcgccatcggcggcaccccccccgccttcaacagagccgcccccggcgccgagttcgcccccaacaagagaagaagatactag

SEQ ID NO: 58040 - DNA, 747 bp, Artificial Sequence
  derived and/or modified sequence
atgcagagcaacaagaccttcaacctggagaagcagaaccacacccccagaaagcaccaccagcaccaccaccagcagcagcaccaccagcagcagcagcagcagcccccccccccccccatccccgccaacggccagcaggccagcagccagaacgagggcctgaccatcgacctgaagaacttcagaaagcccggcgagaagaccttcacccagagaagcagactgttcgtgggcaacctgccccccgacatcaccgaggaggagatgagaaagctgttcgagaagtacggcaaggccggcgaggtgttcatccacaaggacaagggcttcggcttcatcagactggagaccagaaccctggccgagatcgccaaggtggagctggacaacatgcccctgagaggcaagcagctgagagtgagattcgcctgccacagcgccagcctgaccgtgagaaacctgccccaggagagagagcagccccccagattcgcccagcccggcagcttcgagtacgagtacgccatgagatggaaggccctgatcgagatggagaagcagcagcaggaccaggtggacagaaacatcaaggaggccagagagaagctggagatggagatggaggccgccagacacgagcaccaggtgatgctgatgagacaggacctgatgagaagacaggaggagctgagaagaatggaggagctgcacaaccaggaggtgcagaagagaaagcagctgtag

SEQ ID NO: 58041 - DNA, 375 bp, Artificial Sequence
  derived and/or modified sequence
atgcagagcaacaagaccttcaacctggagaagcagaaccacacccccagaaagcaccaccagcaccaccaccagcagcagcaccaccagcagcagcagcagcagcccccccccccccccatccccgccaacggccagcaggccagcagccagaacgagggcctgaccatcgacctgaagaacttcagaaagcccggcgagaagaccttcacccagagaagcagactgttcgtgggcaacctgccccccgacatcaccgaggaggagatgagaaagctgttcgagaagtacggcaaggagaccagaaccctggccgagatcgccaaggtggagctggacaacatgcccctgagaggcaagcagctgagagtgtag

SEQ ID NO: 58042 - DNA, 201 bp, Artificial Sequence
  derived and/or modified sequence
atgcagagcaacaagaccttcaacctggagaagcagaaccacacccccagaaagcaccaccagcaccaccaccagcagcagcaccaccagcagcagcagcagcagcccccccccccccccatccccgccaacggccagcaggccagcagccagaacgagggcctgaccatcgacctgaagaacttcagaaagcccggctag

SEQ ID NO: 58043 - DNA, 624 bp, Artificial Sequence
  derived and/or modified sequence
atgcagagcaacaagaccttcaacctggagaagcagaaccacacccccagaaagcaccaccagcaccaccaccagcagcagcaccaccagcagcagcagcagcagcccccccccccccccatccccgccaacggccagcaggccagcagccagaacgagggcctgaccatcgacctgaagaacttcagaaagcccggcgagaagaccttcacccagagaagcagactgttcgtgggcaacctgccccccgacatcaccgaggaggagatgagaaagctgttcgagaagtacggcaaggccggcgaggtgttcatccacaaggacaagggcttcggcttcatcagactggagaccagaaccctggccgagatcgccaaggtggagctggacaacatgcccctgagaggcaagcagctgagagtgagattcgcctgccacagcgccagcctgaccgtgagaaacctgccccagtacgtgagcaacgagctgctggaggaggccttcagcgtgttcggccaggtggagagagccgtggtgatcgtggacgacagaggcagacccagcggcaagggcatcgtggagttcagcggcaagcccgccgccagaaaggccctggacagatag

SEQ ID NO: 58044 - DNA, 708 bp, Artificial Sequence
  derived and/or modified sequence
tagcctgacatcactgaagaagaaatgagaaagcttttcgaaaagtacggtaaagccggtgaggtatttatccacaaagacaaggggttcggttttattaggcttgtcgagcgcgccgtggtgatcgttgacgaccgcggtaggccaagtggaaagggaatagtggaatttagtggcaaaccagccgcaagaaaagcactggaccggtgttccgagggctcattcctgttgaccacctttcctcgacctgtgacggtcgagccaatggatcagctggacgatgaagagggtctgcctgaaaagctggtgattaagaatcagcagttccacaaggaacgggaacagccccctcggttcgcgcagcccggcagtttcgagtatgagtacgcgatgagatggaaggcactcattgagatggagaaacagcagcaggaccaggtggatcgcaatataaaagaggcacgtgagaaactagaaatggagatggaggccgcccggcacgaacatcaagtcatgctcatgagacaggacctaatgcgcagacaagaggagctgcgtcggatggaggaactccacaaccaggaggtgcagaaaagaaagcagcttgaattgcgccaggaggaagaacgccgtcgacgggaggaggagatgcgccgccagcaagaggagatgatgagaaggcagcaggaggggttcaaagggacctag

SEQ ID NO: 58045 - DNA, 1149 bp, Artificial Sequence
  derived and/or modified sequence
atgcgcaagctctttgaaaaatatgggaaggctggtgaggtgttcatccacaaggacaagggctttggcttcattcgactggagactcgcacactcgcagagatcgcaaaggtcgagctcgacaacatgcctttacggggcaaacagcttcgagtcaggttcgcatgtcactcagcatctctgactgttcgtaatctcccacagtatgtgtcaaatgagctcctcgaggaggcattctcagttttcgggcaggtcgaacgggcggtggtaatcgtggacgacaggggacgacccagtggcaaggggatcgtcgaattcagtggtaagccagcggcccggaaagccctggacagatgctcggagggatccttcctcctcactacatttccccgccccgtgaccgtagagcccatggaccaactagacgacgaggaggggctcccggaaaaactagtgattaaaaatcagcagtttcataaggaacgtgagcagcctcctagatttgctcagccagggtcattcgagtatgagtacgccatgagatggaaggccctcattgaaatggagaagcaacagcaagatcaagtggatcggaatattaaagaggctagggaaaaacttgaaatggagatggaggccgcaagacacgagcatcaggttatgctcatgcgccaggatctgatgcgcagacaggaggaactacgtaggatggaggagctacacaatcaggaagtccaaaagaggaagcaactcgaactgagacaggaggaggagcgcaggagacgggaagaggagatgcgccggcagcaggaggagatgatgaggcggcaacaagaaggtttcaaagggacatttcccgacgctcgagagcaggagatcaggatgggacaaatggcaatgggtggcgctatgggcatcaacaatcggggcgccatgcccccggccccagtgccggccggcacccctgctccgcctggccctgcaacaatgatgccagacgggactctagggctgacccccccaacgacagagcgttttggacaggctgccacaatggagggcattggtgcaataggcggaactcctcctgccttcaacagagctgctccaggtgccgagttcgcaccaaataagaggcgccgatactag

SEQ ID NO: 58046 - DNA, 708 bp, Artificial Sequence
  derived and/or modified sequence
tgaccagacatcacagaggaggagatgaggaagctgtttgagaagtatggcaaggccggggaggtgttcatccacaaggacaagggcttcggcttcatccggctggtggagagagctgtggtgattgtggatgaccggggccggcccagcggcaagggcatcgtggagttcagcggcaagccagctgccaggaaggccctggaccgctgcagcgagggcagcttcctgctgaccaccttccccaggcctgtgacagtggagcccatggaccagctggatgatgaggagggcctgcctgagaagctggtgatcaagaaccagcagttccacaaggagcgggagcagccccccaggtttgcccagcccggcagctttgaatatgaatatgccatgcgctggaaggccctgattgagatggagaagcagcagcaggaccaggtggacaggaacatcaaggaggcccgggagaagctggagatggagatggaggccgcccggcatgagcaccaggtgatgctgatgaggcaggacctgatgaggcggcaggaggagctgcggaggatggaggagctgcacaaccaggaggtgcagaagaggaagcagctggagctgcggcaggaggaggagaggagaagaagagaggaggagatgaggcggcagcaggaggagatgatgaggcggcagcaggagggcttcaagggcacctag

SEQ ID NO: 58047 - DNA, 1149 bp, Artificial Sequence
  derived and/or modified sequence
atgaggaagctgtttgagaagtatggcaaggccggggaggtgttcatccacaaggacaagggcttcggcttcatccggctggagaccaggaccctggccgagatcgccaaggtggagctggacaacatgcccctgcggggcaagcagctgcgggtgcgctttgcctgccacagcgccagcctgactgtgaggaacctgccccagtatgtgtccaatgagctgctggaggaggccttctctgtgtttggccaggtggagagagctgtggtgattgtggatgaccggggccggcccagcgggaaaggaattgtggagttcagcggcaagccagctgccaggaaggccctggaccgctgcagcgagggcagcttcctgctgaccaccttccccaggcctgtgacagtggagcccatggaccagctggatgatgaggagggcctgcctgagaagctggtgatcaagaaccagcagttccacaaggagcgggagcagcccccaagatttgcccagcccggcagctttgaatatgaatatgccatgcgctggaaggccctgattgagatggagaagcagcagcaggaccaggtggacaggaacatcaaggaggcccgggagaagctggagatggagatggaggccgcccggcatgagcaccaggtgatgctgatgaggcaggacctgatgaggcggcaggaggagctgcggaggatggaggagctgcacaaccaggaggtgcagaagaggaagcagctggagctgcggcaggaggaggagaggagaagaagagaggaggagatgaggcggcagcaggaggagatgatgaggcggcagcaggagggcttcaagggcaccttcccagatgcccgggagcaggagatccgcatgggccagatggccatgggcggggccatgggcatcaacaacagaggagccatgcccccagcccctgtgcctgctggcaccccagcccctcctggccctgccaccatgatgccagatggcaccctgggcctgaccccacccaccacagagcgcttcggccaggccgccaccatggagggcattggagccatcggcggcaccccaccagccttcaacagagctgcccctggagctgagtttgcccccaacaagagaagacgctactag

SEQ ID NO: 58048 - DNA, 708 bp, Artificial Sequence
  derived and/or modified sequence
tgacccgacatcaccgaggaggagatgcggaagctgttcgagaagtatggtaaagctggcgaggtgtttatacataaggacaaaggcttcggatttattaggctagttgaaagggccgtggtgatcgtggacgaccgcggaaggccatccgggaagggaattgttgaattttccggcaagcccgcagccagaaaagcactggatcgctgttcggagggatcttttttactcaccaccttcccccgtccagtaacagtcgaaccaatggaccagctcgatgatgaagagggtctgcccgagaaactggtaattaagaaccaacagttccataaggaacgtgagcagccccctaggtttgcgcagcctggaagcttcgagtatgagtacgccatgcgttggaaagctctgatcgagatggagaagcaacagcaagaccaggtcgataggaatatcaaggaagcccgggaaaagctcgagatggagatggaggcagctcgccacgaacatcaggttatgttgatgagacaagaccttatgcgtcgccaggaagagcttcgaagaatggaggagttacacaaccaagaggtccagaagcgaaagcagctggagctgagacaggaagaggagaggagaaggagggaggaggagatgagaaggcagcaagaggaaatgatgcggcggcagcaggaaggtttcaagggcacctag

SEQ ID NO: 58049 - DNA, 1149 bp, Artificial Sequence
  derived and/or modified sequence
atgcggaagctgttcgagaagtacggcaaggccggcgaggtgttcattcataaggacaagggttttggctttattcgactcgaaaccagaaccttggcagagatagcaaaagttgagcttgataacatgcccctgcgaggcaagcagttaagggtgcgcttcgcctgccactccgcctccttgaccgtgaggaatctgccccagtacgtaagcaacgagctgctggaagaagctttcagtgtattcggtcaggtggagcgagccgtagttatcgtagatgatagaggtaggccgtctggaaaaggaatcgtggagttttcaggaaagcccgccgctcgtaaagcactggaccgctgctccgagggcagctttcttcttacaaccttcccccgcccagtgacagttgagccaatggaccagctggacgatgaggagggtttgcccgagaagctcgtcatcaaaaatcagcaatttcataaagagcgcgagcagccacccagatttgctcagcccggttcattcgagtatgagtacgccatgcggtggaaggctctcatcgagatggaaaagcagcaacaggatcaggtcgacagaaatattaaggaggcccgtgagaagctcgagatggagatggaggcggcgcgccatgaacaccaggtgatgctgatgagacaggacttaatgcgaaggcaggaggaactccggcgtatggaggagttgcacaaccaggaagtacagaagaggaaacagctcgaattacgacaagaagaggagagacgacggagagaagaggagatgaggcggcagcaggaggaaatgatgcgacggcagcaggaaggcttcaaaggcacatttccggatgccagagaacaagagatccgtatggggcagatggccatgggcggcgctatgggaataaataaccgcggcgctatgccccccgcacccgtgcccgctgggacacctgctcccccaggccctgccacgatgatgcccgatggcactcttggcttgactcctcctacaacggaacgttttggtcaggccgcaactatggagggtatcggagcaataggtgggactcctcccgcattcaatcgcgcagcacccggagcagagtttgcacctaataagcggagacgatactag

SEQ ID NO: 58050 - DNA, 703 bp, Artificial Sequence
  derived and/or modified sequence
ctcccgacatcactgaggaagaaatgaggaaactatttgagaaatatggaaaggcaggcgaagtcttcattcataaggataaaggatttggctttatccgcttggtagagagggctgtagtcattgtggatgatcgaggaaggccctcaggaaaaggcattgttgagttctcagggaagccagctgctcggaaagctctggacagatgcagtgaaggctccttcctgctaaccacatttcctcgtcctgtgactgtggagcccatggaccagttagatgatgaagagggacttccagagaagctggttataaaaaaccagcaatttcacaaggaacgagagcagccacccagatttgcacagcctggctcctttgagtatgaatatgccatgcgctggaaggcactcattgagatggagaagcagcagcaggaccaagtggaccgcaacatcaaggaggctcgtgagaagctggagatggagatggaagctgcacgccatgagcaccaggtcatgctaatgagacaggatttgatgaggcgccaagaagaacttcggaggatggaagagctgcacaaccaagaggtgcaaaaacgaaagcaactggagctcaggcaggaggaagagcgcaggcgccgtgaagaagagatgcggcggcagcaagaagaaatgatgcggcgacagcaggaaggattcaagggaac

SEQ ID NO: 58051 - DNA, 708 bp, Artificial Sequence
  derived and/or modified sequence
taaccagatattactgaagaggagatgcggaagctttttgagaagtacgggaaagccggtgaggtcttcattcacaaggacaagggctttggctttatccgtctcgtcgagcgagccgtggtaattgtggacgacaggggccgtccatccggtaaaggtatcgtcgaattctcaggaaagccagcggctaggaaagccctggacaggtgttccgaggggtcgttcttacttactactttccccaggccagtgactgtggagcccatggatcagctggatgacgaagaagggttgccagaaaagctagttattaagaatcagcagttccacaaggagcgagaacagccgccacggtttgcacagcctggcagttttgagtacgaatacgcgatgcgttggaaggccctgatcgagatggaaaaacaacaacaggaccaggtggatagaaacattaaggaagctcgcgagaagctggagatggagatggaagctgctaggcacgaacaccaggtgatgcttatgcgacaagatctcatgcgaagacaggaggaactgcgccgtatggaggagctgcacaatcaggaggttcagaagcgcaagcagctggagttgcggcaggaggaagagcgccgacgacgggaggaggagatgagacgccagcaggaggaaatgatgcggagacagcaggaagggttcaaggggacatag

SEQ ID NO: 58052 - DNA, 1149 bp, Artificial Sequence
  derived and/or modified sequence
atgcggaagctctttgagaaatacggcaaggctggcgaggttttcatccacaaggataagggtttcggcttcattcgcttggagacacggaccctcgccgaaatcgccaaagtcgaactcgacaatatgccactgagaggtaaacagcttagggtacggtttgcctgtcattccgcaagtctgactgtgcgtaacctgcctcagtacgtatcaaacgagttactcgaagaggcgttttcggtgttcgggcaggtggagagggcagtcgtaatcgtggatgacagggggaggcctagtgggaaaggcattgtagaattctccgggaaacctgcagctcgcaaggccttggatcgctgcagtgaaggctcttttctgctaaccactttcccacggccagtgacagtcgaacctatggatcagctcgatgacgaagagggactccccgaaaagctcgtgattaagaatcagcagttccacaaagagagagaacagcccccacggttcgcacaacccggttcgttcgagtatgagtatgcaatgagatggaaggccttgatagaaatggaaaagcagcagcaggatcaggtcgaccgaaatattaaggaagcgagggagaagttggagatggagatggaggcggctcgtcacgaacaccaggtgatgctgatgcggcaggatcttatgcggaggcaggaggaactgaggagaatggaggaactacacaatcaagaggtgcagaagcggaagcagctcgaactgagacaggaggaagagagaaggcggagagaagaggaaatgcgaaggcaacaggaggagatgatgcgcagacagcaagaagggttcaagggcactttccccgacgcgcgtgaacaggaaatacggatgggccaaatggccatgggcggagccatgggtattaacaaccggggagccatgccgccagctcctgtaccagctgggactccagctccgcctggacccgctaccatgatgcccgacggaactctcggattgacaccgccaactactgagcgattcggccaggcagctactatggaaggtatcggagccatcggcggtaccccaccagcgttcaacagggctgcaccaggcgctgaattcgcgcctaataagcggcgacggtactag

SEQ ID NO: 58053 - DNA, 708 bp, Artificial Sequence
  derived and/or modified sequence
tgacccgacatcaccgaggaggagatgagaaagctgttcgagaagtacggcaaggccggcgaggtgttcatccacaaggacaagggcttcggcttcatcagactggtggagagagccgtggtgatcgtggacgacagaggcagacccagcggcaagggcatcgtggagttcagcggcaagcccgccgccagaaaggccctggacagatgcagcgagggcagcttcctgctgaccaccttccccagacccgtgaccgtggagcccatggaccagctggacgacgaggagggcctgcccgagaagctggtgatcaagaaccagcagttccacaaggagagagagcagccccccagattcgcccagcccggcagcttcgagtacgagtacgccatgagatggaaggccctgatcgagatggagaagcagcagcaggaccaggtggacagaaacatcaaggaggccagagagaagctggagatggagatggaggccgccagacacgagcaccaggtgatgctgatgagacaggacctgatgagaagacaggaggagctgagaagaatggaggagctgcacaaccaggaggtgcagaagagaaagcagctggagctgagacaggaggaggagagaagaagaagagaggaggagatgagaagacagcaggaggagatgatgagaagacagcaggagggcttcaagggcacctag

SEQ ID NO: 58054 - DNA, 1149 bp, Artificial Sequence
  derived and/or modified sequence
atgagaaagctgttcgagaagtacggcaaggccggcgaggtgttcatccacaaggacaagggcttcggcttcatcagactggagaccagaaccctggccgagatcgccaaggtggagctggacaacatgcccctgagaggcaagcagctgagagtgagattcgcctgccacagcgccagcctgaccgtgagaaacctgccccagtacgtgagcaacgagctgctggaggaggccttcagcgtgttcggccaggtggagagagccgtggtgatcgtggacgacagaggcagacccagcggcaagggcatcgtggagttcagcggcaagcccgccgccagaaaggccctggacagatgcagcgagggcagcttcctgctgaccaccttccccagacccgtgaccgtggagcccatggaccagctggacgacgaggagggcctgcccgagaagctggtgatcaagaaccagcagttccacaaggagagagagcagccccccagattcgcccagcccggcagcttcgagtacgagtacgccatgagatggaaggccctgatcgagatggagaagcagcagcaggaccaggtggacagaaacatcaaggaggccagagagaagctggagatggagatggaggccgccagacacgagcaccaggtgatgctgatgagacaggacctgatgagaagacaggaggagctgagaagaatggaggagctgcacaaccaggaggtgcagaagagaaagcagctggagctgagacaggaggaggagagaagaagaagagaggaggagatgagaagacagcaggaggagatgatgagaagacagcaggagggcttcaagggcaccttccccgacgccagagagcaggagatcagaatgggccagatggccatgggcggcgccatgggcatcaacaacagaggcgccatgccccccgcccccgtgcccgccggcacccccgccccccccggccccgccaccatgatgcccgacggcaccctgggcctgaccccccccaccaccgagagattcggccaggccgccaccatggagggcatcggcgccatcggcggcaccccccccgccttcaacagagccgcccccggcgccgagttcgcccccaacaagagaagaagatactag

SEQ ID NO: 58055 - protein, 589 aa, Artificial Sequence
  derived and/or modified sequence
MDLIDILWRQDIDLGVSREVFDFSQRRKEYELEKQKKLEKERQEQLQKEQEKAFFAQLQLDEETGEFLPIQPAQHIQSETSGSANYSQVAHIPKSDALYFDDCMQLLAQTFPFVDDNEVSSATFQSLVPDIPGHIESPVFIATNQAQSPETSVAQVAPVDLDGMQQDIEQVWEELLSIPELQCLNIENDKLVETTMVPSPEAKLTEVDNYHFYSSIPSMEKEVGNCSPHFLNAFEDSFSSILSTEDPNQLTVNSLNSDATVNTDFGDEFYSAFIAEPSISNSMPSPATLSHSLSELLNGPIDVSDLSLCKAFNQNHPESTAEFNDSDSGISLNTSPSVASPEHSVESSSYGDTLLGLSDSEVEELDSAPGSVKQNGPKTPVHSSGDMVQPLSPSQGQSTHVHDAQCENTPEKELPVSPGHRKTPFTKDKHSSRLEAHLTRDELRAKALHIPFPVEKIINLPVVDFNEMMSKEQFNEAQLALIRDIRRRGKNKVAAQNCRKRKLENIVELEQDLDHLKDEKEKLLKEKGENDKSLHLLKKQLSTLYLEVFSMLRDEDGKPYSPSEYSLQQTRDGNVFLVPKSKKPDVKKN

SEQ ID NO: 58056 - protein, 280 aa, Artificial Sequence
  derived and/or modified sequence
MDLIDILWRQDIDLGVSREVFDFSQRRKEYELEKQKKLEKERQEQLQKEQEKAFFAQLQLDEETGEFLPIQPAQHIQSETSGSANYSQVAHIPKSDALYFDDCMQLLAQTFPFVDDNEVSSATFQSLVPDIPGHIESPVFIATNQAQSPETSVAQVAPVDLDGMQQDIEQVWEELLSIPELQCLNIENDKLVETTMVPSPEAKLTEVDNYHFYSSIPSMEKEVGNCSPHFLNAFEDSFSSILSTEDPNQLTVNSLNSDATVNTDFGDEFYSAFIAEPSIS

SEQ ID NO: 58057 - DNA, 1770 bp, Artificial Sequence
  derived and/or modified sequence
atggatcttatagacattctgtggcgtcaggatatagacctgggggtcagtcgtgaggtttttgactttagtcagcgaaggaaggaatacgagctggagaagcagaagaagttagaaaaggagagacaggaacagttgcagaaagagcaggaaaaggccttttttgcccagttacagctggacgaggaaactggtgagtttctgcctatccagcccgctcagcacatccagtcggaaaccagcgggtccgccaactattcacaggtggcccatataccaaaatctgacgctctgtattttgatgactgcatgcagctgctggcacagacttttccgttcgtggatgataacgaggttagctctgctactttccagtctctggtgcctgatatacccggccacatcgagtcccccgtttttatcgcaaccaaccaagcccagagccccgagacctccgtggcccaagtcgccccagtggacttggacggtatgcaacaagatatcgaacaagtctgggaagaactcctgagcattcccgagctgcagtgtctgaatatcgagaatgacaaattagtagagaccacaatggtgccctctccagaggctaagctgacagaagtagacaattaccacttctattctagcattccaagtatggaaaaggaggtgggaaactgctcaccgcattttctgaatgcttttgaggactccttcagttccattctcagtactgaggacccgaatcaattaacagttaacagtttgaatagcgacgccacagttaatacagattttggcgacgagttctacagcgcattcatcgctgagccctccatatctaacagcatgccttctcccgctacgctgtcacacagtctcagcgaactgttgaacggaccaattgatgtgagcgacctttccctttgcaaagcgttcaaccagaatcaccccgagtctacagctgagtttaacgactcggacagtgggatatccctcaacacctccccttcggtagcgagccctgaacatagtgttgaaagctcttcgtatggcgacaccctcctaggtctctccgattcagaagtcgaggagctggatagtgctccgggctcggtgaagcagaacggaccaaaaacccctgtgcatagcagcggagacatggtgcaaccacttagccctagccaaggacagtccactcatgtgcacgatgcccagtgcgagaacacccccgagaaagagctgcccgtctctcccggtcatcggaaaacccctttcaccaaggacaagcatagttctcggctcgaagcgcatttaacccgggatgagctgcgtgccaaggccctgcacattcctttccccgtggagaaaataatcaatctcccggtggtggatttcaacgagatgatgagcaaagagcagttcaacgaggcccagttggcactgatacgagatatcaggagaagaggcaagaataaggtggccgcgcagaactgcaggaaacgaaagctggagaatattgtggagctggaacaagacctggatcacctgaaggacgagaaggagaaacttctgaaggagaagggcgaaaatgataaatctctgcacctgctaaaaaagcaactctctacgctgtatctggaagtgttctccatgctccgagatgaagacgggaagccctatagccccagtgagtactctctccagcagacgagagacggtaatgttttcctagtgcctaaatcaaaaaaacctgatgtaaaaaagaactag

SEQ ID NO: 58058 - DNA, 705 bp, Artificial Sequence
  derived and/or modified sequence
atggacctgatcgacatcctgtggcgccaggacatcgatttgggggtctcgagggaggtgttcgatttctcacagcgccgcaaagaatacgagcttgaaaagcaaaaaaaactcgagaaggagagacaggagcaacttcagaaagaacaagaaaaggcattttttgcgcagctacaacttgacgaggagaccggggagttcctaccgatccagccagctcagcatatccagagcgaaaccagcgggtccgccaattattctcaagtggcccatattccgaagagcgatgccttgtattttgacgattgtatgcaactgctggcccaaacattcccattcgtggacgataatgaggtgtctagcgccaccttccagagtttggttcctgacataccaggccacattgagagcccagtgtttatagccaccaaccaggcgcagtctccagaaacgtccgttgctcaggtggccccagttgacctggatggaatgcagcaggacatcgaacaggtgtgggaggaactgttatctatcccggaactgcaatgcctgaacatcgaaaatgacaagctagtggagaccaccatggtgccatccccggaggctaaactgactgaggtcgataattaccatttctattcttctataccttccatggagaaggaggtcggaaactgtagcccacactttctcaatgcattttag

SEQ ID NO: 58059 - DNA, 843 bp, Artificial Sequence
  derived and/or modified sequence
atggatctcatcgacatcctctggcgccaggatatcgaccttggcgtgtcgcgagaagtattcgacttcagccaacggaggaaagagtacgagttagagaaacaaaaaaaattggagaaagaacgccaagaacagttacagaaggaacaagagaaagccttctttgcccagctccagttggatgaggaaacaggagaatttctgcctattcagccggctcaacacatccagagtgaaacctctgggtccgctaattattcccaggtggcacacattcccaagagcgacgcgttgtatttcgacgactgtatgcagcttcttgcccagacatttcccttcgtcgacgacaacgaggtaagtagcgctacatttcaatctctggttccggatatcccaggccatattgaaagtcccgtgttcatcgcaacgaatcaggcacagtcgcctgagactagcgtggcccaggtggcccctgttgacctggatgggatgcagcaggatattgaacaagtctgggaagagcttctctctattcctgaactgcagtgtcttaacatcgagaacgacaagctggttgaaactacgatggtccccagtcctgaagccaaactcaccgaagtggataactatcacttctatagcagtattccgtcaatggaaaaagaggtcggcaactgcagccctcatttcctgaacgccttcgaagactctttttcatctatactgagtaccgaggatcccaaccagttaacagttaattcactgaatagtgatgcgactgtgaacacagactttggagacgagttttattccgcttttatcgccgagccttctatttcctag

SEQ ID NO: 58060 - DNA, 1770 bp, Artificial Sequence
  derived and/or modified sequence
atggacctgattgacatcctgtggaggcaggacatcgacctgggcgtgtcccgggaggtgtttgacttcagccagaggaggaaggagtatgagctggagaagcagaagaagctggagaaggagcggcaggagcagctgcagaaggagcaggagaaggccttctttgcccagctgcagctggatgaggagaccggggagttcctgcccatccagcctgcccagcacatccagagcgagaccagcggcagcgccaactacagccaggtggcccacatccccaagagtgatgccctgtactttgatgactgcatgcagctgctggcccagaccttcccctttgtggatgacaatgaggtgtcctctgccaccttccagagcctggtgcctgacatccctggccacatcgagagccctgtgttcatcgccaccaaccaggcccagagccctgagacctctgtggcccaggtggcccctgtggacctggatggcatgcagcaggacatcgagcaggtgtgggaggagctgctgagcatccctgagctgcagtgcctgaacattgaaaatgacaagctggtggagaccaccatggtgcccagccctgaggccaagctgacagaggtggacaactaccacttctacagcagcatccccagcatggagaaggaggtgggcaactgcagcccccacttcctgaatgcctttgaagattccttcagcagcatcctgagcacagaggaccccaaccagctgactgtgaacagcctgaacagtgatgccaccgtgaacacagactttggagatgagttctacagcgccttcatcgccgagcccagcatcagcaacagcatgcccagccctgccaccctgagccacagcctgtctgagctgctgaatggccccattgatgtgtctgacctgagcctgtgcaaggccttcaaccagaaccaccctgagagcacagctgagttcaatgacagcgacagcggcatcagcctgaacaccagccccagcgtggccagccctgagcacagcgtggagagcagcagctatggagacaccctgctgggcctgagtgacagcgaggtggaggagctggacagcgcccctggctctgtgaagcagaatggccccaagacccctgtgcacagcagcggggacatggtgcagcccctgagccccagccagggccagagcacccacgtgcatgatgcccagtgtgagaacaccccagagaaggagctgcctgtgtccccaggccacaggaagacccccttcaccaaggacaagcacagcagccggctggaggcccacctgaccagagatgagctgcgggccaaggccctgcacatccccttccctgtggagaagatcatcaacctgcctgtggtggacttcaatgagatgatgagcaaggagcagttcaatgaggcccagctggccctgatccgggacatcagaagaagaggcaagaacaaggtggccgcccagaactgcaggaagaggaagctggagaacatcgtggagctggagcaggacctggaccacctgaaggatgagaaggagaagctgctgaaggagaagggagaaaatgacaagagcctgcacctgctgaagaagcagctgagcaccctgtacctggaggtgttctccatgctgagagatgaagatggcaagccctacagccccagcgagtacagcctgcagcagaccagagatggaaatgtgttcctggtgcccaagagcaagaagccagatgtgaagaagaactag

SEQ ID NO: 58061 - DNA, 705 bp, Artificial Sequence
  derived and/or modified sequence
atggacctgattgacatcctgtggaggcaggacatcgacctgggcgtgtcccgggaggtgtttgacttcagccagaggaggaaggagtatgagctggagaagcagaagaagctggagaaggagcggcaggagcagctgcagaaggagcaggagaaggccttctttgcccagctgcagctggatgaggagaccggggagttcctgcccatccagcctgcccagcacatccagagcgagaccagcggcagcgccaactacagccaggtggcccacatccccaagagtgatgccctgtactttgatgactgcatgcagctgctggcccagaccttcccctttgtggatgacaatgaggtgtcctctgccaccttccagagcctggtgcctgacatccctggccacatcgagagccctgtgttcatcgccaccaaccaggcccagagccctgagacctctgtggcccaggtggcccctgtggacctggatggcatgcagcaggacatcgagcaggtgtgggaggagctgctgagcatccctgagctgcagtgcctgaacattgaaaatgacaagctggtggagaccaccatggtgcccagccctgaggccaagctgacagaggtggacaactaccacttctacagcagcatccccagcatggagaaggaggtgggcaactgcagcccccacttcctgaatgccttctag

SEQ ID NO: 58062 - DNA, 843 bp, Artificial Sequence
  derived and/or modified sequence
atggacctgattgacatcctgtggaggcaggacatcgacctgggcgtgtcccgggaggtgtttgacttcagccagaggaggaaggagtatgagctggagaagcagaagaagctggagaaggagcggcaggagcagctgcagaaggagcaggagaaggccttctttgcccagctgcagctggatgaggagaccggggagttcctgcccatccagcctgcccagcacatccagagcgagaccagcggcagcgccaactacagccaggtggcccacatccccaagagtgatgccctgtactttgatgactgcatgcagctgctggcccagaccttcccctttgtggatgacaatgaggtgtcctctgccaccttccagagcctggtgcctgacatccctggccacatcgagagccctgtgttcatcgccaccaaccaggcccagagccctgagacctctgtggcccaggtggcccctgtggacctggatggcatgcagcaggacatcgagcaggtgtgggaggagctgctgagcatccctgagctgcagtgcctgaacattgaaaatgacaagctggtggagaccaccatggtgcccagccctgaggccaagctgacagaggtggacaactaccacttctacagcagcatccccagcatggagaaggaggtgggcaactgcagcccccacttcctgaatgcctttgaagattccttcagcagcatcctgagcacagaggaccccaaccagctgactgtgaacagcctgaacagtgatgccaccgtgaacacagactttggagatgagttctacagcgccttcatcgccgagcccagcatctcctag

SEQ ID NO: 58063 - DNA, 1770 bp, Artificial Sequence
  derived and/or modified sequence
atggacctgatcgacatcctgtggcggcaggacatcgacctgggcgtgtctcgtgaggtcttcgacttctctcagcggagaaaggaatatgaactggagaaacagaaaaaacttgaaaaagagaggcaggagcagctccaaaaggaacaggagaaggccttctttgcgcaactccaacttgatgaggagaccggtgagttcttgcccatccagcctgcccagcatatccagtctgagacttccggctcagcaaactatagccaggttgcgcacattcccaagtcagatgcactatactttgacgattgtatgcaattgttagcccagacctttcccttcgtggatgataatgaggtctctagcgccacttttcaaagcttggtccctgatatccctggccacatagaatcgcccgtctttattgcaactaaccaggcccaaagtccagagacctctgtggcccaggtggcccctgtagatcttgacggtatgcagcaggatattgagcaagtttgggaagaactcctgagtattcctgagctacagtgtctgaacatagaaaacgacaagctggttgagacaacaatggtgcctagcccagaagccaaactgacagaagtggacaattaccatttttattcttctattccttcaatggagaaggaggtcggcaactgcagtcctcatttcctcaacgccttcgaagactcgttctcatctattttgtctacagaggatcctaatcaactcactgtcaactctctcaattcagacgccaccgtgaacaccgacttcggtgacgaattctatagtgcctttatcgcggaaccgtctattagcaattcaatgccgtctcctgcaactctgagtcattcactgagtgaactactcaacggtccgatagatgtaagtgatttatcactatgtaaggcttttaatcagaatcaccccgagtcaactgctgaatttaacgattccgattccggaattagcctgaatacgtccccgtcagtagcgtctccagagcactctgtggaaagctcctcctacggggacacactactggggctcagcgattcagaagttgaagaactagatagcgcccccggcagtgtcaagcagaacggtccgaagactccagtgcatagcagcggagacatggtgcaaccactctccccctcccaggggcaatcaactcatgtgcacgacgcacaatgcgagaacacgcccgagaaggaactgcccgtttccccaggccatcggaagacaccctttacaaaggataagcactcttctagattagaagcccatctgacccgggacgaattaagggcgaaggcactccacatcccatttcctgtcgaaaagatcatcaacctccccgtggtagattttaacgagatgatgtcaaaagagcagttcaacgaagcccagctggccttaattcgggacatcagacgaagggggaagaacaaggttgcggcccagaactgccgaaagagaaaactcgaaaacatagttgaattggagcaggatttggaccacctaaaagatgagaaggagaagctgctgaaggagaaaggcgaaaatgacaagtctttgcatctcctgaagaagcagctgagtactctgtacctggaggtgtttagcatgcttcgcgacgaagacggaaagccatacagcccttcagaatacagcctgcagcagacccgggacgggaacgtgtttcttgtgccgaaaagcaagaagccagacgtgaaaaagaactag

SEQ ID NO: 58064 - DNA, 705 bp, Artificial Sequence
  derived and/or modified sequence
atggacctgatcgacatcctgtggcggcaggacatcgacctgggcgtaagtagggaagttttcgactttagtcagcgcaggaaggagtatgaactcgaaaagcaaaaaaagctggagaaggaacgacaagagcagctgcagaaggaacaagagaaagccttttttgcacaactgcagctggatgaggagacaggagagttcttgcctattcagccagcgcagcatatacagagcgaaaccagcggctcagcgaactactcccaagtcgcgcacattcctaaaagtgacgcgttgtacttcgacgattgtatgcaattgctagcacaaactttccctttcgttgacgataacgaggtctcctccgcgacatttcagtctttggttcctgacatccctggccacattgagagtcctgtatttatcgccaccaaccaggcacagagccccgagacctccgttgcccaggttgccccagttgatcttgatgggatgcagcaggatatcgagcaggtatgggaagagctgctatctattcccgaactgcagtgtctaaacatcgagaatgacaagctagtcgagacaacaatggtcccttcccccgaagcaaagctcacagaagtcgataactaccacttttactccagcatcccctccatggagaaagaagtgggaaactgctctccacattttctgaatgccttctag

SEQ ID NO: 58065 - DNA, 843 bp, Artificial Sequence
  derived and/or modified sequence
atggacctgatcgacatcctgtggcggcaggacatcgacctgggcgtgagtcgagaagtctttgatttctctcagaggagaaaagaatatgaactggagaagcagaagaagctcgaaaaggagagacaggaacaactgcagaaggaacaggaaaaggccttctttgctcaactgcaattggatgaggaaaccggtgagttcctgcccatccagcccgctcaacacatccaatctgagacaagcggctctgccaactattcacaggtcgcacacatccctaagtcagatgctctgtatttcgacgactgcatgcagctgcttgcacagacctttccatttgtcgatgataacgaggtatcctctgcgacttttcagtcgctcgtccctgacatcccaggccatattgaaagccccgtgtttatagctactaatcaggcccagtctcccgagacatccgtggctcaggtcgcaccagttgatctcgacggcatgcaacaggatattgagcaggtgtgggaggaactgctgtcaatcccggagctgcaatgtttgaacatcgagaacgataaactggtggagacgaccatggtgccaagccccgaggcaaagctgaccgaagttgataattatcacttctactcgtcaattccctctatggaaaaagaggtggggaattgcagccctcacttcctcaatgcattcgaggatagtttctcgtctatcttaagcacagaggacccgaatcaactcacggtcaactctttgaactctgacgctaccgtcaatacagactttggcgatgagttctattccgcgttcatcgcggaaccaagcataagctag

SEQ ID NO: 58066 - DNA, 1770 bp, Artificial Sequence
  derived and/or modified sequence
atggatctgattgacatcctgtggagacaggatatcgacttaggcgtcagccgcgaggtgttcgacttcagccagagacgaaaggagtatgaacttgaaaagcagaagaagctggagaaagaaagacaagaacaactgcagaaggaacaggagaaggctttctttgctcagctccagttagacgaagagacaggggaatttctcccaattcagcctgcccaacatatacagtccgaaaccagtgggtctgcgaattactctcaggtcgcccacatcccaaaatccgacgctttatacttcgatgactgtatgcagctcctggcccagacttttccctttgtggacgataatgaggtttccagcgcaaccttccagtccctagttccggatatccccggacacatagaaagccccgtcttcatagcaacaaatcaggcacagtcgccagagacctcagtggctcaggtggcccctgtagatcttgacgggatgcaacaggacatcgaacaggtctgggaggaattgctgagtatccccgagcttcagtgcctgaatattgagaatgacaagctggtggagactacaatggtgccctcaccggaggctaagctcactgaagttgacaactatcacttttactcatctattccctctatggagaaggaggtcgggaattgctccccacatttcctcaatgcctttgaggactcgttctcctcgattctgtccaccgaagaccccaatcaactcaccgtgaacagcctgaactcggacgcaaccgtcaataccgacttcggcgacgagttctactccgctttcattgccgaaccgtcgatcagtaatagcatgccttcgcctgctactttgtcccactctctgtctgagctgctgaacggaccaatagacgtgagcgatctgagcctctgtaaggcttttaaccagaatcaccctgagtctactgccgaattcaacgatagcgactccggtattagcctgaatacaagcccatcagtggcctcgcctgaacatagtgttgagtcctcttcctacggcgatacattgctcgggttatccgactctgaggtagaggaactggattctgcgccaggctcagtgaaacagaacgggccaaagacacctgtgcacagttcgggggacatggtgcagcctctcagtcctagccagggtcagtcaacccacgttcacgatgcacagtgcgaaaatacccctgagaaggagctgccagtttcccctggccacagaaaaacacccttcaccaaggataagcatagctccaggctggaggctcacctgactagggacgagctgagagctaaggccctgcacataccattcccagtcgagaaaattataaacctcccagtggtagactttaacgaaatgatgtccaaggaacagttcaatgaagctcagttggctttgataagggatattcggcgaagaggtaaaaacaaggtggccgcacagaactgcaggaaacggaagttagagaacatcgtggagctggagcaagatctggatcatctgaaggacgaaaaggagaagctgttaaaggagaagggagagaacgacaagtctctccatttattaaagaaacaacttagcacattatatctggaagtgttctccatgttgagagacgaagacggcaaaccatatagcccttccgagtactccctgcagcagaccagagatggaaatgtgtttctagtgcccaagtccaagaagccagacgtgaagaaaaactag

SEQ ID NO: 58067 - DNA, 705 bp, Artificial Sequence
  derived and/or modified sequence
atggacctcatcgacatcttgtggagacaggacatcgatctgggcgtatcgcgcgaggtttttgatttttctcagagaagaaaagaatatgagttggagaaacagaagaagttggaaaaggaaagacaggaacagctccagaaggaacaggaaaaagccttcttcgcacaactccagctcgatgaggagacaggcgaattcctgccaatacagcccgctcaacatatccagagcgagacgtccggttcagccaattactcccaagtcgcacacattcctaaaagtgacgccctgtacttcgacgactgtatgcaattattggcgcagacttttcctttcgtggacgacaacgaagtaagcagtgccacctttcagtctctcgttccagatataccaggacacatcgaaagccctgtttttatcgccactaatcaggcacagagccctgagacttctgtggcacaggttgctccagtagatctggacggcatgcagcaagacatcgagcaggtgtgggaggagctgctctctatacccgagctgcaatgtttgaacatcgaaaacgacaagcttgtggagactactatggtgcccagtcctgaggctaagcttactgaggtagacaattaccacttctattcaagcataccctccatggaaaaggaagtcggaaattgctccccccattttctgaatgctttctag

SEQ ID NO: 58068 - DNA, 843 bp, Artificial Sequence
  derived and/or modified sequence
atggaccttatcgatatactttggagacaggatatcgatctcggggtttcgcgcgaggtttttgacttctcccagcgtcggaaagagtatgagctggaaaagcagaagaaactggagaaagaacggcaggaacagctgcaaaaggaacaagagaaagcgttcttcgcacaattgcagctggatgaagagactggggagtttctgcctatccaacccgcacagcatattcagtctgagacaagtggcagcgcaaattacagccaagtcgcgcatataccgaaatccgatgccttgtattttgatgactgcatgcagttgcttgcacagacctttcctttcgtcgacgacaacgaagtgagttcagcaacatttcaatctctcgtgcctgatatacccggacacattgagtctccggtttttatagctacaaatcaggcccagagcccggagacaagcgtagctcaggttgcgccagttgatctggacggcatgcagcaagatatcgagcaggtttgggaagagctgctgtctatccccgaattgcagtgcctgaatatcgagaatgacaagctcgtagagaccacgatggtacccagtccagaggccaagttaactgaagtagacaactaccatttttacagctccattcccagcatggaaaaggaggtgggcaattgcagtcctcattttttgaatgcattcgaagattcgttctccagtatcttatctactgaagatccaaatcagctaaccgtgaattccctgaatagtgacgctactgtgaacaccgactttggagacgaattctatagtgctttcatcgccgagcctagtatcagttag

SEQ ID NO: 58069 - DNA, 1770 bp, Artificial Sequence
  derived and/or modified sequence
atggacctgatcgacatcctgtggagacaggacatcgacctgggcgtgagcagagaggtgttcgacttcagccagagaagaaaggagtacgagctggagaagcagaagaagctggagaaggagagacaggagcagctgcagaaggagcaggagaaggccttcttcgcccagctgcagctggacgaggagaccggcgagttcctgcccatccagcccgcccagcacatccagagcgagaccagcggcagcgccaactacagccaggtggcccacatccccaagagcgacgccctgtacttcgacgactgcatgcagctgctggcccagaccttccccttcgtggacgacaacgaggtgagcagcgccaccttccagagcctggtgcccgacatccccggccacatcgagagccccgtgttcatcgccaccaaccaggcccagagccccgagaccagcgtggcccaggtggcccccgtggacctggacggcatgcagcaggacatcgagcaggtgtgggaggagctgctgagcatccccgagctgcagtgcctgaacatcgagaacgacaagctggtggagaccaccatggtgcccagccccgaggccaagctgaccgaggtggacaactaccacttctacagcagcatccccagcatggagaaggaggtgggcaactgcagcccccacttcctgaacgccttcgaggacagcttcagcagcatcctgagcaccgaggaccccaaccagctgaccgtgaacagcctgaacagcgacgccaccgtgaacaccgacttcggcgacgagttctacagcgccttcatcgccgagcccagcatcagcaacagcatgcccagccccgccaccctgagccacagcctgagcgagctgctgaacggccccatcgacgtgagcgacctgagcctgtgcaaggccttcaaccagaaccaccccgagagcaccgccgagttcaacgacagcgacagcggcatcagcctgaacaccagccccagcgtggccagccccgagcacagcgtggagagcagcagctacggcgacaccctgctgggcctgagcgacagcgaggtggaggagctggacagcgcccccggcagcgtgaagcagaacggccccaagacccccgtgcacagcagcggcgacatggtgcagcccctgagccccagccagggccagagcacccacgtgcacgacgcccagtgcgagaacacccccgagaaggagctgcccgtgagccccggccacagaaagacccccttcaccaaggacaagcacagcagcagactggaggcccacctgaccagagacgagctgagagccaaggccctgcacatccccttccccgtggagaagatcatcaacctgcccgtggtggacttcaacgagatgatgagcaaggagcagttcaacgaggcccagctggccctgatcagagacatcagaagaagaggcaagaacaaggtggccgcccagaactgcagaaagagaaagctggagaacatcgtggagctggagcaggacctggaccacctgaaggacgagaaggagaagctgctgaaggagaagggcgagaacgacaagagcctgcacctgctgaagaagcagctgagcaccctgtacctggaggtgttcagcatgctgagagacgaggacggcaagccctacagccccagcgagtacagcctgcagcagaccagagacggcaacgtgttcctggtgcccaagagcaagaagcccgacgtgaagaagaactag

SEQ ID NO: 58070 - DNA, 705 bp, Artificial Sequence
  derived and/or modified sequence
atggacctgatcgacatcctgtggagacaggacatcgacctgggcgtgagcagagaggtgttcgacttcagccagagaagaaaggagtacgagctggagaagcagaagaagctggagaaggagagacaggagcagctgcagaaggagcaggagaaggccttcttcgcccagctgcagctggacgaggagaccggcgagttcctgcccatccagcccgcccagcacatccagagcgagaccagcggcagcgccaactacagccaggtggcccacatccccaagagcgacgccctgtacttcgacgactgcatgcagctgctggcccagaccttccccttcgtggacgacaacgaggtgagcagcgccaccttccagagcctggtgcccgacatccccggccacatcgagagccccgtgttcatcgccaccaaccaggcccagagccccgagaccagcgtggcccaggtggcccccgtggacctggacggcatgcagcaggacatcgagcaggtgtgggaggagctgctgagcatccccgagctgcagtgcctgaacatcgagaacgacaagctggtggagaccaccatggtgcccagccccgaggccaagctgaccgaggtggacaactaccacttctacagcagcatccccagcatggagaaggaggtgggcaactgcagcccccacttcctgaacgccttctag

SEQ ID NO: 58071 - DNA, 843 bp, Artificial Sequence
  derived and/or modified sequence
atggacctgatcgacatcctgtggagacaggacatcgacctgggcgtgagcagagaggtgttcgacttcagccagagaagaaaggagtacgagctggagaagcagaagaagctggagaaggagagacaggagcagctgcagaaggagcaggagaaggccttcttcgcccagctgcagctggacgaggagaccggcgagttcctgcccatccagcccgcccagcacatccagagcgagaccagcggcagcgccaactacagccaggtggcccacatccccaagagcgacgccctgtacttcgacgactgcatgcagctgctggcccagaccttccccttcgtggacgacaacgaggtgagcagcgccaccttccagagcctggtgcccgacatccccggccacatcgagagccccgtgttcatcgccaccaaccaggcccagagccccgagaccagcgtggcccaggtggcccccgtggacctggacggcatgcagcaggacatcgagcaggtgtgggaggagctgctgagcatccccgagctgcagtgcctgaacatcgagaacgacaagctggtggagaccaccatggtgcccagccccgaggccaagctgaccgaggtggacaactaccacttctacagcagcatccccagcatggagaaggaggtgggcaactgcagcccccacttcctgaacgccttcgaggacagcttcagcagcatcctgagcaccgaggaccccaaccagctgaccgtgaacagcctgaacagcgacgccaccgtgaacaccgacttcggcgacgagttctacagcgccttcatcgccgagcccagcatcagctag

SEQ ID NO: 58072 - protein, 582 aa, Artificial Sequence
  derived and/or modified sequence
MDLIDILWRQDIDLGVSREVFDFSQRRKEYELEKQKKLEKERQEQLQKEQEKAFFAQLQLDEETGEFLPIQPAQHIQSETSGSANYSQVAHIPKSDALYFDDCMQLLAQTFPFVDDNESLVPDIPGHIESPVFIATNQAQSPETSVAQVAPVDLDGMQQDIEQVWEELLSIPELQCLNIENDKLVETTMVPSPEAKLTEVDNYHFYSSIPSMEKEVGNCSPHFLNAFEDSFSSILSTEDPNQLTVNSLNSDATVNTDFGDEFYSAFIAEPSISNSMPSPATLSHSLSELLNGPIDVSDLSLCKAFNQNHPESTAEFNDSDSGISLNTSPSVASPEHSVESSSYGDTLLGLSDSEVEELDSAPGSVKQNGPKTPVHSSGDMVQPLSPSQGQSTHVHDAQCENTPEKELPVSPGHRKTPFTKDKHSSRLEAHLTRDELRAKALHIPFPVEKIINLPVVDFNEMMSKEQFNEAQLALIRDIRRRGKNKVAAQNCRKRKLENIVELEQDLDHLKDEKEKLLKEKGENDKSLHLLKKQLSTLYLEVFSMLRDEDGKPYSPSEYSLQQTRDGNVFLVPKSKKPDVKKN

SEQ ID NO: 58073 - DNA, 1749 bp, Artificial Sequence
  derived and/or modified sequence
atggatttgattgatatcctctggcgtcaagatattgacctaggcgtgtcaagggaggtgtttgactttagccaacggcggaaggaatatgagttagaaaaacaaaaaaaattagagaaagagcgccaggagcagctgcaaaaagagcaggaaaaagccttcttcgcccagttgcagctggatgaagagaccggggaattcttgcccattcagcctgcccaacacatccaatcggagaccagcggaagcgccaactattctcaggtggctcatatccccaagtcggatgctttgtacttcgacgattgcatgcaactactagcccagacatttccattcgtggatgacaatgagtcgctggtgcccgacataccggggcatatcgaatcccccgtcttcatcgccactaaccaggcccagagccctgagacctctgtggcacaagtggccccagtcgacctggacgggatgcagcaagacatcgagcaggtttgggaagaactactttctatccccgagcttcagtgtctgaatatcgaaaacgacaagctggtcgaaactactatggttccctcacctgaggcgaaactgaccgaggtagacaactaccacttttactcctccatcccttctatggaaaaagaggtcggcaactgttcccctcatttcctcaacgcttttgaggattccttctcaagcattttgtctacagaggatccaaaccagctgaccgttaatagcctgaatagtgacgcgaccgtgaacacggatttcggcgacgaattttactcagcgttcatagccgaaccatccatatccaattccatgccgtcccctgcgactttgagtcactcactttcagagctgcttaatgggcccattgacgttagtgatctgtcgctgtgcaaagctttcaatcaaaaccatcctgaaagcacagcagaattcaacgattctgatagcggcatctcactgaatacaagcccgtcagtggccagccccgagcactctgtggagtcctcaagctacggggataccttgttaggtctgtcggactctgaagtggaagaactggattccgcacctggtagcgtcaagcaaaatggacccaaaacccctgtgcactctagcggcgatatggtacagccattgagcccttcccaaggccagtccacacacgttcacgacgcacagtgtgagaatacacccgaaaaagaactgccagttagccctggtcacagaaaaactccctttaccaaggataagcactcaagcaggttagaggcgcacctgacgagggacgaactgcgagccaaggcactccacatcccattccctgtggagaagattataaaccttcccgtggtagactttaacgagatgatgtctaaagagcagttcaacgaggcccaactcgccttaattagagacattcgacggagagggaagaataaagttgccgcccagaattgtcggaagcgaaaactcgaaaacatcgttgaacttgaacaggaccttgaccatctcaaggatgagaaggagaaactactgaaagagaagggagagaatgacaagtccctgcacctgcttaagaagcagttgtccaccctgtacctcgaagtgttcagcatgctgcgcgacgaagacggaaaaccttactccccttcagagtacagcctgcagcagacccgcgacggcaatgttttcctggtcccaaaatccaagaagcccgatgtgaaaaagaattag

SEQ ID NO: 58074 - DNA, 1749 bp, Artificial Sequence
  derived and/or modified sequence
atggacctgattgacatcctgtggaggcaggacatcgacctgggcgtgtcccgggaggtgtttgacttcagccagaggaggaaggagtatgagctggagaagcagaagaagctggagaaggagcggcaggagcagctgcagaaggagcaggagaaggccttctttgcccagctgcagctggatgaggagaccggggagttcctgcccatccagcctgcccagcacatccagagcgagaccagcggcagcgccaactacagccaggtggcccacatccccaagagtgatgccctgtactttgatgactgcatgcagctgctggcccagaccttcccctttgtggatgacaatgaaagcctggtgcctgacatccctggccacatcgagagccctgtgttcatcgccaccaaccaggcccagagccctgagacctctgtggcccaggtggcccctgtggacctggatggcatgcagcaggacatcgagcaggtgtgggaggagctgctgagcatccctgagctgcagtgcctgaacattgaaaatgacaagctggtggagaccaccatggtgcccagccctgaggccaagctgacagaggtggacaactaccacttctacagcagcatccccagcatggagaaggaggtgggcaactgcagcccccacttcctgaatgcctttgaggacagcttcagcagcatcctgagcacagaggaccccaaccagctgactgtgaacagcctgaacagtgatgccaccgtgaacacagactttggagatgagttctacagcgccttcatcgccgagcccagcatcagcaacagcatgcccagccctgccaccctgagccacagcctgtctgagctgctgaatggccccattgatgtgtctgacctgagcctgtgcaaggccttcaaccagaaccaccctgagagcacagctgagttcaatgacagcgacagcggcatcagcctgaacaccagccccagcgtggccagccctgagcacagcgtggagagcagcagctatggagacaccctgctgggcctgagtgacagcgaggtggaggagctggacagcgcccctggctctgtgaagcagaatggccccaagacccctgtgcacagcagcggggacatggtgcagcccctgagccccagccagggccagagcacccacgtgcatgatgcccagtgtgagaacaccccagagaaggagctgcctgtgtccccaggccacaggaagacccccttcaccaaggacaagcacagcagccggctggaggcccacctgaccagagatgagctgcgggccaaggccctgcacatccccttccctgtggagaagatcatcaacctgcctgtggtggacttcaatgagatgatgagcaaggagcagttcaatgaggcccagctggccctgatccgggacatcagaagaagaggcaagaacaaggtggccgcccagaactgcaggaagaggaagctggagaacatcgtggagctggagcaggacctggaccacctgaaggatgagaaggagaagctgctgaaggagaagggggagaatgacaagagcctgcacctgctgaagaagcagctgagcaccctgtacctggaggtgttctccatgctgagagatgaagatggcaagccctacagccccagcgagtacagcctgcagcagaccagagatggaaatgtgttcctggtgcccaagagcaagaagccagatgtgaagaagaactag

SEQ ID NO: 58075 - DNA, 1749 bp, Artificial Sequence
  derived and/or modified sequence
atggacctgatcgacatcctgtggcggcaggacatcgacctgggcgtatctagagaagtgtttgacttctcacagcgtcggaaagagtatgagttagaaaagcaaaaaaaactggagaaagagcgacaagagcagctccaaaaagaacaggagaaggcattcttcgcgcaactgcaattggatgaagagaccggcgaatttctgccaatacagcccgcccagcacatccagtctgagactagtggctccgcaaattactctcaggtggcacatatccccaagtctgatgctctttactttgacgactgcatgcagctgctggcacagactttccccttcgtggatgataacgaatcccttgttcccgacatcccgggccacatcgagagtccggtgttcatcgctacaaaccaggcccagtccccagagacttcggttgcgcaagtggcaccagtggatctcgatggcatgcagcaggatatcgaacaggtgtgggaagaattactgtccatcccagaactgcagtgtctgaatatcgagaatgataaactcgttgaaaccacaatggtacccagtcccgaggctaaactcactgaggtagacaactaccatttttactcctccatacctagcatggagaaggaagtgggcaattgttcacctcattttctgaacgcgtttgaagactcttttagctcaattctgtctaccgaggatccgaatcagctcacggtgaacagcctgaactctgacgccacagtgaatacggacttcggggacgagttttactcagcttttattgccgagccttccatctctaactctatgccgtctcctgccactctatcacactcactgtctgaactattaaatgggccaattgacgtgtcagacttatccctgtgtaaggcttttaaccaaaaccatccagagagcactgctgagtttaatgacagcgattccggaatcagcttgaacaccagcccaagtgtcgccagcccagagcattctgtggagagtagctcttatggggatactttactgggcctctccgatagtgaggtagaggaactggattccgcacctggaagtgtgaagcagaatggccctaagactcccgtgcacagtagtggcgatatggtgcagccactctcccccagccaaggacaaagcactcatgtccatgatgcccagtgcgagaatacacctgagaaggaactccccgtgtctcccggccacaggaagaccccctttaccaaagataaacacagcagccgtctggaagcacatctgacgagggatgagctgcgcgcgaaagcgctacacattccgtttcctgtggagaaaattatcaatctgcccgtcgtggactttaacgaaatgatgagcaaggaacagtttaatgaagcacagctcgctctgattcgagacattcggcgaagaggcaaaaataaggtagcggcccaaaactgccggaagagaaaacttgagaatatcgtggaattagagcaggatctggatcacctgaaggacgaaaaagaaaagctgttgaaggagaaaggcgagaacgataaaagcctgcatctccttaaaaagcagttgagcacgttatacttggaagtgttcagcatgctgcgagatgaggacgggaaaccatactcaccctcggagtatagtctccaacagacacgtgatggcaatgttttcttggtacctaaaagtaagaaaccggacgtgaagaagaactag

SEQ ID NO: 58076 - DNA, 2399 bp, Artificial Sequence
  derived and/or modified sequence
gctttatagcgtgcaaacctcgccgcgccagggccaagggacaggttggagctgttgatctgttgcgcaattgctattttccccagagcggctttgtctttggatttagcgtttcagaattgcaattccaaaatgtgtaagacgggatattctcttctgtgctgtcaagggacatggatttgattgacatactttggaggcaagatatagatcttggagtaagtcgagaagtatttgacttcagtcagcgacggaaagagtatgagctggaaaaacagaaaaaacttgaaaaggaaagacaagaacaactccaaaaggagcaagagaaagcctttttcgctcagttacaactagatgaagagacaggtgaatttctcccaattcagccagcccagcacatccagtcagaaaccagtggatctgccaactactcccaggttgcccacattcccaaatcagatgctttgtactttgatgactgcatgcagcttttggcgcagacattcccgtttgtagatgacaatgagtcacttgttcctgatattcccggtcacatcgagagcccagtcttcattgctactaatcaggctcagtcacctgaaacttctgttgctcaggtagcccctgttgatttagacggtatgcaacaggacattgagcaagtttgggaggagctattatccattcctgagttacagtgtcttaatattgaaaatgacaagctggttgagactaccatggttccaagtccagaagccaaactgacagaagttgacaattatcatttttactcatctataccctcaatggaaaaagaagtaggtaactgtagtccacattttcttaatgcttttgaggattccttcagcagcatcctctccacagaagaccccaaccagttgacagtgaactcattaaattcagatgccacagtcaacacagattttggtgatgaattttattctgctttcatagctgagcccagtatcagcaacagcatgccctcacctgctactttaagccattcactctctgaacttctaaatgggcccattgatgtttctgatctatcactttgcaaagctttcaaccaaaaccaccctgaaagcacagcagaattcaatgattctgactccggcatttcactaaacacaagtcccagtgtggcatcaccagaacactcagtggaatcttccagctatggagacacactacttggcctcagtgattctgaagtggaagagctagatagtgcccctggaagtgtcaaacagaatggtcctaaaacaccagtacattcttctggggatatggtacaacccttgtcaccatctcaggggcagagcactcacgtgcatgatgcccaatgtgagaacacaccagagaaagaattgcctgtaagtcctggtcatcggaaaaccccattcacaaaagacaaacattcaagccgcttggaggctcatctcacaagagatgaacttagggcaaaagctctccatatcccattccctgtagaaaaaatcattaacctccctgttgttgacttcaacgaaatgatgtccaaagagcagttcaatgaagctcaacttgcattaattcgggatatacgtaggaggggtaagaataaagtggctgctcagaattgcagaaaaagaaaactggaaaatatagtagaactagagcaagatttagatcatttgaaagatgaaaaagaaaaattgctcaaagaaaaaggagaaaatgacaaaagccttcacctactgaaaaaacaactcagcaccttatatctcgaagttttcagcatgctacgtgatgaagatggaaaaccttattctcctagtgaatactccctgcagcaaacaagagatggcaatgttttccttgttcccaaaagtaagaagccagatgttaagaaaaactagatttaggaggatttgaccttttctgagctagtttttttgtactattatactaaaagctcctactgtgatgtgaaatgctcatactttataagtaattctatgcaaaatcatagccaaaactagtatagaaaataatacgaaactttaaaaagcattggagtgtcagtatgttgaatcagtagtttcactttaactgtaaacaatttcttaggacaccatttgggctagtttctgtgtaagtgtaaatactacaaaaacttatttatactgttcttatgtcatttgttatattcatagatttatatgatgatatgacatctggctaaaaagaaattattgcaaaactaaccactatgtacttttttataaatactgtatggacaaaaaatggcattttttatattaaattgtttagctctggcaaaaaaaaaaaattttaagagctggtactaataaaggattattatgactgttaaa

SEQ ID NO: 58077 - DNA, 1749 bp, Artificial Sequence
  derived and/or modified sequence
atggacctgatcgacatcctgtggcgacaagacatcgatcttggagtatctcgggaggtcttcgacttttctcagagacgcaaggagtacgagctcgagaaacaaaagaaactcgaaaaggaacgacaggaacagcttcagaaggagcaagagaaagcattcttcgcccagctccagttggacgaggagaccggtgaattcctgcccatacagcctgctcaacatatccaatcagaaacaagtggtagcgctaattatagccaggtggctcatatacccaaaagcgacgctttatattttgatgactgtatgcagctcctggcccagacattcccgtttgtggacgataacgagtcccttgtccccgatattccaggacacatagaatcgccggtattcattgccacaaatcaggcccagtcaccagagacgtcagttgctcaagtggcaccagtagatctcgatggcatgcagcaggatatagaacaggtgtgggaggaactcctaagtattccggagttgcagtgtcttaacatagaaaacgataaactcgtggaaacaacgatggtccctagtcctgaggcaaaactgaccgaagtggacaactaccatttttactcatccatccccagcatggagaaggaagtgggcaattgctccccccatttccttaatgcttttgaggactcctttagctctattctgagtactgaagacccaaatcagctcacagtcaactctttgaactcagatgctactgttaacaccgactttggggatgaattttatagtgccttcattgcagagccttcaatttcaaattccatgccaagccctgccaccctatcacacagtctaagcgagcttctgaatgggccaattgacgtttcagatctgtctctgtgcaaggcttttaaccagaatcaccctgaatctaccgcagagttcaatgactccgacagcggaatctctctgaatacgtcacccagtgtggcaagtcctgagcattctgtggaatcctctagttacggcgacactttgttgggccttagcgattctgaagtggaggagctggatagtgcgccaggctctgtgaaacagaacggccctaagactccagttcattcgagtggcgacatggtccagcccctctccccttctcagggtcagagtactcacgtccatgatgcccaatgtgaaaatacccctgagaaagagctgccagtttcccccggacacaggaaaacgccctttacaaaggacaaacactcttcacgtctggaggctcatctgacaagggatgagttgcgcgcaaaagccttgcacattcccttccctgtcgagaaaatcataaacctccctgtagtggacttcaatgaaatgatgtccaaagagcaattcaatgaggcccagctagccttgattcgtgacattcgtcgacgcggaaaaaataaggtggcagcccagaactgtagaaagcgcaagctggaaaatatcgtggaactagaacaggatctggatcaccttaaagacgagaaagagaaactactgaaggaaaagggagaaaacgacaaatcactgcacctgctgaaaaagcagctcagcactctctatctggaagtcttctccatgctcagggacgaagatgggaagccatactccccctcagagtatagcctgcagcagacaagggacggaaacgtgtttttggttccaaaaagtaaaaagccagacgttaagaagaactag

SEQ ID NO: 58078 - DNA, 1749 bp, Artificial Sequence
  derived and/or modified sequence
atggacctgatcgacatcctgtggagacaggacatcgacctgggcgtgagcagagaggtgttcgacttcagccagagaagaaaggagtacgagctggagaagcagaagaagctggagaaggagagacaggagcagctgcagaaggagcaggagaaggccttcttcgcccagctgcagctggacgaggagaccggcgagttcctgcccatccagcccgcccagcacatccagagcgagaccagcggcagcgccaactacagccaggtggcccacatccccaagagcgacgccctgtacttcgacgactgcatgcagctgctggcccagaccttccccttcgtggacgacaacgagagcctggtgcccgacatccccggccacatcgagagccccgtgttcatcgccaccaaccaggcccagagccccgagaccagcgtggcccaggtggcccccgtggacctggacggcatgcagcaggacatcgagcaggtgtgggaggagctgctgagcatccccgagctgcagtgcctgaacatcgagaacgacaagctggtggagaccaccatggtgcccagccccgaggccaagctgaccgaggtggacaactaccacttctacagcagcatccccagcatggagaaggaggtgggcaactgcagcccccacttcctgaacgccttcgaggacagcttcagcagcatcctgagcaccgaggaccccaaccagctgaccgtgaacagcctgaacagcgacgccaccgtgaacaccgacttcggcgacgagttctacagcgccttcatcgccgagcccagcatcagcaacagcatgcccagccccgccaccctgagccacagcctgagcgagctgctgaacggccccatcgacgtgagcgacctgagcctgtgcaaggccttcaaccagaaccaccccgagagcaccgccgagttcaacgacagcgacagcggcatcagcctgaacaccagccccagcgtggccagccccgagcacagcgtggagagcagcagctacggcgacaccctgctgggcctgagcgacagcgaggtggaggagctggacagcgcccccggcagcgtgaagcagaacggccccaagacccccgtgcacagcagcggcgacatggtgcagcccctgagccccagccagggccagagcacccacgtgcacgacgcccagtgcgagaacacccccgagaaggagctgcccgtgagccccggccacagaaagacccccttcaccaaggacaagcacagcagcagactggaggcccacctgaccagagacgagctgagagccaaggccctgcacatccccttccccgtggagaagatcatcaacctgcccgtggtggacttcaacgagatgatgagcaaggagcagttcaacgaggcccagctggccctgatcagagacatcagaagaagaggcaagaacaaggtggccgcccagaactgcagaaagagaaagctggagaacatcgtggagctggagcaggacctggaccacctgaaggacgagaaggagaagctgctgaaggagaagggcgagaacgacaagagcctgcacctgctgaagaagcagctgagcaccctgtacctggaggtgttcagcatgctgagagacgaggacggcaagccctacagccccagcgagtacagcctgcagcagaccagagacggcaacgtgttcctggtgcccaagagcaagaagcccgacgtgaagaagaactag

SEQ ID NO: 58079 - protein, 110 aa, Artificial Sequence
  derived and/or modified sequence
MADTLPSEFDVIVIGTGLPESIIAAACSRSGRRVLHVDSRSYYGGNWASFSFSGLLSWLKEYQENSDIVSDSPVWQDQILENEEAIALSRKDKTIQHVEVFCYARSTLLL

SEQ ID NO: 58080 - DNA, 333 bp, Artificial Sequence
  derived and/or modified sequence
atggcagacacactgccttcagaatttgatgtgattgttataggtaccggcctacctgaatcgattatcgccgccgcttgcagtcgatccggcaggagagtcctgcacgtggatagcagatcctattacggcggcaactgggcctcctttagcttctcaggtctgctttcctggctcaaggagtaccaggaaaactcagatattgtttccgacagcccagtgtggcaggatcaaattctagaaaatgaggaagcaatcgctctgtctaggaaggataagaccattcagcacgtggaagtgttctgctacgcccgctctacccttctgctctag

SEQ ID NO: 58081 - DNA, 333 bp, Artificial Sequence
  derived and/or modified sequence
atggctgacaccctgcccagcgagtttgatgtgattgtcatcggcaccggcctgcctgagagcatcatcgctgctgcctgcagccgcagcggccggcgggtgctgcacgtggacagccgcagctactatggaggcaactgggccagcttctccttcagcggcctgctgtcctggctgaaggagtaccaggagaacagcgacatcgtgtctgacagccctgtgtggcaggaccagatcctggagaatgaggaggccatcgccctgagcaggaaggacaagaccatccagcacgtggaggtgttctgctacgcccggagcaccctgctgctgtag

SEQ ID NO: 58082 - DNA, 333 bp, Artificial Sequence
  derived and/or modified sequence
atggccgacaccctgcccagcgagttcgacgtgatcgtgatcggcacaggtctcccagaaagcattatcgccgcagcctgcagtagatctggacgtcgtgtgctgcatgtcgatagccggtcgtactacggcgggaactgggcatcttttagtttcagtgggctgctttcttggctgaaagagtaccaggaaaatagcgatatcgtctcagattcacccgtatggcaggatcagatcctggagaacgaggaagccatcgcacttagccgcaaggataagacaattcagcatgtcgaggtgttctgctacgcccgctccacactgctcctgtag

SEQ ID NO: 58083 - DNA, 333 bp, Artificial Sequence
  derived and/or modified sequence
atggcagatacccttccaagcgagttcgatgtcatagtgatcggaacaggcctgcccgaatcaatcatcgccgctgcctgttctagatccggtcggcgagtcctgcacgtggactcccgttcttactacgggggaaactgggcctccttctcgttctcgggattactcagttggcttaaggagtaccaggagaactccgacatcgtgagcgatagtccagtctggcaggatcaaattctggaaaatgaagaggctattgccttgagtaggaaagacaaaacaatacagcacgtcgaggtgttctgttatgccagatcgacactcctgctttag

SEQ ID NO: 58084 - DNA, 2820 bp, Artificial Sequence
  derived and/or modified sequence
cgtcaagatggcggatactctcccttcggagtttgatgtgatcgtaatagggacgggtttgcctgaatccatcattgcagctgcatgttcaagaagtggccggagagttctgcatgttgattcaagaagctactatggaggaaactgggccagttttagcttttcaggactattgtcctggctaaaggaataccaggaaaacagtgacattgtaagtgacagtccagtgtggcaagaccagatccttgaaaatgaagaagccattgctcttagcaggaaggacaaaactattcaacatgtggaagtattttgttatgccaggtccacgctgcttttatgagctgtaacactcaccgcgaagatctgcagcttcactcctgcgcccaccgagaccacaagcccaccgggaggaacgaacaactccagacgctctgccttaagagctgtaacattcaccgcgaaggtctgcagcttcactcctgagccagcgagaccacgaacccaccagaaggaagaaactccgaacacatctgaacatcagaaggaacaaactccagacgtgccaccttaagagctgtaacactcaccgcgcgggtccgcggcttcattctttaagtcagtgagaccaagaacccaccaattccggacacaccgatagcattctaatattttacatttgattgcaaggaggactaggcgagaattcaaatggattagtgcaaacccattaccactgcttggaaaatacgtcaaagtatttgggcaatataattctaatatatgtattctaatataaatatatagggtgtatttatatattatgtattctaatataaatatataggatagttattttttgattaccatgacttatttaaaaagtattctgaagtattattcaacttaaaggttttcatgatcatttcaacattaaatttaatacgttgggtattgcaaaacaggctaaagactaaaatgtaaattgtagtaattattctatcataggctaggttcaaacatcatagactgtaaagaactatccagattgttttatcagagctttgttttcctgattcttccttacaataagtgggctacttaatattttggacctaaaatatttttgctacacaaagattgtttttcattgaagtgattttttgtgattacacaatcgagttatggaagggaaatgaaaaaggactagtgtttattggatattatctttgtggcaactgctgtaacctgttgctttacatattaatttcatttattctgtgcagcagtcatgtgcatgagctataggtacatcttactgacaaacagaagctcaaggaatgctagagatagcagagccaaatttgaacttgtgtttttctaactcaaaaacgtgtgctatttccagtgtatcatgttgtatttcagtcatcaggtaaacacatgtatgcacatcaagggaaccaaccgttccaccaagtgaattaagtatttcctttgtgaagactagcacctaagaaagtgcatttacttctttaatttactggaatactatatagtattgtaatgtagttatatctgtaatgagaaattaaagtgcctaactcccagtgttaggaagctatgggaagaatccaatattctttagttgttgagaccagtttatatgccatgggattttttaaattgatacataataattgtatatattcatgggatacaatatgttttggtacatataaacattgtagaatgatcaaattaggctaattagcatatccatcaccttaaacctttattattttttgtgagaacattcagaatcatctcttttagctatttgaaatatgcaatgcattattgttagctatactcaccttactgtgtgatagagtaccagaatgtattcctcctacctaactgtaacattatacccattgaccaacctctcctcatcttcccctccctcctgttctccccagtctctggtaaccactatcaagttttttagatttcacatatgagtgagatcattcagtatttttctttctgttctcagcttatttcacttaatataatgttctccaggctcatccatgttgtcacaaatgacaggatttaattttttttatggctgtgcagtattctattgtgtatatatgccacattttccttgttaattcatttgttgatgggcatttaagttgattccatattttcgcaattgtgaatagtgctccaataaacatgggagtgcagatgtctcttcaacctactgatttcatttcctttggctatatacccagtagtgagggtgaagattgctggatcatatgatagatttatttttaattttttgaggaacttctgtactgttttccataatggctgtactgatttgcattcctaccaacagtgtgtgagagttcttctttcttaccatgtaatagtttcatagtttatgtggggaaataaaagtagctattgtttctagttttagatcttgaacagactataaaaaggtgcaatatattaattcacacttaaatcacacaaactcaagttattcttaggtaaaatatcgttgcttgttaattgcataaagtcatctagtttctttagtgagaagagattttatctttctaaaatattaacaatagctttatacattttctgtcctattttctgcattgtactgaacgttgtttccctttttctggtataatattaaagcaggatgaaaacttatttgttaccttcaaatgaaccaactctaatgtattcataccaaaataaagatttttttgcaataggaatctaaaa

SEQ ID NO: 58085 - DNA, 333 bp, Artificial Sequence
  derived and/or modified sequence
atggccgacaccctgcccagcgagttcgacgtgatcgtgatcggcaccggcctgcccgagagcatcatcgccgccgcctgcagcagaagcggcagaagagtgctgcacgtggacagcagaagctactacggcggcaactgggccagcttcagcttcagcggcctgctgagctggctgaaggagtaccaggagaacagcgacatcgtgagcgacagccccgtgtggcaggaccagatcctggagaacgaggaggccatcgccctgagcagaaaggacaagaccatccagcacgtggaggtgttctgctacgccagaagcaccctgctgctgtag

SEQ ID NO: 58086 - protein, 189 aa, Artificial Sequence
  derived and/or modified sequence
MEEGGNLGGLIKMVHLLVLSGAWGMQMWVTFVSGFLLFRSLPRHTFGLVQSKLFPFYFHISMGCAFINLCILASQHAWAQLTFWEASQLYLLFLSLTLATVNARWLEPRTTAAMWALQTVEKERGLGGEVPGSHQGPDPYRQLREKDPKYSALRQNFFRYHGLSSLCNLGCVLSNGLCLAGLALEIRSL

SEQ ID NO: 58087 - DNA, 570 bp, Artificial Sequence
  derived and/or modified sequence
atggaggagggcggcaacctgggcggcctgatcaagatggtgcacctgctggtgctgagcggcgcctggggcatgcagatgtgggtgaccttcgtgagcggcttcctgctgttcagaagcctgcccagacacaccttcggcctggtgcagagcaagctgttccccttctacttccacatcagcatgggctgcgccttcatcaacctgtgcatcctggccagccagcacgcctgggcccagctgaccttctgggaggccagccagctgtacctgctgttcctgagcctgaccctggccaccgtgaacgccagatggctggagcccagaaccaccgccgccatgtgggccctgcagaccgtggagaaggagagaggcctgggcggcgaggtgcccggcagccaccagggccccgacccctacagacagctgagagagaaggaccccaagtacagcgccctgagacagaacttcttcagataccacggcctgagcagcctgtgcaacctgggctgcgtgctgagcaacggcctgtgcctggccggcctggccctggagatcagaagcctgtag

SEQ ID NO: 58088 - DNA, 570 bp, Artificial Sequence
  derived and/or modified sequence
atggaggagggcggaaacctcggcggacttatcaagatggtccacctattagtcctctcgggagcctggggcatgcaaatgtgggtgacctttgtgagcggttttctcttgttcaggtccctgccgcggcacacattcggcctggttcagtcaaagctgttccctttctacttccatatttctatgggctgcgctttcataaacctgtgcattctcgcatcacagcacgcatgggcccagctcactttctgggaagcgagtcagctttacctactgtttctttctctaactctcgccacagtgaatgcccgatggctcgagccaagaaccactgccgccatgtgggccctccagactgtggaaaaagagagggggttgggaggagaagtgccaggtagtcaccagggcccggacccgtatagacagcttagggagaaagaccctaaatacagtgccttgcgccaaaatttctttaggtatcacgggttgtcctcactgtgcaacttaggttgcgttctgagcaatggactttgcctggcagggctggccctggagattcggagcctatag

SEQ ID NO: 58089 - DNA, 570 bp, Artificial Sequence
  derived and/or modified sequence
atggaagaaggcggaaaccttggcgggctgataaaaatggtccatctcctggtgctgagtggcgcttggggcatgcagatgtgggtgacgtttgtgagcggtttcctcctgtttcgttcactccctcgacacacttttggactggttcagtccaagttgtttccgttctatttccatattagtatgggctgtgctttcattaacctgtgtatccttgctagtcaacatgcatgggcccagttgactttttgggaggcatcgcagttatatctgctctttctcagcttgaccctcgcaacagtgaatgcccgctggcttgaaccacgtactactgcagccatgtgggccctgcagaccgtcgaaaaagagcgggggctcggcggtgaagtaccaggcagtcaccagggtccggacccttaccgccaactgcgggagaaagacccgaaatactctgccctgcgacagaatttcttcaggtaccacgggctgagctccttatgtaaccttggatgcgtgttgagtaatggactgtgcctggccggtctggccttggagattaggtctctttag

SEQ ID NO: 58090 - DNA, 570 bp, Artificial Sequence
  derived and/or modified sequence
atggaagagggtgggaacttgggaggactgattaaaatggtgcatctgctggtactcagtggggcgtggggcatgcaaatgtgggttacattcgtgagcggatttctactgtttagaagtctgcctcggcacacatttgggcttgtacagtccaagctgtttccgttctactttcatatcagtatgggctgcgcatttatcaacttgtgtatcctcgccagtcaacacgcctgggctcagctgactttctgggaagcctctcaactgtacctgttgtttctgtctcttacactggcgacggtgaatgcgcggtggctggagccaaggaccacagctgcaatgtgggcactgcagacagtggaaaaggaacggggcctcggtggagaggtgcctggtagtcaccagggccccgacccctatcgccagctgcgcgaaaaagatcctaagtattctgctctgagacagaattttttcaggtatcacgggttaagctctctgtgcaacctgggctgtgttctcagtaatgggctctgtctagcaggactggccctagaaattcgctcactgtag

SEQ ID NO: 58091 - DNA, 570 bp, Artificial Sequence
  derived and/or modified sequence
atggaggagggcggcaacctgggcggcctcatcaagatggtgcacctgctggtgctgagcggggcctggggcatgcagatgtgggtgacctttgtgtctggcttcctgctcttccgcagcctgcccaggcacaccttcggcctggtgcagagcaagctgttccccttctacttccacatctccatgggctgtgccttcatcaacctgtgcatcctggccagccagcacgcctgggcccagctgaccttctgggaggccagccagctgtacctgctcttcctgagcctgaccctggccaccgtgaatgcccgctggctggagcccaggaccacagctgccatgtgggccctgcagacagtggagaaggagcggggcctgggcggggaggtgcccggcagccaccagggccctgacccctaccggcagctgcgggagaaggaccccaagtacagcgccctgcggcagaacttcttccgctaccacggcctgagcagcctgtgcaacctgggctgtgtgctgagcaatggcctgtgcctggccggcctggccctggagatccgcagcctgtag

SEQ ID NO: 58092 - DNA, 570 bp, Artificial Sequence
  derived and/or modified sequence
atggaggagggcggcaacctgggcggcctgatcaagatggtgcacttactcgtcctgagcggggcttgggggatgcagatgtgggtgacattcgtgtccggttttctgctgtttaggagccttcctcgccacacctttggactggttcagtcaaaactatttcctttctacttccatatcagcatgggatgtgcctttataaatctctgcatactcgcaagccaacacgcctgggcacaactgacattctgggaggcctcacagctgtaccttctgtttttatcactgaccttggcaaccgtaaacgcacggtggctggagcccagaaccaccgcagccatgtgggctttgcaaacagtggaaaaagagaggggactgggcggtgaggtaccaggctcccatcagggcccggacccttataggcagttacgcgaaaaggatcccaagtacagcgccctaagacagaatttcttccggtatcacgggctgagctccctttgtaacctgggctgtgtcttatccaatggtctctgcttagccggcctcgcgcttgaaataagatcattgtag

SEQ ID NO: 58093 - DNA, 570 bp, Artificial Sequence
  derived and/or modified sequence
atggaggagggcggcaacctgggcggcctgatcaagatggtgcacctgctcgttctgtctggagcttggggcatgcagatgtgggtgacatttgttagcggcttccttctgttccggagtcttccgaggcacacttttgggcttgtgcagtcgaagctgtttcctttctacttccacatttctatgggctgtgcttttattaacctctgtatacttgctagccagcacgcttgggcccagctgaccttttgggaagcatcacagctctaccttctgtttttgagccttacattagccaccgtgaacgcccggtggttggagcctcgcacgaccgccgctatgtgggcattgcagactgttgaaaaggagcgcggcctggggggcgaagtgcccggcagccaccaaggccccgacccgtaccgccagctgagagagaaggatcccaaatattctgctctcagacaaaacttttttaggtaccacgggttgtcctcactatgcaatcttggctgtgtgctctccaacggcctttgcctggctggactggccctggagatcagatccttgtag

SEQ ID NO: 58094 - DNA, 570 bp, Artificial Sequence
  derived and/or modified sequence
atggaggagggcggcaacctgggcggcctgatcaagatggtgcacctgcttgtcttgtctggggcctgggggatgcagatgtgggtgacattcgttagcggctttctgctgtttcgctcactgcccagacacacctttgggctcgtgcagtcaaagctcttccccttctatttccatatcagcatgggatgcgcttttatcaatctgtgtattctcgcgtcccagcacgcctgggcccagctcacattttgggaagcatcgcaactgtacctgctgttcctgtccctgactctcgccaccgttaacgctagatggttggagccacggactacagcagccatgtgggcacttcagactgtcgagaaggaaaggggcctgggaggagaggtccccggaagccatcagggaccagacccctacaggcaacttcgcgaaaaggaccccaaatattctgcgttgcgccagaacttcttccgatatcacggactctcatccctctgtaatttggggtgcgttctctcaaatggtctgtgtctggctggcctagccttggaaattcgatccctatag

SEQ ID NO: 58095 - DNA, 570 bp, Artificial Sequence
  derived and/or modified sequence
atggaggaggggggaaacttgggtgggctgatcaaaatggtccatcttctcgtcctgagcggcgcatggggcatgcagatgtgggtgacctttgtgtctggcttcctattgtttagaagcctcccgagacatacctttgggctcgtgcagtccaaactcttccctttctactttcacatctccatgggctgcgccttcatcaatctgtgtattctagcctcgcagcatgcatgggcacaacttaccttctgggaggccagccagctctatctcctcttcctctcactcactctggcaaccgtcaacgctcggtggcttgaacccagaacaacggcagctatgtgggctctccaaactgtggagaaggaaagggggctcggcggagaagtgcccggatctcaccaggggcctgacccataccggcagttacgggagaaagatccaaaatactctgcactgcgccagaatttcttcagataccacggcctgtcctccctctgcaatttaggatgtgttctgtcaaatggactatgtcttgctggcctggccctggaaattagatctctctag

SEQ ID NO: 58096 - DNA, 570 bp, Artificial Sequence
  derived and/or modified sequence
atggaggagggtgggaatttgggaggattaataaaaatggtccatctgctcgtgctctctggggcatgggggatgcaaatgtgggtgacatttgtgtctgggttcctcctttttcgatccttgcctcggcatacgttcgggctggtccaatccaaattattccccttttattttcacatcagtatgggctgtgccttcattaacttatgcattttagctagccagcatgcctgggcacagctgacattttgggaggcctcccagttatatttgcttttcttatcattgaccttagcaaccgttaacgccaggtggctggagccgaggaccacagccgcaatgtgggctttgcagaccgttgagaaggagcggggtcttggaggggaggtgcccggttcccatcagggtcccgacccatacagacagcttagagagaaagacccaaagtatagtgcgctacggcagaatttttttaggtatcatggtctgagttctctgtgtaatctagggtgtgtgctgtccaacggcctttgccttgccggtctggccctggaaattcgttctttgtag

SEQ ID NO: 58097 - DNA, 570 bp, Artificial Sequence
  derived and/or modified sequence
atggaagaggggggtaacctcggcggattgataaagatggtgcacctgctcgtcctgtctggagcgtgggggatgcagatgtgggtcactttcgtcagcggtttcctgctgtttcgttccctgcctcggcacacctttgggctggttcaatccaaactgttccctttctattttcacatcagtatgggatgcgcgtttatcaacctgtgtattttggcctcccagcatgcgtgggctcagctgaccttttgggaggccagtcagctgtacttattgtttctgagcttgaccttagctacagtgaatgcacgatggttagagccccgtactactgcagcaatgtgggccctgcaaacagtggaaaaagagcggggtttgggtggagaggttcctgggagtcaccagggaccggacccctaccggcagctgcgcgagaaggaccccaaatattcagcccttcgtcagaatttcttccggtaccacgggctgtcttcactgtgtaacttgggttgtgtacttagtaatggcctgtgccttgcaggcttagccttggagattaggagtctgtag

SEQ ID NO: 58098 - DNA, 1295 bp, Artificial Sequence
  derived and/or modified sequence
ggctcagctgggaggcgggacgaattattggttgggggaaacccacgaggggacgcggccgaggagggtcgctgtccacccgggggcgtgggagtgaggtaccagattcagcccatttggccccgacgcctctgttctcggaatccgggtgctgcggattgaggtcccggttcctaacggtgggatcggtgtcctcgggatgagatttggcgtttcctcggggctttggtgggatcggtgtcctcaggatgagatttagggtttcctcggggctttcgggatcttcacctaatatccggtattattttatgagaggagtggtcttggctgtcagaactggatccctggggtgatatttgggaattagtggagtgatctctgaagacctagggctatgatctggagctgctgtggctgaaatttggggcctctgaagtggcatggagattgaggtccagagagcctgagatcttgagggctgacatttggagagatggggtcgagggttgtctttgggccttgactgctttgggcctttctcactctcattcccgggatgctttgccagaatctctgctggattggccgtaaccctgtccccgagcgggctcacagggtctgaaggccacgcatgaggcaaaggtaaagttctgagccacccggtgcctccttcccaggactgcaagatggaggaaggcgggaacctaggaggcctgattaagatggtccatctactggtcttgtcaggtgcctggggcatgcaaatgtgggtgaccttcgtctcaggcttcctgcttttccgaagccttccccgacataccttcggactagtgcagagcaaactcttccccttctacttccacatctccatgggctgtgccttcatcaacctctgcatcttggcttcacagcatgcttgggctcagctcacattctgggaggccagccagctttacctgctgttcctgagccttacgctggccactgtcaacgcccgctggctggaaccccgcaccacagctgccatgtgggccctgcaaaccgtggagaaggagcgaggcctgggtggggaggtaccaggcagccaccagggtcccgatccctaccgccagctgcgagagaaggaccccaagtacagtgctctccgccagaatttcttccgctaccatgggctgtcctctctttgcaatctgggctgcgtcctgagcaatgggctctgtctcgctggccttgccctggaaataaggagcctctagcatgggccctgcatgctaataaatgcttcttcagaaatg

SEQ ID NO: 58099 - DNA, 916 bp, Artificial Sequence
  derived and/or modified sequence
ggctcagctgggaggcgggacgaattattggttgggggaaacccacgaggggacgcggccgaggagggtcgctgtccacccgggggcgtgggagtgaggtaccagattcagcccatttggccccgacgcctctgttctcggaatccgggtgctgcggattgaggtcccggttcctaacggtgggatcggtgtcctcgggatgagatttggcgtttcctcggggctttggtgggatcggtgtcctcaggatgagatttagggtttcctcggggctttcgggatcttcacctaatatccggactgcaagatggaggaaggcgggaacctaggaggcctgattaagatggtccatctactggtcttgtcaggtgcctggggcatgcaaatgtgggtgaccttcgtctcaggcttcctgcttttccgaagccttccccgacataccttcggactagtgcagagcaaactcttccccttctacttccacatctccatgggctgtgccttcatcaacctctgcatcttggcttcacagcatgcttgggctcagctcacattctgggaggccagccagctttacctgctgttcctgagccttacgctggccactgtcaacgcccgctggctggaaccccgcaccacagctgccatgtgggccctgcaaaccgtggagaaggagcgaggcctgggtggggaggtaccaggcagccaccagggtcccgatccctaccgccagctgcgagagaaggaccccaagtacagtgctctccgccagaatttcttccgctaccatgggctgtcctctctttgcaatctgggctgcgtcctgagcaatgggctctgtctcgctggccttgccctggaaataaggagcctctagcatgggccctgcatgctaataaatgcttcttcagaaatg

SEQ ID NO: 58100 - DNA, 787 bp, Artificial Sequence
  derived and/or modified sequence
agctgggaggcgggacgaattattggttgggggaaacccacgaggggacgcggccgaggagggtcgctgtccacccgggggcgtgggagtgaggtaccagattcagcccatttggccccgacgcctctgttctcggaatccgggtgctgcggattgaggtcccggttcctaacggactgcaagatggaggaaggcgggaacctaggaggcctgattaagatggtccatctactggtcttgtcaggtgcctggggcatgcaaatgtgggtgaccttcgtctcaggcttcctgcttttccgaagccttccccgacataccttcggactagtgcagagcaaactcttccccttctacttccacatctccatgggctgtgccttcatcaacctctgcatcttggcttcacagcatgcttgggctcagctcacattctgggaggccagccagctttacctgctgttcctgagccttacgctggccactgtcaacgcccgctggctggaaccccgcaccacagctgccatgtgggccctgcaaaccgtggagaaggagcgaggcctgggtggggaggtaccaggcagccaccagggtcccgatccctaccgccagctgcgagagaaggaccccaagtacagtgctctccgccagaatttcttccgctaccatgggctgtcctctctttgcaatctgggctgcgtcctgagcaatgggctctgtctcgctggccttgccctggaaataaggagcctctagcatgggccctgcatgctaataaatgcttcttcag

SEQ ID NO: 58101 - protein, 2481 aa, Artificial Sequence
  derived and/or modified sequence
MEQSPPPAPEPTQGPTPARSRRRREPESPPASAPIPLFGADTIGQRSPDGPVLSKAEFVEKVRQSNQACHDGDFHTAIVLYNEALAVDPQNCILYSNRSAAYMKIQQYDKALDDAIKARLLNPKWPKAYFRQGVALQYLGRHADALAAFASGLAQDPKSLQLLVGMVEAAMKSPMRDSLEPTYQQLQKMKLDKSPFVVVSVVGQELLTAGHHGASVVVLEAALKIGTCSLKLRGSVFSALSSAYWSLGNTEKSTGYMQQDLDVAKTLGDQTGECRAHGNLGSAFFSKGNYREALTNHRHQLVLAMKLKDREAASSALSSLGHVYTAIGDYPNALASHKQCVLLAKQSKDELSEARELGNMGAVYIAMGDFENAVQCHEQHLKIAKDLGNKREEARAYSNLGSAYHYRRNFDKAMSYHNYVLELAQELMEKAIEMRAYAGLGHAARCMQDLERAKQYHEQQLGIAEDLKDRAAEGRASSNLGIIHQMKGDYDTALKLHKTHLCIAQELSDYAAQGRAYGNMGNAYNALGMYDQAVKYHRQELQISMEVNDRASQASTHGNLAVAYQALGAHDRALQHYQNHLNIARELRDIQSEARALSNLGNFHCSRGEYVQAAPYYEQYLRLAPDLQDMEGEGKVCHNLGYAHYCLGNYQEAVKYYEQDLALAKDLHDKLSQAKAYCNLGLAFKALLNFSKAEECQKYLLSLAQSLNNSQAKFRALGNLGDIFICKKDINGAIKFYEQQLGLAHQVKDRRLEASAYAALGTAYRMIQKYDKALGYHTQELEVYQELSDLPGECRAHGHLAAVYMALGKYTMAFKCYEEQLDLGQKLKDPSLEAQVYGNMGITKMNMNVMEEAIGYFEQQLAMLQQLSGNESVLDRGRAYGNLGDCYEALGDYEEAIKYYEQYLSVAQSLNRMQDQAKAYRGLGNGHRAMGSLQQALVCFEKRLVVAHELGEAFNKAQAYGELGSLHSQLGNYEQAISCLERQLNIARDMKDRALESDAACGLGGVYQQMGEYDTALQYHQLDLQIAEETNNPTCQGRAYGNLGLTYESLGTFERAVVYQEQHLSIAAQMNDLAAKTVSYSSLGRTHHALQNYSQAVMYLQEGLRLAEQLGRREDEAKIRHGLGLSLWASGNLEEAQHQLYRASALFETIRHEAQLSTDYKLSLFDLQTSSYQALQRVLVSLGHHDEALAVAERGRTRAFADLLVERQTGQQDSDPYSPVTIDQILEMVNGQRGLVLYYSLAAGYLYSWLLAPGAGIVKFHEHYLGENTVENSSDFQASSSVTLPTATGSALEQHIASVREALGVESHYSRACASSETESEAGDIMDQQFEEMNNKLNSVTDPTGFLRMVRRNNLFNRSCQSMTSLFSNTVSPTQDGTSSLPRRQSSFAKPPLRALYDLLIAPMEGGLMHSSGPVGRHRQLILVLEGELYLIPFALLKGSSSNEYLYERFGLLAVPSIRSLSVQSKSHLRKNPPTYSSSTSMAAVIGNPKLPSAVMDRWLWGPMPSAEEEAYMVSELLGCQPLVGSVATKERVMSALTQAECVHFATHISWKLSALVLTPSMDGNPASSKSSFGHPYTIPESLRVQDDASDGESISDCPPLQELLLTAADVLDLQLPVKLVVLGSSQESNSKVTADGVIALTRAFLAAGAQCVLVSLWPVPVAASKMFIHAFYSSLLNGLKASAALGEAMKVVQSSKAFSHPSNWAGFMLIGSDVKLNSPSSLIGQALTEILQHPERARDALRVLLHLVEKSLQRIQNGQRNAMYTSQQSVENKVGGIPGWQALLTAVGFRLDPPTSGLPAAVFFPTSDPGDRLQQCSSTLQSLLGLPNPALQALCKLITASETGEQLISRAVKNMVGMLHQVLVQLQAGEKEQDLASAPIQVSISVQLWRLPGCHEFLAALGFDLCEVGQEEVILKTGKQANRRTVHFALQSLLSLFDSTELPKRLSLDSSSSLESLASAQSVSNALPLGYQQPPFSPTGADSIASDAISVYSLSSIASSMSFVSKPEGGSEGGGPGGRQDHDRSKNAYLQRSTLPRSQLPPQTRPAGNKDEEEYEGFSIISNEPLATYQENRNTCFSPDHKQPQPGTAGGMRVSVSSKGSISTPNSPVKMTLIPSPNSPFQKVGKLASSDTGESDQSSTETDSTVKSQEESNPKLDPQELAQKILEETQSHLIAVERLQRSGGQVSKSNNPEDGVQAPSSTAVFRASETSAFSRPVLSHQKSQPSPVTVKPKPPARSSSLPKVSSGYSSPTTSEMSIKDSPSQHSGRPSPGCDSQTSQLDQPLFKLKYPSSPYSAHISKSPRNMSPSSGHQSPAGSAPSPALSYSSAGSARSSPADAPDIDKLKMAAIDEKVQAVHNLKMFWQSTPQHSTGPMKIFRGAPGTMTSKRDVLSLLNLSPRHNKKEEGVDKLELKELSLQQHDGAPPKAPPNGHWRTETTSLGSLPLPAGPPATAPARPLRLPSGNGYKFLSPGRFFPSSKC

SEQ ID NO: 58102 - DNA, 7446 bp, Artificial Sequence
  derived and/or modified sequence
atggagcagagccccccccccgcccccgagcccacccagggccccacccccgccagaagcagaagaagaagagagcccgagagcccccccgccagcgcccccatccccctgttcggcgccgacaccatcggccagagaagccccgacggccccgtgctgagcaaggccgagttcgtggagaaggtgagacagagcaaccaggcctgccacgacggcgacttccacaccgccatcgtgctgtacaacgaggccctggccgtggacccccagaactgcatcctgtacagcaacagaagcgccgcctacatgaagatccagcagtacgacaaggccctggacgacgccatcaaggccagactgctgaaccccaagtggcccaaggcctacttcagacagggcgtggccctgcagtacctgggcagacacgccgacgccctggccgccttcgccagcggcctggcccaggaccccaagagcctgcagctgctggtgggcatggtggaggccgccatgaagagccccatgagagacagcctggagcccacctaccagcagctgcagaagatgaagctggacaagagccccttcgtggtggtgagcgtggtgggccaggagctgctgaccgccggccaccacggcgccagcgtggtggtgctggaggccgccctgaagatcggcacctgcagcctgaagctgagaggcagcgtgttcagcgccctgagcagcgcctactggagcctgggcaacaccgagaagagcaccggctacatgcagcaggacctggacgtggccaagaccctgggcgaccagaccggcgagtgcagagcccacggcaacctgggcagcgccttcttcagcaagggcaactacagagaggccctgaccaaccacagacaccagctggtgctggccatgaagctgaaggacagagaggccgccagcagcgccctgagcagcctgggccacgtgtacaccgccatcggcgactaccccaacgccctggccagccacaagcagtgcgtgctgctggccaagcagagcaaggacgagctgagcgaggccagagagctgggcaacatgggcgccgtgtacatcgccatgggcgacttcgagaacgccgtgcagtgccacgagcagcacctgaagatcgccaaggacctgggcaacaagagagaggaggccagagcctacagcaacctgggcagcgcctaccactacagaagaaacttcgacaaggccatgagctaccacaactacgtgctggagctggcccaggagctgatggagaaggccatcgagatgagagcctacgccggcctgggccacgccgccagatgcatgcaggacctggagagagccaagcagtaccacgagcagcagctgggcatcgccgaggacctgaaggacagagccgccgagggcagagccagcagcaacctgggcatcatccaccagatgaagggcgactacgacaccgccctgaagctgcacaagacccacctgtgcatcgcccaggagctgagcgactacgccgcccagggcagagcctacggcaacatgggcaacgcctacaacgccctgggcatgtacgaccaggccgtgaagtaccacagacaggagctgcagatcagcatggaggtgaacgacagagccagccaggccagcacccacggcaacctggccgtggcctaccaggccctgggcgcccacgacagagccctgcagcactaccagaaccacctgaacatcgccagagagctgagagacatccagagcgaggccagagccctgagcaacctgggcaacttccactgcagcagaggcgagtacgtgcaggccgccccctactacgagcagtacctgagactggcccccgacctgcaggacatggagggcgagggcaaggtgtgccacaacctgggctacgcccactactgcctgggcaactaccaggaggccgtgaagtactacgagcaggacctggccctggccaaggacctgcacgacaagctgagccaggccaaggcctactgcaacctgggcctggccttcaaggccctgctgaacttcagcaaggccgaggagtgccagaagtacctgctgagcctggcccagagcctgaacaacagccaggccaagttcagagccctgggcaacctgggcgacatcttcatctgcaagaaggacatcaacggcgccatcaagttctacgagcagcagctgggcctggcccaccaggtgaaggacagaagactggaggccagcgcctacgccgccctgggcaccgcctacagaatgatccagaagtacgacaaggccctgggctaccacacccaggagctggaggtgtaccaggagctgagcgacctgcccggcgagtgcagagcccacggccacctggccgccgtgtacatggccctgggcaagtacaccatggccttcaagtgctacgaggagcagctggacctgggccagaagctgaaggaccccagcctggaggcccaggtgtacggcaacatgggcatcaccaagatgaacatgaacgtgatggaggaggccatcggctacttcgagcagcagctggccatgctgcagcagctgagcggcaacgagagcgtgctggacagaggcagagcctacggcaacctgggcgactgctacgaggccctgggcgactacgaggaggccatcaagtactacgagcagtacctgagcgtggcccagagcctgaacagaatgcaggaccaggccaaggcctacagaggcctgggcaacggccacagagccatgggcagcctgcagcaggccctggtgtgcttcgagaagagactggtggtggcccacgagctgggcgaggccttcaacaaggcccaggcctacggcgagctgggcagcctgcacagccagctgggcaactacgagcaggccatcagctgcctggagagacagctgaacatcgccagagacatgaaggacagagccctggagagcgacgccgcctgcggcctgggcggcgtgtaccagcagatgggcgagtacgacaccgccctgcagtaccaccagctggacctgcagatcgccgaggagaccaacaaccccacctgccagggcagagcctacggcaacctgggcctgacctacgagagcctgggcaccttcgagagagccgtggtgtaccaggagcagcacctgagcatcgccgcccagatgaacgacctggccgccaagaccgtgagctacagcagcctgggcagaacccaccacgccctgcagaactacagccaggccgtgatgtacctgcaggagggcctgagactggccgagcagctgggcagaagagaggacgaggccaagatcagacacggcctgggcctgagcctgtgggccagcggcaacctggaggaggcccagcaccagctgtacagagccagcgccctgttcgagaccatcagacacgaggcccagctgagcaccgactacaagctgagcctgttcgacctgcagaccagcagctaccaggccctgcagagagtgctggtgagcctgggccaccacgacgaggccctggccgtggccgagagaggcagaaccagagccttcgccgacctgctggtggagagacagaccggccagcaggacagcgacccctacagccccgtgaccatcgaccagatcctggagatggtgaacggccagagaggcctggtgctgtactacagcctggccgccggctacctgtacagctggctgctggcccccggcgccggcatcgtgaagttccacgagcactacctgggcgagaacaccgtggagaacagcagcgacttccaggccagcagcagcgtgaccctgcccaccgccaccggcagcgccctggagcagcacatcgccagcgtgagagaggccctgggcgtggagagccactacagcagagcctgcgccagcagcgagaccgagagcgaggccggcgacatcatggaccagcagttcgaggagatgaacaacaagctgaacagcgtgaccgaccccaccggcttcctgagaatggtgagaagaaacaacctgttcaacagaagctgccagagcatgaccagcctgttcagcaacaccgtgagccccacccaggacggcaccagcagcctgcccagaagacagagcagcttcgccaagccccccctgagagccctgtacgacctgctgatcgcccccatggagggcggcctgatgcacagcagcggccccgtgggcagacacagacagctgatcctggtgctggagggcgagctgtacctgatccccttcgccctgctgaagggcagcagcagcaacgagtacctgtacgagagattcggcctgctggccgtgcccagcatcagaagcctgagcgtgcagagcaagagccacctgagaaagaacccccccacctacagcagcagcaccagcatggccgccgtgatcggcaaccccaagctgcccagcgccgtgatggacagatggctgtggggccccatgcccagcgccgaggaggaggcctacatggtgagcgagctgctgggctgccagcccctggtgggcagcgtggccaccaaggagagagtgatgagcgccctgacccaggccgagtgcgtgcacttcgccacccacatcagctggaagctgagcgccctggtgctgacccccagcatggacggcaaccccgccagcagcaagagcagcttcggccacccctacaccatccccgagagcctgagagtgcaggacgacgccagcgacggcgagagcatcagcgactgcccccccctgcaggagctgctgctgaccgccgccgacgtgctggacctgcagctgcccgtgaagctggtggtgctgggcagcagccaggagagcaacagcaaggtgaccgccgacggcgtgatcgccctgaccagagccttcctggccgccggcgcccagtgcgtgctggtgagcctgtggcccgtgcccgtggccgccagcaagatgttcatccacgccttctacagcagcctgctgaacggcctgaaggccagcgccgccctgggcgaggccatgaaggtggtgcagagcagcaaggccttcagccaccccagcaactgggccggcttcatgctgatcggcagcgacgtgaagctgaacagccccagcagcctgatcggccaggccctgaccgagatcctgcagcaccccgagagagccagagacgccctgagagtgctgctgcacctggtggagaagagcctgcagagaatccagaacggccagagaaacgccatgtacaccagccagcagagcgtggagaacaaggtgggcggcatccccggctggcaggccctgctgaccgccgtgggcttcagactggacccccccaccagcggcctgcccgccgccgtgttcttccccaccagcgaccccggcgacagactgcagcagtgcagcagcaccctgcagagcctgctgggcctgcccaaccccgccctgcaggccctgtgcaagctgatcaccgccagcgagaccggcgagcagctgatcagcagagccgtgaagaacatggtgggcatgctgcaccaggtgctggtgcagctgcaggccggcgagaaggagcaggacctggccagcgcccccatccaggtgagcatcagcgtgcagctgtggagactgcccggctgccacgagttcctggccgccctgggcttcgacctgtgcgaggtgggccaggaggaggtgatcctgaagaccggcaagcaggccaacagaagaaccgtgcacttcgccctgcagagcctgctgagcctgttcgacagcaccgagctgcccaagagactgagcctggacagcagcagcagcctggagagcctggccagcgcccagagcgtgagcaacgccctgcccctgggctaccagcagccccccttcagccccaccggcgccgacagcatcgccagcgacgccatcagcgtgtacagcctgagcagcatcgccagcagcatgagcttcgtgagcaagcccgagggcggcagcgagggcggcggccccggcggcagacaggaccacgacagaagcaagaacgcctacctgcagagaagcaccctgcccagaagccagctgcccccccagaccagacccgccggcaacaaggacgaggaggagtacgagggcttcagcatcatcagcaacgagcccctggccacctaccaggagaacagaaacacctgcttcagccccgaccacaagcagccccagcccggcaccgccggcggcatgagagtgagcgtgagcagcaagggcagcatcagcacccccaacagccccgtgaagatgaccctgatccccagccccaacagccccttccagaaggtgggcaagctggccagcagcgacaccggcgagagcgaccagagcagcaccgagaccgacagcaccgtgaagagccaggaggagagcaaccccaagctggacccccaggagctggcccagaagatcctggaggagacccagagccacctgatcgccgtggagagactgcagagaagcggcggccaggtgagcaagagcaacaaccccgaggacggcgtgcaggcccccagcagcaccgccgtgttcagagccagcgagaccagcgccttcagcagacccgtgctgagccaccagaagagccagcccagccccgtgaccgtgaagcccaagccccccgccagaagcagcagcctgcccaaggtgagcagcggctacagcagccccaccaccagcgagatgagcatcaaggacagccccagccagcacagcggcagacccagccccggctgcgacagccagaccagccagctggaccagcccctgttcaagctgaagtaccccagcagcccctacagcgcccacatcagcaagagccccagaaacatgagccccagcagcggccaccagagccccgccggcagcgcccccagccccgccctgagctacagcagcgccggcagcgccagaagcagccccgccgacgcccccgacatcgacaagctgaagatggccgccatcgacgagaaggtgcaggccgtgcacaacctgaagatgttctggcagagcaccccccagcacagcaccggccccatgaagatcttcagaggcgcccccggcaccatgaccagcaagagagacgtgctgagcctgctgaacctgagccccagacacaacaagaaggaggagggcgtggacaagctggagctgaaggagctgagcctgcagcagcacgacggcgccccccccaaggccccccccaacggccactggagaaccgagaccaccagcctgggcagcctgcccctgcccgccggcccccccgccaccgcccccgccagacccctgagactgcccagcggcaacggctacaagttcctgagccccggcagattcttccccagcagcaagtgctag

SEQ ID NO: 58103 - DNA, 7446 bp, Artificial Sequence
  derived and/or modified sequence
atggaacagtctcccccgcccgcaccagagcctacccagggcccaactccagcgcgcagcagacgccgccgcgagccagaaagtccaccggcctctgctcccattcccttgtttggggccgacacaattggccagaggtcgcccgatgggcccgtgctatccaaagccgagttcgtagagaaagttcggcagtctaatcaggcctgtcacgatggcgacttccacaccgcaatcgtgttgtataatgaggctctggccgtcgatccacaaaattgtattttgtatagcaataggagcgccgcctatatgaaaatccagcagtacgataaagccttggacgacgcaataaaagcccgtctgcttaacccaaaatggcccaaagcttatttccgacagggagtcgccctccagtatctcggtagacacgctgacgctttggccgcattcgctagcggtctggctcaggatcctaaatccctgcaactgctggtgggaatggtcgaagccgcaatgaaaagccctatgcgcgattcccttgagccaacctaccagcagcttcaaaagatgaagctggacaaatccccctttgtggtggtatctgtggttggccaggagttgttaacggctgggcaccatggtgcaagcgtcgtcgtcctggaggccgcacttaagattggcacatgctccttaaagctgcgaggtagtgtttttagcgcactgtcgtctgcatattggagcctgggtaacaccgagaagagcacggggtatatgcagcaggacctggatgtggctaagactctcggcgaccagacaggagagtgtcgcgctcacggtaacctgggaagcgcctttttcagcaagggaaattatcgcgaggctctcaccaatcaccggcatcaacttgtgttagctatgaagctgaaagatagagaggcagcctcatcagctttgagtagcttgggtcacgtctatacggccattggagactacccgaatgctctcgcctctcacaaacagtgtgtgcttctcgccaagcagtccaaagacgaactttcagaggctagagaacttggcaacatgggtgcggtgtacatagctatgggcgatttcgagaacgccgtgcagtgtcacgagcagcatctcaagatcgcaaaagacttgggtaacaaacgcgaggaggctagagcgtattcaaatctgggctccgcctaccactataggcgcaattttgacaaggccatgagctatcacaattacgttctggaacttgcccaggagttaatggagaaggcgatcgagatgcgcgcatatgccgggctgggccatgctgcacgatgcatgcaggacttagagcgcgcaaaacagtatcacgaacagcagttgggaatcgctgaggacctgaaggacagggccgccgaaggccgcgcgagcagcaaccttggcatcattcatcagatgaagggagactatgacactgcccttaagctgcataagacacacctctgcatcgcacaagaactgtcagactacgcagcacaaggacgcgcttacggaaacatgggcaatgcgtataacgctcttgggatgtatgaccaggccgtgaagtatcatcgtcaagaactgcagattagcatggaagtaaacgacagggcatctcaagcctctacccacggcaacctggctgttgcctatcaggccctgggcgcccatgaccgggctctgcaacattatcagaaccacctgaatatcgctcgggagttaagggacattcagagtgaggccagggcgctgagtaacctagggaattttcactgctcccgtggagaatatgtacaggctgctccttattatgagcagtacctgaggctcgccccagacctgcaggatatggagggggaggggaaagtttgtcataatctgggatacgctcactactgcctcggaaactaccaggaggcggtgaagtattatgaacaggacctcgcgcttgctaaagatctgcatgacaaactgtcacaggccaaggcatattgtaacctcggcctagccttcaaggccctccttaacttctctaaagccgaggagtgccagaagtacctcctgtccttggcccagagcctgaacaactcgcaggccaaatttcgggccttgggcaatctgggcgacatttttatttgtaaaaaggacattaacggcgctatcaagttttatgaacagcagctcggccttgctcaccaggtcaaggacaggaggctggaagcctccgcatacgccgccctgggcacagcctaccggatgattcaaaagtatgacaaggccctgggataccatacacaggagctggaagtgtatcaggagcttagcgatttgcccggggaatgcagagcccacggacacttagccgccgtttatatggcgctcggtaaatatacaatggccttcaagtgttacgaggagcagctggacctaggacagaaactaaaagaccctagtctggaggcccaggtgtacggaaatatgggaattaccaaaatgaacatgaatgtcatggaggaggctattggctactttgagcagcaactcgccatgcttcagcagctcagcggaaatgaatccgtgctggaccggggaagggcatacgggaatttaggagattgttacgaggcactgggcgactatgaagaagccataaagtattacgagcagtatctctccgtggcgcaatccttgaatcggatgcaggatcaagctaaagcttatagggggctcggtaacggccacagggcaatgggttcgctgcagcaagccctggtgtgtttcgaaaaaaggctcgtggtggcccacgagctcggcgaggcctttaataaggcccaagcgtacggcgaactgggaagcctccacagccagttgggaaattacgagcaggccatcagctgtttagagaggcagctcaatatcgccagagacatgaaagaccgggccctagagtcggatgccgcctgcgggcttggcggggtctaccagcagatgggcgagtacgacactgctctgcagtatcaccagctggacctgcagattgctgaggagaccaacaatccgacatgtcaaggccgcgcttacggaaatctggggctgacatacgaatcattaggcaccttcgagagggccgtcgtgtaccaggaacagcatctgtcgatcgccgcacaaatgaatgatctcgccgcaaagaccgtctcatacagctctctgggccggactcaccacgccctgcagaactatagtcaagctgtcatgtacttacaggaggggctgcggttagccgaacaactggggaggagggaagacgaagcaaaaatccgccacggactgggcctttctctgtgggctagcggcaacctggaggaggcacaacatcagctttacagagcctccgctctgttcgagacgatacgccatgaggcacaattatccacggattacaaacttagtctgttcgacctgcagactagctcttaccaggccctgcagcgggtgttggtgtctttgggtcatcacgatgaggccctggcagtggcggaaagaggccgcacacgggcatttgctgatctgctcgtagaacgccagacaggccagcaagactcagacccatactctcctgtgacaatcgatcagatattggaaatggttaacggacaaaggggccttgtgctctattactcactggccgcagggtacctgtactcgtggttgcttgcacctggtgcgggcattgtgaagttccacgaacattatctgggtgagaatactgtggagaatagtagcgacttccaggcgagctcctcagtgacgctccccactgctacaggctcagcgttggagcagcatattgcctctgtgcgagaggcgttgggcgttgagtcccactatagccgagcctgtgcctctagcgaaaccgaatctgaggctggcgatattatggaccaacaattcgaagagatgaacaacaagctgaattctgtcacagatcccacgggatttctgagaatggttcggaggaacaatcttttcaaccgttcttgccagtccatgacatccctgttctctaacaccgtttctcccacccaggacggcacgagttcactgcctcgcaggcagtcttcctttgctaaacccccgctacgagcgctgtacgacctgctaattgcccccatggagggcggtttaatgcactcctctgggcccgtcggtcggcacagacaactgattcttgtgctggaaggagagttgtacttaattcctttcgccctgctcaagggatcctcgtccaacgaatatttgtatgaaagattcggccttctagctgtccccagcatccggagcctgagcgtgcagtcaaagtcccacctcaggaagaacccccccacttacagctccagcaccagtatggccgctgtgattgggaacccgaaactgccatccgccgtgatggacagatggctgtgggggcccatgccaagtgccgaagaagaagcctatatggtttcagagcttctgggttgccagcctctcgttggttcagtcgctacaaaagagagagtcatgtccgcgttgacccaggccgaatgcgtgcattttgccacccacattagctggaagctctcagctctggtgctcaccccttctatggatggaaaccctgcttcctctaagagcagcttcggacatccttacaccattcccgagagcctgagagttcaggacgacgctagtgatggtgaaagtatctctgactgccccccactgcaggagttactcctgactgctgcggacgttctcgacttacagctccccgtcaagctggtggtgcttggctccagccaagagtctaactctaaggtaactgccgacggggtgatagccttaacgagggctttcttagctgcaggtgcccagtgcgtgttggtttctttgtggcccgtgcctgtggctgccagtaaaatgttcattcatgctttctactcctctttactgaacggactgaaggccagcgcagctctcggagaggcaatgaaggtcgttcagagcagtaaggccttctcacacccctcaaattgggccgggttcatgctgatcggttctgacgtaaagctgaactcacccagctctctgatcggtcaggccttgacggaaattttgcagcatccagaacgcgccagagacgccttgcgtgtactgctgcacctcgtcgagaagagtctgcagcgaatccagaacggacaacgtaatgcgatgtacacctcccaacagagcgtggaaaacaaagtaggcgggattccaggatggcaagccttactcacggccgtaggatttagactggatccacccacaagtggccttccagctgctgtgttcttccctacaagcgaccctggcgaccggcttcagcagtgctcaagcacgctgcagagcttattgggtctcccaaatcccgcgttgcaggcgctgtgcaagcttatcacagcctcagagactggagagcagttgatctctagagccgttaaaaatatggtgggcatgctccaccaggtcctagtccagcttcaagccggagagaaggagcaggatctcgctagcgcaccaatccaggtttccatctccgtccagttgtggagactgccaggatgtcacgagttcctagctgccctgggcttcgatctctgtgaagtgggacaggaggaggtgatccttaagactggtaaacaggcaaatcgtcggacagtgcattttgccctgcaatcacttctttcactgtttgattctaccgagttgcccaagcgactgtccttagatagctctagcagcttggaaagcctcgctagcgcccagagcgtctccaacgcactgcccttggggtatcaacagccacccttcagtccaaccggtgccgactcaattgcaagcgatgctatttccgtgtactctcttagttccatcgcatcatctatgtctttcgtctcaaaaccagagggagggagtgaagggggcggacctggcggcaggcaggaccacgatcgtagtaaaaatgcctacctgcagcgcagcaccttgccacgctctcagctgcccccacagacaagacccgcgggcaataaagatgaagaggaatacgaggggtttagcataatctcgaatgaacctcttgcaacatatcaggagaatcggaatacctgtttctcccctgaccacaaacagcctcaacccggaacagccggaggcatgagggtatccgtaagctccaaaggctccatcagcacccccaactcaccggtcaagatgactttaattcccagtccaaacagtcccttccaaaaggtggggaagctagcgtcttccgataccggggagagtgaccagtcgtctaccgagaccgacagcaccgtgaagagccaggaggagagtaatcccaagctggatccccaggagctggcccagaaaatactggaggagactcagagtcacctgattgcggtggaaagactccagcgctctgggggccaggttagtaagagtaataatccagaagacggagtgcaggcccccagctcgacagccgtgttccgtgccagtgaaacaagtgccttcagtcgccctgtgctgtcccaccaaaaatcacagcccagcccagttactgtgaaacccaagccacccgccagatcttcatcactgccaaaagtcagttctgggtacagcagccccactacaagcgagatgtcaattaaggacagcccaagtcagcactccggtaggcccagtcccggttgcgacagccagaccagccaactggaccagccattgtttaagttgaagtatccctcttccccttacagcgcacacatttctaagtcaccgcgaaacatgagtccgtccagcgggcatcagtcaccagccggttctgcccccagcccagcactttcgtatagcagcgccggcagtgctcggtcttcccctgcggatgcccccgatatcgacaagctgaagatggcggcgattgatgagaaggtgcaggctgtgcacaatctcaagatgttttggcagtctacaccacagcactctacagggcccatgaaaatcttccgcggggcccctgggacgatgaccagcaagcgggacgtcctttctctgctgaatctgagtccccgtcacaataagaaggaagagggcgttgataaacttgaacttaaagagttgtccttgcagcagcacgacggcgctccacctaaagccccaccaaacggccattggcggactgaaactacatcactaggaagccttcccctccccgctggccccccagccacggccccagctcggcctcttcgcctgccgtcaggcaatggatacaaattcctcagccctggtcggtttttcccgagctccaagtgctag

SEQ ID NO: 58104 - DNA, 7446 bp, Artificial Sequence
  derived and/or modified sequence
atggagcagagccccccaccagcccctgagcccacccagggccccaccccagcccggagcagaagaagaagagagcctgagagccccccagccagcgcccccatccccctgtttggagctgacaccatcggccagaggagcccagatggccctgtgctgagcaaggccgagtttgtggagaaggtgcggcagagcaaccaggcctgccatgatggagacttccacacagccatcgtgctgtacaatgaggccctggccgtggacccccagaactgcatcctgtacagcaacagatctgctgcctacatgaagatccagcagtatgacaaggccctggatgatgccatcaaggcccggctgctgaaccccaagtggcccaaggcctacttccggcagggcgtggccctgcagtacctgggcagacatgctgatgccctggccgcctttgccagcggcctggcccaggaccccaagagcctgcagctgctggtgggcatggtggaggccgccatgaagagccccatgagggacagcctggagcccacctaccagcagctgcagaagatgaagctggacaagagcccctttgtggtggtgtctgtggtgggccaggagctgctgacagctggccaccacggggcctctgtggtggtgctggaggccgccctgaagattggcacctgcagcctgaagctgcggggctctgtgttcagcgccctgagcagcgcctactggagcctgggcaacacagagaagagcacaggctacatgcagcaggacctggatgtggccaagaccctgggggaccagacaggagaatgtcgggcccacggcaacctgggcagcgccttcttcagcaaaggaaactaccgggaggccctgaccaaccaccgccaccagctggtgctggccatgaagctgaaggaccgggaggccgccagcagcgccctgagcagcctgggccacgtgtacacagccatcggggactacccaaatgccctggccagccacaagcagtgtgtgctgctggccaagcagagcaaggatgagctgtctgaggcccgggagctgggcaacatgggcgctgtgtacatcgccatgggagactttgaaaatgctgtgcagtgccacgagcagcacctgaagatcgccaaggacctgggcaacaagcgggaggaggcccgggcctacagcaacctgggcagcgcctaccactacagaagaaactttgacaaggccatgagctaccacaactacgtgctggagctggcccaggagctgatggagaaggccatcgagatgagggcctatgccggcctgggccatgctgcccgctgcatgcaggacctggagcgggccaagcagtaccacgagcagcagctgggcattgctgaggacctgaaggacagagctgctgagggccgggccagcagcaacctgggcatcatccaccagatgaagggggactatgacacagccctgaagctgcacaagacccacctgtgcatcgcccaggagctgagtgactatgctgcccagggccgggcctacggcaacatgggaaatgcctacaatgccctgggcatgtatgaccaggccgtgaagtaccaccggcaggagctgcagatctccatggaggtgaatgaccgggccagccaggccagcacccacggcaacctggccgtggcctaccaggccctgggcgcccatgaccgggccctgcagcactaccagaaccacctgaacatcgcccgggagctgcgggacatccagagcgaggcccgggccctgagcaacctgggcaacttccactgcagcagaggagaatatgtgcaggccgccccctactatgagcagtacctgcggctggccccagacctgcaggacatggagggggagggcaaggtgtgccacaacctgggctacgcccactactgcctgggcaactaccaggaggccgtgaagtactatgagcaggacctggccctggccaaggacctgcatgacaagctgagccaggccaaggcctactgcaacctgggcctggccttcaaggccctgctgaacttcagcaaggccgaggagtgccagaagtacctgctgagcctggcccagagcctgaacaacagccaggccaagttccgggccctgggcaacctgggggacatcttcatctgcaagaaggacatcaatggagccatcaagttctatgagcagcagctgggcctggcccaccaggtgaaggaccggcggctggaggccagcgcctatgctgccctgggcacagcctacaggatgatccagaagtatgacaaggccctgggctaccacacccaggagctggaggtgtaccaggagctgagtgacctgcctggagaatgtcgggcccacggccacctggccgctgtgtacatggccctgggcaagtacaccatggccttcaagtgctatgaggagcagctggacctgggccagaagctgaaggaccccagcctggaggcccaggtgtatggcaacatgggcatcaccaagatgaacatgaatgtgatggaggaggccatcggctactttgagcagcagctggccatgctgcagcagctgtctggaaatgaatctgtgctggaccggggccgggcctacggcaacctgggggactgctatgaggccctgggggactatgaggaggccatcaagtactatgagcagtacctgtctgtggcccagagcctgaacaggatgcaggaccaggccaaggcctaccggggcctgggcaatggccaccgggccatgggcagcctgcagcaggccctggtgtgctttgagaagaggctggtggtggcccacgagctgggggaggccttcaacaaggcccaggcctacggggagctgggcagcctgcacagccagctgggcaactatgagcaggccatcagctgcctggagcggcagctgaacatcgcccgggacatgaaggaccgggccctggagagtgatgctgcctgtggcctgggcggcgtgtaccagcagatgggagaatatgacacagccctgcagtaccaccagctggacctgcagattgctgaggagaccaacaaccccacctgccagggccgggcctacggcaacctgggcctgacctatgagagcctgggcacctttgaaagagctgtggtgtaccaggagcagcacctgagcattgctgcccagatgaatgacctggccgccaagacagtgtcctacagcagcctgggccgcacccaccacgccctgcagaactacagccaggccgtgatgtacctgcaggagggcctgcggctggccgagcagctgggccggcgggaggatgaggccaagatcagacatggcctgggcctgagcctgtgggccagcggcaacctggaggaggcccagcaccagctgtaccgggccagcgccctgtttgagaccatcagacatgaggcccagctgagcacagactacaagctgagcctgtttgacctgcagaccagcagctaccaggccctgcagagggtgctggtgtccctgggccaccatgatgaggccctggccgtggccgagcggggccgcacccgggcctttgctgacctgctggtggagcggcagacaggccagcaggacagcgacccctacagccctgtgaccatcgaccagatcctggagatggtgaatggccagaggggcctggtgctgtactacagcctggccgccggctacctgtacagctggctgctggcccctggagctggcatcgtgaagttccacgagcactacctgggagaaaatacagtggagaacagcagtgacttccaggccagcagctctgtgaccctgcccacagccaccggcagcgccctggagcagcacatcgcctctgtgcgggaggccctgggcgtggagagccactacagccgggcctgtgccagcagcgagacagagagcgaggccggggacatcatggaccagcagtttgaggagatgaacaacaagctgaacagcgtgacagaccccaccggcttcctgaggatggtgagaagaaacaacctcttcaacagaagctgccagagcatgaccagcctcttcagcaacacagtgagccccacccaggacggcaccagcagcctgccccggcggcagagcagctttgccaagccacccctgcgggccctgtatgacctgctgattgcccccatggagggcggcctgatgcacagcagcggccctgtgggccgccaccggcagctgatcctggtgctggagggggagctgtacctgatcccctttgccctgctgaagggcagcagcagcaatgagtacctgtatgagcgcttcggcctgctggccgtgcccagcatccgcagcctgtctgtgcagagcaagagccacctgaggaagaacccccccacctacagcagcagcacctccatggccgccgtcatcggcaaccccaagctgcccagcgctgtgatggaccgctggctgtggggccccatgcccagcgctgaggaggaggcctacatggtgtctgagctgctgggctgccagcccctggtgggctctgtggccaccaaggagcgggtgatgtctgccctgacccaggctgaatgtgtgcactttgccacccacatctcctggaagctgagcgccctggtgctgacccccagcatggatggcaacccagccagcagcaagagcagctttggccacccctacaccatccctgagagcctgcgggtgcaggatgatgccagtgatggagagagcatcagtgactgcccccccctgcaggagctgctgctgacagctgctgatgtgctggacctgcagctgcctgtgaagctggtggtgctgggcagcagccaggagagcaacagcaaggtgacagcagatggagtgattgccctgacccgggccttcctggccgccggggcccagtgtgtgctggtgtccctgtggcctgtgcctgtggccgccagcaagatgttcatccacgccttctacagcagcctgctgaatggcctgaaggccagcgctgccctgggggaggccatgaaggtggtgcagagcagcaaggccttcagccaccccagcaactgggccggcttcatgctgattggaagtgatgtgaagctgaacagccccagcagcctcatcggccaggccctgacagagatcctgcagcaccctgagcgggccagagatgccctgcgggtgctgctgcacctggtggagaagagcctgcagaggatccagaatggccagagaaatgccatgtacaccagccagcagagcgtggagaacaaggtgggcggcatccctggctggcaggccctgctgacagctgtgggcttccggctggacccccccaccagcggcctgcctgctgctgtgttcttccccaccagtgaccccggggaccggctgcagcagtgcagcagcaccctgcagagcctgctgggcctgcccaacccagccctgcaggccctgtgcaagctgatcacagccagcgagaccggggagcagctgatcagcagagctgtgaagaacatggtgggcatgctgcaccaggtgctggtgcagctgcaggccggggagaaggagcaggacctggccagcgcccccatccaggtgtccatctctgtgcagctgtggaggctgcccggctgccacgagttcctggccgccctgggctttgacctgtgtgaggtgggccaggaggaggtgatcctgaagacaggcaagcaggccaacagaagaacagtgcactttgccctgcagagcctgctgagcctgtttgacagcacagagctgcccaagaggctgagcctggacagcagcagcagcctggagagcctggccagcgcccagagcgtgtccaatgccctgcccctgggctaccagcagccccccttcagccccaccggggctgacagcatcgccagtgatgccatctctgtgtacagcctgagcagcatcgccagctccatgagctttgtgtccaagccagagggcggcagcgagggcggcggccctgggggccggcaggaccatgacaggagcaagaatgcctacctgcagaggagcaccctgcccaggagccagctgcccccccagaccaggcctgctggcaacaaggatgaggaggagtatgagggcttcagcatcatcagcaatgagcccctggccacctaccaggagaacagaaacacctgcttctccccagaccacaagcagccccagcctggaacagctgggggcatgagggtgtctgtgagcagcaagggcagcatcagcacccccaacagccctgtgaagatgaccctcatccccagccccaacagccccttccagaaggtgggcaagctggccagcagtgacacaggagagagtgaccagagcagcacagaaacagacagcacagtgaagagccaggaggagagcaaccccaagctggacccccaggagctggcccagaagatcctggaggagacccagagccacctgattgctgtggagcggctgcagaggtctgggggccaggtgtccaagagcaacaacccagaagatggagtgcaggcccccagcagcacagctgtgttccgggccagcgagaccagcgccttcagcaggcctgtgctgagccaccagaagagccagcccagccctgtgacagtgaagcccaagcccccagcccggagcagcagcctgcccaaggtgagcagcggctacagcagccccaccaccagcgagatgagcatcaaggacagccccagccagcacagcggccggcccagccctggctgtgacagccagaccagccagctggaccagcccctcttcaagctgaagtaccccagcagcccctacagcgcccacatcagcaagagccccaggaacatgagccccagcagcggccaccagagccctgctggcagcgcccccagccctgccctgagctacagcagcgctggcagcgcccggagcagccctgcagatgccccagacatcgacaagctgaagatggccgccattgatgagaaggtgcaggccgtgcacaacctgaagatgttctggcagagcaccccccagcacagcacaggccccatgaagatcttccggggggcccctggcaccatgaccagcaagagagatgtgctgagcctgctgaacctgagccccaggcacaacaagaaggaggagggcgtggacaagctggagctgaaggagctgagcctgcagcagcatgatggagccccacccaaggcccccccaaatggccactggaggacagagaccaccagcctgggcagcctgcccctgcctgctggccccccagccacagccccagcccggcccctgcggctgcccagcggaaatggctacaagttcctgagccctggccgcttcttccccagcagcaagtgctag

SEQ ID NO: 58105 - DNA, 7446 bp, Artificial Sequence
  derived and/or modified sequence
atggagcagagccccccccccgcccccgagcccacccagggccccacccccgcacgttctcggcgaagaagagagcctgaaagcccccccgcgtccgcaccaattcctcttttcggagcagacacaatcggtcagaggtcccccgacggccccgtgctgagcaaagctgagtttgtcgaaaaagtgcgccagtccaatcaggcatgccacgatggcgacttccacacagctattgtgttgtataatgaagccctggcggtggacccgcagaattgtatcctctacagtaacagatccgctgcatacatgaagatccagcagtacgacaaggcgctagacgatgctatcaaggcccggctcctgaatccaaagtggccaaaggcatacttcagacagggggttgctctacagtatctgggaagacatgcagacgctctggccgctttcgcttcagggcttgcccaggatcccaaaagcctccagcttctggtgggaatggtagaggccgctatgaagtcaccgatgcgggattctctcgagcccacatatcagcagctccagaagatgaaattggacaagtccccctttgtcgtggtgtcagtcgtgggccaggaactcctcactgccggccatcacggcgcctccgtcgttgttctggaagctgccctgaagattggcacatgttccttgaagctcagagggtctgtgttctcagccttaagctctgcttactggtccctgggaaacacagaaaaaagtaccggttacatgcagcaggatctcgatgtcgctaaaaccctcggagaccagaccggcgagtgtagggcccacgggaacctgggtagcgcattcttttccaaaggcaactatcgggaggccctgactaatcacagacaccagctggtcctggctatgaagctgaaagacagagaggccgcttcttcagccttatcgtctcttgggcatgtgtataccgcgatcggggactacccgaatgctcttgcgagtcacaagcagtgcgtgctcctcgcaaagcaatcaaaggacgagttgtcagaggcgagggaactcggaaacatgggagcagtttacatagccatgggcgactttgaaaacgcggttcagtgtcatgagcagcacctgaagattgccaaggaccttgggaataagcgagaggaggctagggcgtacagtaacctcggctccgcatatcattacaggaggaatttcgataaagccatgtcttaccataattacgttctcgagttggctcaggaacttatggagaaagctattgaaatgcgcgcttatgccggcctgggccatgctgcccgctgtatgcaagacttggagagggccaaacagtatcacgaacagcagttagggattgcagaggatctgaaagaccgtgcagccgaaggaagggcttcttcgaatttgggtatcattcatcaaatgaagggcgactatgacaccgctctcaagctccataagactcacctttgtattgctcaggagttgtcagactatgctgctcaggggagggcttatggaaatatgggaaacgcatacaacgccttggggatgtacgatcaggctgtgaagtatcaccgccaggaattacagatcagcatggaggtcaacgaccgggcttcgcaggcctccacacacggaaatctcgcagtggcctatcaagccttgggcgctcacgacagagcgctccagcattaccagaaccatttgaacattgccagggaactgagagatattcagtctgaagcccgggccctaagtaaccttggcaattttcactgttcgaggggcgagtacgtacaggcggcaccctactacgaacagtacctgaggctcgccccggatttgcaggacatggaaggcgagggcaaagtgtgtcacaatctgggctatgcccattactgcctcgggaactaccaggaggccgtaaagtactatgaacaggacctcgcccttgctaaggacctgcatgataaacttagccaggccaaggcctattgcaatctgggtctcgcctttaaggctttgttaaacttctcaaaggccgaagagtgccagaagtatctgctgtccctcgcacagtcactcaataattctcaggccaaatttagagctctggggaatctgggcgacatcttcatatgtaagaaagatatcaatggcgccattaagttttatgaacagcaacttggcctggctcaccaggtgaaggataggcgcttggaagctagcgcctatgccgcccttggaactgcttaccggatgattcagaagtatgataaggctctgggatatcacacccaggagttagaggtttaccaggagctgagtgacctgcccggagaatgccgggctcatggccacctggctgccgtgtacatggcactcggcaaatacaccatggcattcaagtgttacgaagaacaactggacctcggccagaaacttaaagatccttctctcgaagcacaagtgtacgggaatatggggattaccaagatgaacatgaatgtcatggaggaagctatcggatacttcgagcaacaactggctatgttgcagcagctgtctggaaatgagtctgtgctggatcgcggacgggcctacggcaatttgggtgactgctatgaggcgttgggggattacgaggaggcaatcaagtattatgagcagtacctgtccgtcgctcagtcactcaataggatgcaagaccaagccaaggcctacaggggtctcggcaacggccatagagcaatgggttctctgcagcaggccctggtctgcttcgagaaaagacttgtggtggcccacgaactgggagaggcatttaataaggcccaggcctacggcgagttgggcagcttgcattctcagctaggcaactacgagcaagctatctcgtgcctggaaaggcagctgaacattgccagagacatgaaagaccgggcactcgagtccgacgctgcctgcggcttgggcggggtataccagcaaatgggggaatacgacacggctctgcaataccaccagctggacctgcagatagcggaggagaccaataatcctacctgccaaggacgcgcctatggaaacttaggactaacatatgaatcccttgggactttcgaacgcgccgtagtgtatcaggagcagcatctgagcattgcggcacagatgaatgatttagccgccaaaactgtatcctacagctcgctcggccggacccaccatgcactgcagaattacagccaggctgtgatgtatctgcaagaaggcctgcgtctggccgagcagctggggcgaagggaggacgaggccaagattcggcacgggttggggctgtctctttgggcgtctggtaatctggaggaagctcagcaccagttatatcgggcgagtgccctttttgagaccatcaggcatgaggcccaactttccacagactacaaactgagcctctttgacctgcagacctccagttatcaagcactgcaacgggttctggtatcactgggacatcatgatgaagccctggctgttgccgagcggggacgcacaagagcctttgccgacctgctggtagagaggcagacagggcagcaagatagtgacccatatagcccagtgaccatcgaccaaatcctcgagatggtgaacggccagaggggtttagtcctgtactatagcctggctgccgggtatctttacagttggctcctcgctccaggcgccggcattgtgaaatttcacgaacactatctaggggaaaacactgtggagaattcatcggatttccaagctagcagttccgtgaccctgccaactgcaaccggctccgcccttgagcaacatatcgcctcagtgcgggaagcactcggggtggaatcccactactccagggcatgcgcctctagtgaaaccgagtctgaagcaggagatattatggaccagcagttcgaggagatgaataacaagctcaatagcgtcactgacccaaccggattcctgaggatggtgcgcaggaacaatctgttcaacaggtcgtgtcagagcatgactagcttattttccaatacagtgtcccccacccaggacggtacatcctccctgccaagaaggcaatcaagttttgctaagcccccactgcgggcgctttatgatttgctgatcgcacccatggaaggtgggctcatgcacagctccggtccagtggggagacaccgccagctgatcctggttttggagggcgagctctacctgatccctttcgcactcttgaagggcagctcttcgaacgaatacttgtatgaaaggtttggattgttggccgtgccgtccattagaagcctatccgttcagtcaaaatctcacctgaggaaaaaccccccaacatatagcagctcaacctcaatggctgccgttatcgggaaccccaaacttcctagcgccgtgatggacagatggctatgggggccgatgcccagcgcggaggaagaggcgtatatggttagtgagttgctggggtgtcagcccctggtaggatctgtggccacaaaagagcgagtcatgtctgcattgacgcaggctgagtgcgtccacttcgcaactcacatctcctggaaactttccgcactcgttctgaccccatccatggacggaaatcctgccagttctaaatctagcttcgggcacccttatacaatcccagagtcattgagagtgcaagatgatgcatcggacggagagagcatttcggactgtccccccctacaagagttgttgctcacagccgctgatgtccttgatcttcaactgcccgtcaagctggtggtcttaggctcatcccaagagtctaactccaaagtgacagcggacggcgtcattgctctaacgagagctttcctcgctgcgggcgcacagtgtgtactcgtaagtttatggcctgtccctgtggcagcatctaaaatgttcattcacgccttctactcctcactgttgaatggactgaaagcttccgcggcgctaggggaagcgatgaaagtcgtgcagagcagtaaggctttctcacaccccagcaactgggccgggttcatgcttatcggttcagacgttaaacttaacagtccatcttccctgataggtcaagcactgacagagatcctccaacacccggagagagctcgcgatgcactcagagtgttgctgcatcttgtggaaaaatccctgcagaggatccagaatggccagaggaacgccatgtacacgagccagcagtctgtcgagaataaggtaggtggtattccgggatggcaggccctactcaccgctgtgggattcaggttagatccgccaacctctggcctccctgcagctgtttttttccctacctccgatccaggcgatcggcttcaacagtgcagctccacgctccagtccttactcggcctgcctaatccagccctgcaggccttgtgtaagctgatcacggctagcgagaccggcgagcagctgattagccgcgccgttaaaaatatggtgggtatgttacaccaggtgctggtccagctgcaggccggggagaaagagcaagatctggcttcagccccaattcaggtgtctattagcgtgcagttatggagattgcccggctgccatgagttcctcgccgccctggggtttgatctgtgcgaggtcggtcaggaggaggtaatactgaaaacagggaagcaggctaatagacgcactgtgcacttcgcactgcagtctctcctcagtctctttgacagtacagagctacccaaacggctgtctctggattccagtagtagccttgagtctttggcttctgcccaatctgtgtcgaatgccctcccattgggttatcagcagcctccattcagcccgaccggagccgactccatcgctagtgatgccatctccgtgtactctctgtcttctattgcgtcttcaatgagctttgtgtctaagcccgagggcggatcagagggtggtggtcctgggggacgccaggatcatgacagatcaaagaatgcttatctgcagcgctcgacactgccaaggtcccaactacccccacaaacgaggcctgcagggaacaaagacgaggaagaatacgaagggtttagcattatttcaaacgagcccctggcaacataccaggagaatcgtaacacctgtttcagccctgatcataaacagccgcagccaggcaccgccggaggtatgcgggtgagcgtcagctctaagggctcaatttcgaccccgaattccccggtgaaaatgacactgataccctcacccaatagtccattccaaaaggtgggaaagctggcttctagcgacaccggcgagagtgaccaatcaagtacagaaaccgattccacagttaaaagccaggaagagtcgaaccctaaactggatccccaggagttggcacagaagattctggaagaaacccagtctcatctgatcgctgtggaaagactgcagcggtccggggggcaggtaagcaagagtaacaaccccgaagatggagtgcaggcaccctcttcgacagcagtattccgcgcttccgagacatcggcatttagcaggcccgtgctcagccatcaaaagtcccagccctcccctgtcacggtgaagcccaaaccacccgcgagaagctcctccttaccgaaagtcagctcagggtatagttccccaacaacctctgagatgtccataaaagactctccctcccaacactccggacggccctctcctggttgtgacagtcaaacaagccagctcgaccagccactctttaaactcaagtacccaagctcaccctattccgcacacataagcaaaagcccgcgtaacatgagtccatctagcgggcatcagtccccggcaggttctgccccttcacccgctctgtcatactcctccgccgggtccgcccggtcatcccctgccgacgcgcccgacatagacaagctcaagatggccgcaatcgacgaaaaggtccaggccgttcataacctgaagatgttttggcagagtacaccacagcacagtactgggcccatgaagatcttcagaggtgctcctggcacgatgacatcaaagcgtgacgtgctctccctactgaacctcagccccagacacaacaaaaaagaagagggggtggacaaattagagcttaaggaactttcactgcaacagcatgacggagcaccacctaaggcccctccaaacggccactggcgaaccgaaaccacaagcttgggctcactccccctgcccgctgggccccctgctactgctcctgcccggcctcttcgcttaccatctggtaacggatataagtttttatcccccggccggtttttccctagcagcaagtgttag

SEQ ID NO: 58106 - DNA, 7445 bp, Artificial Sequence
  derived and/or modified sequence
atggaacaaagcccccctcccgcacccgagccaacccagggcccaacacccgctcgctctcgccgacgccgtgagcccgaatcacccccagcctccgccccaattccactgtttggggcagatacaataggccaacgctcaccagatggtccagtgctgagcaaggcagaattcgttgagaaagtgagacaaagcaaccaagcttgccacgacggcgacttccatacagctattgtgctttataatgaagccctggccgttgacccgcagaattgtattctgtatagcaataggtctgcagcctatatgaagattcaacagtacgacaaggcccttgatgatgctataaaagccagactgctaaaccccaaatggccaaaggcctactttcggcagggggtcgcccttcagtacctggggaggcatgcagacgcgctggccgctttcgcatccggcctcgcacaggaccctaagtccctgcagctgctagtgggcatggtggaggctgcgatgaagtcaccgatgagagatagtctggaaccgacttatcagcagctccagaagatgaaactggataagtctccctttgtagtggtgtctgtggtcggacaggagctgctgactgcgggtcaccatggcgcttctgtagttgtcctggaagcggctctgaagatcggtacatgtagtctgaagctgagaggttctgtgttctccgctcttagtagcgcatattggagtctggggaacaccgagaaatccaccgggtatatgcaacaagacttggatgtggcaaaaacgctgggcgaccaaaccggggaatgccgcgcacacggcaatctgggctctgcattcttcagcaaagggaattaccgcgaagctctgactaaccaccgacaccagctcgttttagccatgaaactgaaagatagggaagcagcatcttccgctctttcctcactgggacacgtgtacacggcaatcggcgattacccaaatgccctcgcctcccataagcagtgtgttctactggcaaaacagtccaaggatgagctcagcgaggctcgggaactcggcaatatgggggctgtttatatcgctatgggcgatttcgagaatgcagttcaatgccacgagcagcacttgaagattgctaaggacctgggcaataaacgcgaggaagctcgagcttactccaacctcggatccgcctatcattatcggagaaacttcgataaagctatgagttaccacaattatgtgcttgaactcgctcaggagctcatggaaaaggcaatcgaaatgcgtgcctacgcaggcttagggcacgccgctcgttgtatgcaggacctggaacgggcaaagcagtatcacgagcaacagctgggcattgccgaggacctgaaagacagagccgcagagggcagggctagctcgaatttagggatcatccatcagatgaagggtgactacgataccgccctgaaactccacaaaactcatttatgtatagcccaggagctctccgactatgcggcacagggacgagcttatggcaacatggggaacgcctataacgctttgggcatgtacgatcaggccgtgaaatatcatcgccaggagctgcagatctccatggaggtcaatgaccgggcaagccaggctagcactcatggcaatctggctgtggcttatcaggcgcttggggctcatgatcgggcattgcagcactaccagaatcatttaaatatcgctcgcgagttaagagacatccagagtgaggctcgagccctgtctaatctgggcaattttcattgttctagaggcgaatatgtacaggccgctccctactacgaacaatatcttcggctggctcctgatctccaggacatggagggcgaggggaaggtgtgccacaatttaggctatgcccattactgcttgggcaactaccaggaagcagtgaaatactacgaacaagacctggcactggctaaagatctgcatgataagctatcccaagccaaagcatactgtaacctggggttggcgttcaaagcgctactgaacttttccaaggcggaggagtgtcaaaaatatctcctctcattagcccaatcattgaataactcccaagcaaaatttcgagctctgggtaacttaggggatatcttcatttgtaagaaagacattaatggcgctatcaaattttatgagcaacagctggggctcgcgcatcaggtgaaagacagacgcctggaagctagcgcatatgctgccctgggcacagcttatcggatgatccagaagtatgataaagcattgggctaccacacccaggagctggaagtgtaccaggagctgtctgatttacctggcgaatgccgtgcacacgggcacctcgcagcagtctatatggccctgggcaagtacacgatggcctttaagtgttacgaggaacagctggatctggggcagaagctgaaggatccgagtttggaggcccaggtatatgggaatatgggtattacaaagatgaatatgaatgtgatggaggaggcaatcggatactttgaacagcagctggcaatgttgcaacagcttagtggaaatgagagtgtgctggatcggggaagggcctacggcaacctaggcgattgctatgaagcccttggtgactacgaagaggcaatcaaatactacgagcagtatttgtccgtggcacaatccctcaataggatgcaagaccaggcaaaggcatatagggggctcggaaacggccaccgcgctatgggtagtctgcagcaagccctcgtgtgctttgagaagaggctggtcgtggcacacgagttgggcgaagccttcaacaaggcccaggcgtacggcgaactgggctctcttcacagtcagctggggaactacgagcaagccatttcttgcttagaacgtcaactgaatatcgccagggacatgaaggaccgcgcattagaaagcgacgctgcgtgtggattgggcggtgtgtatcagcagatgggcgagtacgataccgccctgcagtaccatcagttagatctgcagatcgccgaggagactaacaatcctacatgccaggggagggcatacgggaacttgggcctgacctatgagtccctgggaacatttgagcgcgcagtggtctatcaggagcagcatctcagtattgctgcgcagatgaacgatctggcagccaagacagtttcttatagttccctgggcaggacgcaccacgccctgcagaactattcacaggccgtaatgtatctgcaggagggtttacggctcgccgaacagctcggaaggagggaagacgaagccaaaatcagacacgggttaggtttgtcactgtgggcctccggtaacctcgaagaagctcagcaccagctgtatcgcgcaagcgcattattcgagacaatcagacacgaggcccagctttccaccgattacaagctcagcctgttcgatctacagacctcatcctaccaagccttacagcgcgttctcgtctcacttggacatcacgacgaggcactggctgtggcagagcgcggaagaacgagggcgtttgccgacctattagtggagaggcagacgggccagcaggactcggacccttattcaccagttacaattgatcaaatcctcgagatggtgaatggccagcgcggacttgtgctgtactattccctggccgctggatatttgtatagctggttactagcccctggggctggaattgttaaatttcacgagcattatctgggtgaaaacacggttgagaattcttctgactttcaggcgagcagcagtgtgaccctgcctacagcgaccggcagcgccctggagcagcacatcgcctcggttcgggaagccctgggcgtggagagccactactcccgtgcctgcgcgtcttctgaaacagagagcgaagctggtgatattatggatcaacagttcgaagagatgaataataagttgaattccgtcacggaccccacaggttttctaaggatggtgagacgcaacaacttgtttaaccggagttgtcaaagcatgacgtcactcttctctaatacagtaagccccacccaggatggtacgagcagcctgcccaggagacagtcatctttcgccaaaccaccattgagagccctgtatgaccttcttatcgccccaatggagggaggcctcatgcactcctctgggcctgtagggagacaccggcagctgatcttagtgctggagggcgagctgtacctgatcccctttgcgttactcaaggggagtagcagcaacgagtacctgtatgaaagatttggattattggcggttcctagcatacgctcgctgagtgtgcagagcaagtcgcaccttagaaaaaacccacctacatattctagctctacgtcaatggctgcggtcattggcaatcccaagcttcccagtgcggtgatggaccggtggttgtggggcccaatgcccagtgccgaggaggaggcatacatggtcagcgagttgctcggatgccagcccttggtgggctctgtggcaactaaagaaagggtgatgtccgcactgactcaagctgaatgcgttcacttcgcgacgcatatttcgtggaagctatccgccctggtgctcactcccagcatggatggcaaccccgcaagcagtaagtccagctttggccacccatatacaattcccgagtccctcagagtgcaggatgacgcctcagacggggaatcaatcagtgactgtccccctctacaggagctcctccttaccgcagccgatgtgctggacctccagctgccagtgaaactggtggtgctcggatcttcacaagaaagcaactccaaagtgactgccgacggtgtcattgcattgacccgagccttcttggccgctggggctcaatgcgtgctggtgagcctgtggccagtccccgttgcagctagcaagatgttcattcatgcgttctactcatccctgctgaatggattaaaggcttcagctgcactcggggaggctatgaaggttgtacaatcttcaaaagcattttcgcatccttcaaactgggctggctttatgctcataggaagtgacgttaagctcaactccccgtcttccttgataggccaggcccttactgaaatcttgcagcaccctgaacgggctcgggacgctctgagggtcctcctccatctggtcgagaaatccctccaaagaattcagaatggtcagaggaacgcaatgtataccagccagcagtctgtagagaataaggtgggcggaatacccggttggcaggctttgctgactgcagtcggtttcagattagaccccccaacctccggcctacctgcagcggtcttttttccaactagcgaccctggcgacaggctgcaacagtgttccagtacgctacaaagcctccttggcctccccaatcccgctttgcaagcgctgtgcaagctcatcacagcttcagaaacaggagaacagctcatctctagggctgtcaagaatatggttggcatgctccatcaggtcctggtccaattgcaggcaggcgagaaggaacaggacctcgcatccgctccaatccaggtgtccatcagcgtgcagctgtggcggctacccggatgtcatgagtttctggccgctctcgggttcgacctgtgtgaagtcggtcaggaggaggttatcctcaaaaccggcaagcaggcaaatagacggacggtgcacttcgccctccagagcctgctgagcctgttcgatagcacagagctgcccaaaaggctgagcctagactcatcttctagcttggagtccctggctagtgcccaaagcgtgtccaacgcactgcctttggggtatcagcagcctcctttctcgccgactggcgctgattcaatcgctagcgacgccatcagcgtgtactctctgtcgtccatcgcctcaagcatgtcgtttgtatcaaaacccgaaggcggaagtgagggcggaggccctggaggacgtcaagatcatgataggagcaagaacgcatatctccagcgcagtacacttcctaggagccagctgccccctcaaacgaggcctgctggcaacaaggacgaagaggaatacgaaggattctccatcatatcgaacgagcctttggcgacttaccaggagaaccgcaatacctgcttttcacccgatcacaagcaaccccaacctggaaccgctggcggaatgagagtgagtgtgagctccaagggaagtatttctacgcctaactcaccggtgaagatgacgctaattccatcacccaatagcccttttcagaaggtgggaaaactagcttctagcgatactggggagtctgaccagtcctctacagagacagattctaccgtaaaaagccaagaagagagcaacccaaagctcgacccacaagaactggcacaaaagatactggaggagacccaatctcatctgatcgcggtggagcggctccaacgctctgggggacaggtctcgaagtccaataaccctgaggatggagtccaggccccatcctcgaccgctgtctttagagcatcagagacaagtgcctttagtagaccagtgctgtcccatcagaagtctcaaccaagccccgttaccgtgaaaccaaaaccgcctgcaagaagcagtagcctccccaaagtatcttctggatatagctctcccacaaccagtgagatgtccattaaggactccccctcccagcattctggtcgcccaagcccaggctgtgatagccagaccagccaactcgatcagccacttttcaagctgaagtacccctcttccccctatagtgcacatatctctaaaagccctaggaatatgtcacctagttccggccaccagtccccagcgggatctgccccttccccagctctcagctacagctctgcagggagcgctagatcaagccctgcagacgcaccagatatagacaaattgaagatggccgctattgatgagaaggtgcaggccgtgcataacttaaaaatgttttggcaatcaactccacagcacagtacgggcccaatgaagatatttcgcggtgcgcctgggaccatgactagtaagagggatgttctctctctgctgaacctgagccccagacacaataagaaggaggagggagtggataaactggagctcaaagagttgtccctccagcagcacgatggtgctccaccaaaagctcctccaaacgggcattggcggactgaaacaactagcctcggatctcttccactgcccgcagggcctcccgctacagctccagcacgtcccctccgcctaccatcgggcaacggctataaatttctgtcacccggtcgcttctttccatcatcaaaatgcta

SEQ ID NO: 58107 - DNA, 11793 bp, Artificial Sequence
  derived and/or modified sequence
gggggcgcgcgcgcggtttgggggcagtgaggggcgccgcggcggcgcgcagcacggcgggaacatggcgcgcggaaccggcgcgcgcgcctagctggcgggaccgttagctcgaggcggacgcggcccgggccccgtggggatggagcagtcgccgccgccggcgcccgagccgacccaagggccgacccccgcaaggagccgaaggcggcgggagccagagtcgccgccggcgtcggcgccgattcctctctttggtgctgacactattggccagagaagtcctgatggaccggtactgagcaaagctgaatttgttgagaaagttcgtcagagtaatcaggcctgtcatgatggagatttccacacagctattgttctgtataatgaagccctggctgttgaccctcagaactgcatcttatacagcaatagatctgcagcctacatgaaaatccagcagtatgacaaggcactggatgatgcaatcaaagctcgacttctcaatcccaagtggccaaaggcatacttccgacagggtgttgccctccagtaccttggacgtcatgccgatgccctggcagcctttgcatctggactggctcaagaccccaagagtctccagcttctggtggggatggtggaagccgccatgaaatctcccatgagagactccctcgagcccacttatcagcagcttcagaaaatgaaactggacaagagtccctttgtggtcgtgtctgtggttgggcaggaactcctgacagctggccatcatggggcctctgtggttgtcttagaagccgcactgaagattggcacctgcagcctcaaactgagaggttctgttttctctgccctgagcagtgcttactggtctcttggaaatacagagaagagcaccggatatatgcagcaggacttggatgtagccaagaccttaggtgaccagacaggagaatgccgagctcatgggaatctgggctctgcattcttctccaaaggaaattaccgggaggctctcactaaccacaggcatcagttggtactcgccatgaaactcaaagatcgagaggcagcttcatcagccttgagcagtctgggccacgtgtacacagccattggagactaccccaatgcactggccagtcacaaacagtgtgttcttcttgccaagcaatccaaagatgaactttctgaagcccgagaacttggcaacatgggagctgtgtatattgccatgggtgactttgagaatgctgtgcagtgccatgagcagcatctgaagatagccaaggacctggggaacaagcgagaagaggcccgggcttatagcaacctgggcagtgcctatcactaccggaggaactttgacaaggccatgtcttaccataactatgtcctggagctggcacaggagttgatggagaaggctattgagatgcgggcctatgctggactaggccatgctgccaggtgcatgcaggatttggagagagctaaacaataccatgagcagcagctgggcattgctgaggatctcaaggaccgggctgcagaggggcgagcatcctccaatctaggaatcatacaccagatgaaaggtgattatgacactgcactgaaactccacaagacccacctgtgcattgcccaggagctgagtgattatgctgcccagggccgtgcctatgggaatatgggcaatgcctacaatgccctgggcatgtacgaccaggcggtcaaataccatcggcaggagctgcagatctccatggaagtgaatgaccgcgcctcacaggcctccacacatgggaaccttgccgtggcctaccaggccctgggtgcccatgaccgggccctgcaacactatcagaaccacttgaacatcgcccgggagctacgagacatccagagcgaggcccgggccctcagcaacctgggcaatttccactgctctcggggagagtatgtccaggctgccccctattatgaacagtacctccggcttgctcccgaccttcaagacatggaaggagaagggaaggtctgccacaatcttggctatgcccattactgccttggaaactatcaggaggcagtgaagtactacgaacaggatctggcactggctaaagaccttcacgacaagttgagccaagcaaaagcctactgcaacttgggcctagcattcaaggctctgctgaatttcagtaaagctgaagagtgtcagaagtacctactgtccctagcccagtctctgaataattcccaggctaaatttcgagccctaggaaacctgggcgatatattcatctgtaaaaaagatataaatggtgcaataaaattctatgagcagcaactgggcttagctcaccaggtaaaggacagaagattagaagccagtgcatatgcagccctgggcactgcataccgaatgatccagaagtatgacaaggccctgggttatcacacacaggaactggaggtatatcaggagctgagtgacttgccaggggagtgcagagctcatgggcacctggctgctgtctacatggcccttgggaaatacacaatggcattcaagtgttatgaagagcaactggatctagggcaaaagctgaaggatccgagtctggaagcccaggtctatggcaacatgggcatcacaaagatgaacatgaatgtgatggaagaagccattggctactttgagcagcaattggccatgctgcagcagctaagtggaaatgagtctgtgctcgacaggggccgggcctatggcaacctgggggattgctacgaagccctgggtgactatgaggaagctatcaaatactatgaacaatatttatctgtcgcgcagagtctgaatcgcatgcaagaccaagccaaggcttaccggggcctgggaaatggacacagggcaatggggagcttgcagcaagcccttgtgtgctttgaaaagaggctcgtggttgctcatgaacttggagaggccttcaataaagcccaggcctatggagagctgggaagtctgcacagccaattagggaattacgaacaagccatttcctgccttgaacgccagctgaacattgctagagatatgaaagaccgagccctggagagtgacgcagcctgtggcctggggggcgtttaccagcagatgggggagtatgacacagccctgcagtaccaccagcttgatctacagatagcagaggaaaccaacaaccccacgtgccagggccgagcctatgggaacctgggcctgacttatgaatccctgggcaccttcgagagggctgtggtctatcaagaacagcacttgagcattgctgcacagatgaatgacttggcggccaagacggtgtcatatagtagccttggaaggacccatcatgccttgcagaactattcccaagcagtcatgtacttacaggaaggtttaaggttagctgagcaactgggccgaagagaagatgaggcaaaaattcgccatggccttggcctctccctttgggctagtggaaacttggaggaggcccaacaccagctttatagggcatcagccttgtttgaaacaatccgacatgaggcacagctgagcacggactacaaactctccctctttgacctgcagacatcatcctaccaggccttgcagcgggtgctcgtcagcctaggccatcatgatgaagccctggctgtggcagaaaggggacggacaagggcatttgctgatcttctggtggaacgacaaacaggacaacaagactccgacccctactccccagtcactattgatcagatcttagagatggtaaatggccagaggggactagtgctttactattccctggctgcaggctatctgtatagctggctgctggctcctggggcaggaattgtgaagtttcatgaacactacctgggtgagaacacagtggaaaactcaagtgacttccaggccagcagcagtgtaacccttccaacagcaaccggctcagccctggagcagcacattgccagtgtccgggaggccctgggggtggagtctcactactcaagggcctgtgccagcagtgagacagagagtgaagcgggagacatcatggaccagcaatttgaagagatgaacaacaaactcaactcggtcactgaccccactggctttctgcggatggttcgccgcaataacctgtttaacaggagctgccagagcatgacgagcctgttcagtaacactgtgtcaccgacccaggacgggacctcctctcttcccaggaggcagagctcgtttgccaagcccccgctccgtgccctgtatgacctgctcatcgcgcccatggaagggggcctgatgcactccagcggccccgtgggccggcaccggcagctcatcctggttctggagggggagctctacctcattcctttcgccctcctgaagggaagctcctccaatgagtacctctacgagcgcttcggcctccttgctgtcccttccatccgctccctcagcgtgcagtccaagtctcacttacggaagaacccgcccacatactccagctccacatccatggcggctgtcatcggcaaccccaagctaccatcggccgtgatggacaggtggctgtgggggcccatgccatcggccgaggaagaggcctacatggtgtccgagctgctgggctgccagcccctagtgggcagtgtggccaccaaggagagggtcatgagtgccctgacccaggctgaatgcgtccactttgccacccacatctcctggaagctgtcggccttggtcctcacgcccagcatggacggcaaccctgccagcagcaagagctccttcggccacccctacacgatccctgagtccttgcgggtgcaggacgatgccagtgatggggagagcatctcggactgcccgcccctgcaggagctgctgcttactgccgccgacgtcctggacctgcagctgcctgtgaagctggtggtgcttggctcctcccaggagtccaacagcaaagtcacagccgacggggtcatcgcgctgacaagggccttcctggctgccggcgctcagtgtgtcctcgtgtctctgtggcctgtgccagtggctgcttctaagatgttcatccatgccttctactcatccctgctgaacggcctgaaagccagcgccgccctgggggaggccatgaaggtggtgcagagcagcaaggccttctcgcacccctccaactgggcagggttcatgctcatcgggagtgacgttaagctgaacagcccctcatcactcatcggccaggccctcacagagatcctgcagcacccggagcgtgcgcgggacgccctgcgagtgctgctgcacctggtggagaaatccctgcagcgcatccagaatgggcagcgcaatgccatgtacacatcccagcagagtgtggagaacaaagtgggcggcatccctggctggcaggccctcctcaccgctgtgggcttccggctggaccccccaaccagtggcctgccagcggctgtcttcttcccaacctccgacccgggcgaccggctccagcagtgcagcagcacactccagtccctgctgggtctgcccaatcctgccctccaagccctttgcaaactcatcactgcctccgagacgggcgagcagctcatcagccgggctgttaaaaatatggttggaatgctccaccaggtgctggttcagctccaggctggcgagaaggagcaggacttggcatcagctcccattcaggtctccatcagcgtccagctgtggcggctcccgggatgccacgagttcctggcagctctaggttttgatctctgtgaagttggtcaggaggaagtaatcctgaaaaccgggaagcaagctaatcgacggactgtgcacttcgcgctccagtccctgctgtctctgtttgattctactgagctacccaagcgcctcagccttgacagctcctcctccctcgagtctcttgcttctgctcagtctgtttccaacgccctgcccttgggttaccagcaaccccccttctctcccaccggtgcggacagcatcgcctcagatgccatctctgtgtacagtctgagctccattgcctcctcaatgagctttgtctccaaacccgagggtggatcagagggtggaggccccggaggacggcaggaccatgaccggtccaagaacgcttacctgcagagatccaccctgcctaggagccagctgcctccccagacccgccctgcaggcaacaaagatgaagaagaatatgaagggttttctatcatcagtaacgagcccttggcgacctaccaagaaaaccgaaacacatgcttctcaccagaccacaaacaaccccaacctgggacagccggaggcatgagagtctcggtgagctccaaagggagcatcagcactccaaattctccagtgaaaatgactctgattcccagccccaactcacccttccaaaaggtgggaaaactagcaagctcagatacaggagaatcagaccagtctagcacagaaacggacagtaccgtgaaatcccaagaagaaagcaacccaaaactggatccacaagagttagcccagaaaattctggaggagacacagagtcatctcattgcggtggagcgtcttcagaggagcggcggccaggtgagcaagagtaataaccctgaagacggcgttcaggcgcccagcagcactgctgtcttcagagcgtcagaaaccagtgcgttcagcaggcctgttctctcccatcagaagagtcagccatcaccagtcactgttaaaccaaagcccccagccaggagctcctccctgcccaaggtgagttccggatatagcagccccaccacctcagagatgtccatcaaagacagcccgagccagcacagtggccggccatcgcccggctgcgactcacagacttcccagctggaccagcctctctttaaactgaagtaccccagctctccttacagcgctcacatttccaaatcaccaaggaacatgtccccaagctccggccaccagtctcctgctggcagtgcaccctccccagctctctcctactcctcagctggatctgctcgctcaagtccagcagacgctcccgacatagacaaactgaaaatggcagccattgatgaaaaggtgcaggctgtccataacctgaagatgttctggcagagcacaccccagcattccacagggccaatgaagatcttccggggggctcctggcacgatgacttccaaaagggatgtcctcagtctgttgaatttgtcaccacggcacaataagaaggaggagggagtggataagcttgaactgaaggagctgtccctgcagcagcatgacggagctccaccgaaagcccctcccaacggacactggcgcaccgagaccacctcgctgggctcactgccgctgcccgccggccctcccgccacagcccccgcgcgccctttgaggcttccttctggaaatggctacaagttcctgtctccaggaagatttttcccttcttccaaatgctaaagcatcttttatacccactgactctgagcagcctgcagatgggggcctggcgtttgcttcagcccttccctgagtgcagtccccccacagccaccagcaccctcatgatgctgtgctctgcaggcgaggggcaccaccacgtccaaaggctgccacacacactggtggcttttctgggccacattcaccaaaagccaggacttctgtggggctggtacaggaggctcatggaatttcctacacacttcaccaaatgtttgtttacctttgaactccctgcttctcatctttgatatgattcttcaccaggattttgtacaaaaatgatcatggttctggggtggggagaggaaagggagcacatattttgctaagaggtatatatgcagtaccttttatacacagaaatacaaatagagctttttctaaggctttcggttgctggttgggggtgggatatatgaaatttcagttgaattctacaggaaagtgttatattagccaaaaacagaaaaatggtttttaaaatgccaatgatttgtaattaaattgtagcaattttggtctcatgatagtgtaatatctcagcaacaatgcaataattcacattgaaacagcgcttccattctgaactctgctctgcaaatgtcttttgggtcccgctgtcaaccaaacttgaattttcttaaaaaaaaaattatgtaactcttatccaggcattttagaactatgcaattgtgatttaaaatgcaactttgtgcttttaaaacattattgaccttttttgtatatggataaacaacttggttttattatcaatagtactttgcatttatagctattatttttaaaagctcaaaaagttttttaaaatgtcaaattttgaatagtcatcaataagtaattatcaagtttggaaggaaaggttgaaatgactccgtttccttataagcaaaaaaaaaaaaaaaaaaaaaaaaaaaaaaaaaaaaatttccatggctaactagatttaaccagaatcccgccttccaggctcctgttcccttttattagctgctgaattttattcccttttcccaactccaggtccctcagttgtcttatatctaaatcctttgccaggtccccacaatcccagcacctgcctctgtgagctgcccccaggccctcaccttggccctggccagcctcctgtgctcctgctgtctgaaggactggcccctcccccactgctgaagccacacgtacagatcctaagcaacagggccttttgctgggacgtatgcctggattatggccaaccgggaagagagagatgtatcttaaaaagtggaggtggacttctcctacagctctgacggtaacttaaattgttgccagcttgaggcaagacaagggaatcatctagttaggggtaaccattaatttattttataaagaaaggaaatgctgaaagtcgtattagtactgagtttagttggagaatttagataagtaagtatcttttaggtaattctaaaattaaaatcctacccacctcactacagggttcctcatgaaggtgggcggccacctggcctgggccaccagcagcacatggagcagacctgaggggcctggcagggggcactgacctcaggatccccaggtgggggttttaaccatgggtgggatctcagcttctgcgcatacactgacaatctcacctgttcctcagtgtactcctctgaaaagaagaaaggataatatttatccaatctgtgttctcctgagctccatcctaggggtttttaatttaaccaacagccatgttgacaaaagccaacaataagcatgtcttattctagccctgatcccaacactgaaagcgaagtactttataaagaagccagcaattatgagggtttctttatgttagtaggggaaaaaatggtaataaaagtaccagtgtagcaagtgaagaccaaatttatagcactgtgcattagatagcaaaatcaggttcttaacaatgaaaagtaaacctcaagtttctaaatccatatgcagatggttaggctgtccctctcttagcaaatctctcagcctccttctttcccaagtgccaaggatccctggagtaaagctctggggtctgtgctctctttctgtgaggggaaggctgcggccctatttgcccctctctagcaaacacccccaccaccctgccgcttcctgtggttattgagccagctaggagttactcatggactctaacctggttttagtcccatgtacatcgttgttttaggtttcatactgaagagccaatggtttatgtggttttattctgtcttaaatataagtttcaaggaagggaaaacaaaagtgataaaatgatagaacagtctagaggccactgtaaagtcaccgccactttacgtgtatgtcagtcttggtgttcttgtatgagtaaaatggatgtaaaatcataaaatcacagtgaatgtttcaggctacactggaaaaagtatgcacttagaattaaaggaaattgtataattcaccaagatttctttgtgtagatcaggggttggcaactatgacccacaggctaagactggtcagcggtctggtttttcacagccatgagctaagttacctttttaaagggttatataagtaattacatcatatttttgattttgcctttggcccacaccacataaaatattcaatacctggcctttttttttttttttgagacagagtctcgctctgtcacccaggatagagtgcactggtgcgattttggctcactgcaacctcttcctcctgggttcaagcaattctccctgcctcagcctctaagtagctgggactacaggcacccactaccatgccttgctaatttttgtatttttaatagagatggggtttcaccatgttggccaggctggtctcgaactcctgacctcaggggatccgcccgccttggcctcccaaactgctgggattacaggtgagccactgcgcccagccaatacctggccttttaagaagtttgctgactcctggtatggatgacagaaaatggaataacgttttgtttctccagtctaggaaaagcaagtcaggtagtggatagactgactggcgtccggggagcccagggtatgtgagggccacgtggatggaagcaaatgcctcctgcatagcccttggctctttgtcccacttgggaggagtccatggatgtaatatttacaaaacaattttttccttaccatttgcagaaagcattgcatatatttccttttagctcaggaaactggcatgccccaccctctgctactccatcagatgtaaatacaatgactataagccgtacaactcccctctcttagaaacctcagcaggaccacagagcaagggagtcaaagctttcttaattctctccagtaaatgactcaactaatttgatttttttaattaagtcaaaatatcaagagaaaaattgctactaaaacttacattttgatccacactgatgtgcaacacaaaatgaaagttttcacctccattccattttttaaaaattcacggtccacactgaaacttgctgggttttagcaggagacaaaggtgtcacccacgctgtcctcatcctgctctctctgtcccagtgacgctccagcatatgatcactgcagccggtccctggcccgtgccgattctgccacctcccagccacacacatttgcagacccacaagaagaactgtagccttgataatttcagttcaggctggaaaaatgccatgcaataatctggtttgctttcagtaagtaggcaacaagtgaaaactgtataattttcatcacctattctgctgttctatctaaaatgagtgtacctgtggtttgtgaactgggcccttgtttgtgccagatccttcaaagatgttccctgtcaggacacctgtggccctgcccctcctcagacaccttcccactggcattcacgttccttatatgcagtgttagccatctttggcctacgtggactttttttgtaaattacaccatttccagacattaaactttttatattatgaaatttaccatgtaaaaagaacttcatatttttattgagattgctaaggcacttggccttcctcctttgtgattttcagtgtctattaaagcatgagttccctcagtttt

SEQ ID NO: 58108 - protein, 303 aa, Artificial Sequence
  derived and/or modified sequence
MSEAGEATTTTTTTLPQAPTEAAAAAPQDPAPKSPVGSGAPQAAAPAPAAHVAGNPGGDAAPAATGTAAAASLATAAGSEDAEKKVLATKVLGTVKWFNVRNGYGFINRNDTKEDVFVHQTAIKKNNPRKYLRSVGDGETVEFDVVEGEKGAEAANVTGPDGVPVEGSRYAADRRRYRRGYYGRRRGPPRNAGEIGEMKDGVPEGAQLQGPVHRNPTYRPRYRSRGPPRPRPAPAVGEAEDKENQQATSGPNQPSVRRGYRRPYNYRRRPRPPNAPSQDGKEAKAGEAPTENPAPPTQQSSAE

SEQ ID NO: 58109 - DNA, 912 bp, Artificial Sequence
  derived and/or modified sequence
atgtctgaagcaggcgaggcaaccactacaactaccactactctgcctcaagctcccacagaggctgccgccgcagctccccaggacccagcccccaaatcccctgttggctcaggtgcacctcaggcagccgcacccgcccccgccgctcacgtagcaggcaatcccgggggggacgccgccccagctgcgacgggcacggctgctgcagcaagtctggctacggccgccggcagcgaagacgcagagaagaaggtgttggctacaaaggtcctcggcacagtgaagtggtttaacgtcagaaatggatacggctttatcaacagaaacgatacaaaagaggacgtattcgtacaccagaccgccatcaagaagaataatccccgaaagtatttgaggagtgtgggggacggcgagactgtcgaatttgacgtggtggaaggagagaaaggagcagaggcagctaatgtcaccggccccgatggagttccagtggaaggctccagatacgccgccgatcggcggcggtaccggcgcggatattatggccgccggcggggcccaccaagaaacgcgggcgagattggcgagatgaaggacggcgtgcccgagggggcgcagctgcaaggccccgtacacaggaaccccacctatagaccaaggtataggagcagggggcctccacggcctcgacctgcacccgcggtgggagaggctgaggacaaggagaatcagcaggctacctccgggcctaaccaaccctctgtgagacgcggttacagacgtccttataattacaggcggcgcccccgcccgcccaacgccccatcccaggacggtaaagaagccaaggctggagaggcgcctaccgaaaacccggctccccccacacagcaatcctctgctgagtag

SEQ ID NO: 58110 - DNA, 912 bp, Artificial Sequence
  derived and/or modified sequence
atgtctgaggccggggaggccaccaccaccaccaccaccaccctgccccaggcccccacagaggccgctgctgctgccccccaggaccctgcccccaagagccctgtgggcagcggggccccccaggccgccgccccagccccagctgcccacgtggccggcaaccctggaggagatgctgccccagctgccactggaacagctgctgctgccagcctggccacagctgctggctctgaagatgctgagaagaaggtgctggccaccaaggtgctgggcaccgtgaagtggttcaacgtgagaaatggctacggcttcatcaacagaaatgacaccaaggaggatgtgtttgtgcaccagacagccatcaagaagaacaaccccaggaagtacctgcggtctgtgggagatggagagaccgtggagtttgatgtggtggagggggagaagggagctgaggccgccaacgtgacaggcccagatggagtgcctgtggagggcagccgctatgctgctgacagaagacgctaccgccggggctactacggcagaagaagaggccccccaagaaatgctggggagattggagagatgaaggatggagtgcctgagggcgcccagctgcagggccctgtgcacaggaaccccacctaccggccccgctaccgcagccggggccccccccggcccaggcctgccccagctgtgggggaggccgaggacaaggagaaccagcaggccaccagcggccccaaccagcccagcgtgagaagaggctacagaagaccctacaactacagaagaagaccccggcccccaaatgcccccagccaggacggcaaggaggccaaggccggggaggcccccacagaaaatcctgccccacccacccagcagagcagcgctgagtag

SEQ ID NO: 58111 - DNA, 912 bp, Artificial Sequence
  derived and/or modified sequence
atgagcgaggccggcgaggccaccaccaccaccaccaccaccctgccccaggcaccaacagaggccgcagcagctgcaccacaggaccccgcccctaagtcccctgtcggttccggcgcaccgcaggcagctgctcccgcccccgccgcgcatgttgctggcaaccctggcggcgatgccgctccagcggccactggaactgccgcagccgcctctttggcgacagccgcggggagcgaggacgcagagaaaaaagtattagctacaaaggtcttaggaaccgtgaaatggtttaacgttcggaatgggtacggttttattaaccgcaacgataccaaagaggatgtgtttgtgcaccagaccgcaattaagaagaacaaccctagaaagtatctcagatccgtaggggatggcgagaccgttgaattcgatgtcgtagagggggaaaagggcgcagaagctgctaatgttactgggccagatggagtgcccgtcgaagggagtcgctatgcagcagacaggcgcaggtacaggcggggatattacggccgcaggcgaggccccccccggaacgcgggcgaaatcggtgagatgaaagatggggtacctgagggcgcccagctgcaagggcccgtccacagaaatcctacctatcgcccccgctataggagtcggggtccgcctcgccccagaccggctcccgcagtgggcgaggctgaggataaagagaaccagcaagctaccagtggacctaaccagcctagcgtgcgccggggatataggagaccttacaactacagaagaaggccccgccctcccaacgccccctcccaggatgggaaggaggccaaggccggtgaagcacctaccgagaacccggcccccccaactcagcagagcagcgctgagtag

SEQ ID NO: 58112 - DNA, 912 bp, Artificial Sequence
  derived and/or modified sequence
atgtcagaggctggggaggctactaccaccacaacaaccacattgccccaagcacccaccgaggcagccgctgcagctccccaagatccagccccaaaatctcccgtggggagcggagcaccccaagctgccgctcctgcccctgccgctcacgtggccggaaatccgggtggggatgccgcacctgccgctacgggcaccgctgccgcagccagcctcgcgaccgctgcagggagtgaggatgcggagaagaaagttcttgctacaaaggttctcgggacagttaaatggttcaacgttcgcaatggctacggtttcatcaataggaacgacacgaaagaggatgtttttgttcatcagactgcaattaaaaaaaataatcccagaaaatacctgagaagtgtcggggacggggaaacagtcgaattcgacgtggtggagggggaaaagggagccgaagcagcgaacgtcaccgggcctgatggtgtgccagtggagggttcacgatatgcggctgatcggagacggtaccgcaggggttattacggtcggagaagggggccacccagaaacgcaggggaaatcggcgagatgaaagacggggttccagagggcgcacaactgcaggggcctgtacacagaaacccaacctaccggccaagataccggagtcggggtccaccaagacccagaccggcacctgccgtgggtgaggctgaggacaaggaaaatcagcaggccacttcggggcctaaccagcccagcgtccgacgagggtatcgccgtccatacaactacaggcggcgacccagacctccaaatgcaccgagccaggacggcaaagaggcgaaggccggagaggcgccaaccgaaaacccggctccacctacccagcaatcctctgcggagtag

SEQ ID NO: 58113 - DNA, 1713 bp, Artificial Sequence
  derived and/or modified sequence
gagcccaagagagagcgcgcagcacgaagctcgagccgcctccgccgcgcgaccccacctcggccgccgccgcctgcgccgcgagatccgccccggcctccccgagagcgagccccggccgccgcgaccaccagccgcgctaaccgccgaccaaccgccaccgaggcgcctgagcgagagcagaggaggaggaggcatgagtgaggcgggcgaggccaccaccaccaccaccaccaccctcccgcaggctccgacggaggcggccgccgcggctccccaggaccccgcgcccaagagcccggtgggcagcggtgcgccccaggccgcggccccggcgcccgccgcccacgtcgcaggaaaccccggtggggacgcggcccccgcagccacgggcaccgcggccgccgcctctttagccaccgccgccggcagcgaagacgcggagaaaaaagttctcgccaccaaagtccttggcactgtcaaatggttcaacgtcagaaatggatatggatttataaatcgaaatgacaccaaagaagatgtatttgtacatcagactgccatcaagaagaataacccacggaaatatctgcgcagtgtaggagatggagaaactgtagagtttgatgtggttgaaggagagaagggtgcagaagctgccaatgtgactggcccggatggagttcctgtggaagggagtcgttacgctgcagatcggcgccgttacagacgtggctactatggaaggcgccgtggccctccccggaatgctggtgagattggagagatgaaggatggagtcccagagggagcacaacttcagggaccggttcatcgaaatccaacttaccgcccaaggtaccgtagcaggggacctcctcgcccacgacctgccccagcagttggagaggctgaagataaagaaaatcagcaagccaccagtggtccaaaccagccgtctgttcgccgtggataccggcgtccctacaattaccggcgtcgcccgcgtcctcctaacgctccttcacaagatggcaaagaggccaaggcaggtgaagcaccaactgagaaccctgctccacccacccagcagagcagtgctgagtaacaccaggctcctcaggcaccttcaccatcggcaggtgacctaaagaattaatgaccattcagaaataaagcaaaaagcaggccacaaccttaaccaacaccaaagaaacatccaagcaataaagtggaagactaaccaagatttggacattggaatgtttactgttattctttaagaaacaactacaaaaagaaaatgtcaacaaatttttccagcaagctgagaacctgggaattcctgcacggaagacaagagagtagcctctccagtttcagcaaccgctaggtttctattttttttcctggtttttactgttttggtaatatatatattgaaacaagaaatattaataccacatggggagaaccccaaccaaagaaatctgaaatatatagtaaatgcttttttttccgtttttgttcattttggatgctggtgctaaacctccaagtgtcatgatttaaaaaaaaaaaaaatttatgtccttcttatttatttctaggatgaggggaggataacatttttgctttcttatgtgactctctttgaaaatgtgcagtaagaaattcctcaaaaataaaatttttacccttcagaggacagaa

SEQ ID NO: 58114 - DNA, 912 bp, Artificial Sequence
  derived and/or modified sequence
atgagcgaggccggcgaggccaccaccaccaccaccaccaccctgccccaggcccccaccgaggccgccgccgccgccccccaggaccccgcccccaagagccccgtgggcagcggcgccccccaggccgccgcccccgcccccgccgcccacgtggccggcaaccccggcggcgacgccgcccccgccgccaccggcaccgccgccgccgccagcctggccaccgccgccggcagcgaggacgccgagaagaaggtgctggccaccaaggtgctgggcaccgtgaagtggttcaacgtgagaaacggctacggcttcatcaacagaaacgacaccaaggaggacgtgttcgtgcaccagaccgccatcaagaagaacaaccccagaaagtacctgagaagcgtgggcgacggcgagaccgtggagttcgacgtggtggagggcgagaagggcgccgaggccgccaacgtgaccggccccgacggcgtgcccgtggagggcagcagatacgccgccgacagaagaagatacagaagaggctactacggcagaagaagaggcccccccagaaacgccggcgagatcggcgagatgaaggacggcgtgcccgagggcgcccagctgcagggccccgtgcacagaaaccccacctacagacccagatacagaagcagaggcccccccagacccagacccgcccccgccgtgggcgaggccgaggacaaggagaaccagcaggccaccagcggccccaaccagcccagcgtgagaagaggctacagaagaccctacaactacagaagaagacccagaccccccaacgcccccagccaggacggcaaggaggccaaggccggcgaggcccccaccgagaaccccgccccccccacccagcagagcagcgccgagtag

SEQ ID NO: 58115 - DNA, 1677 bp, Artificial Sequence
  derived and/or modified sequence
cctagtcagtgggggtgtagggagtggtattttgttcagtaggggcctggtcactgggggtctggcacagacccaggcccaggggatgcccaatgctgggaggaggctcagacagcaggaaggagagaaggaaggaaggaacttccgtagtaccgatgcctacaaaattacaacacgtggtgctgtttctactccatcaccatgttcgctctttatttcctatgtaattctctattcaaccggcctcagttgagcacaaaaccatccttgtaccaccatgaatagttggccatggctctttgatagcaatttttgttctgccgtagaaattatccttgaaccagaaaaaaaaatccccaattcaacactccatttttgtgaagagctggttccgaattctgggtcactttttggaaaaaatatctgttgtggtaaacagtgctgcatctgtgatctcaagtctctactggaattggatagagatggtgaatttcagccagagcgcccaaagaactcgtgtcccgcgctcctgaacgccatcagccgccgcacctccatcttccctcctcccacgagtctcctgctccccgtgactctggcctcctcgcagtgttgctgggccacgtcaggaagtgctggaggacgtggcattgcaccaacaccaggcggccagccgtgtggctcatcccgcaaatcaggctcttcctgtgcatggagatggagtccctctggaggcagcccgtggccctgttctcgggcaggtggagcatggagacgactgggaacttcactagacacgcatccagccggttcaagggcttgtcgcgccgtgcaccagcttgcaggagaaagcccaacgcctcgccaagcacgaaggcctcccttcccgacttgatgaaggcagagtagcggttgaggttgcggctcacagtgaccgagctcctgcccacgtggggacccagggagccgtcgagctccagcccaggcttggacctgaagaagctggcaacccgcgaacgccaacaggcacagtcgaaaaaagcaaaagaaaaatcccaaacaaaatcctgttctccctagccaaaggaccaggagagggggcagcccagcaagacaaaacacatttacacaattctggctaacctcagccagtccttggccgtgagttcgtttttctgccacctcactttggggctgggctggttctccaccctcgcagggtgcgtttctcaatccagacgctggggggcgctagtacctcgcgagctccgcgaggatcattcccgggacgccgcggagtcacctcccctcctagggacccagagcttcccagggccgcgcctgtaggttttccagaggtccccgaaaacgttaaagacctggaaggaaaaaaaaactgtaaaaccacacactttgatatttgacaacgtaaaagcaaggctgcaaaatcaaaatcaatgaacgcttgaaggaaatgtctacttagctagacatagtgccacctggattcactgttggctccagaatcccccccacggtgtcatcacgttggaaagtttttgtgggttagatgttctctgttggcaagaatgcctgtacatgcccaagaagcatatgagtttaatgggaccccaataacttcaaaagcaaaaagataacgatcctttctactttttt

SEQ ID NO: 58116 - protein, 168 aa, Artificial Sequence
  derived and/or modified sequence
MVKEVWRVLREEPGRRKESRQNRARGNRVQQNSSNLNPTPAPGPHSTESRGRRRAGSEAPPVPGSESLSTSSERGHGPAVGNLVSESAGRSAGQGSPGPDAMSRNLRTALIFGGFISLIGAAFYPIYFRPLMRLEEYKKEQAINRAGIVQEDVQPPGLKVWSDPFGRK

SEQ ID NO: 58117 - protein, 67 aa, Artificial Sequence
  derived and/or modified sequence
MSRNLRTALIFGGFISLIGAAFYPIYFRPLMRLEEYKKEQAINRAGIVQEDVQPPGLKVWSDPFGRK

SEQ ID NO: 58118 - DNA, 1127 bp, Artificial Sequence
  derived and/or modified sequence
atggtaaaggaggtctggagggtgctgagggaggaaccgggccgaaggaaggaaagtagacagaacagggcccgcgggaatcgagtgcagcaaaacagctccaacctcaatccaacgccagcgcccggcccgcacagcacggaatcccggggaaggcggagggcggggtccgaggccccgcctgtgcccggaagcgaaagcctctccacctcttccgagcggggtcacggcccggccgtcggtaacctggtttccgagagtgccgggcggtcggcgggtcagggcagcccggggcctgacgccatgtcccggaacctgcgcaccgcgctcattttcggcggcttcatctccctgatcggcgccgccttctatcccatctacttccggcccctaatgagattggaggagtacaagaaggaacaagctataaatcgggctggaattgttcaagaggatgtgcagccaccagggttaaaagtgtggtctgatccatttggcaggaaatgagagggctgtcatcagctctgattaagaaaggagatttcttcatgctttcgattctgcatggggtacagccagtcacctcaccagagaatgacggctggagaagaaaactctgtaataccataaataagagtgcttgtaataaaagactgtgcacaaggattaatatttcccttcttaagtatcaaaagaactctggaacaaattataccattaggaaggttttcatgattcagttgattttccaaaaatgaagctatctcacccagctgggtttggaggagcaatctgcttattattctgtcgttaccacttactcaagcgagctgtgatatgaatacaagcaaccagtgggctcgggaaggtccgggtctcttctgccatcttccagataagagatttcagtaaaaaactgccatgctgagctgccttatagagctcttcgaaaatgttcgagttgataaagctctttgaggacaaggtacttcgtgcacctcatgctgaagattgcaccgtgttggaaaataaatatgaagcaagtcaaactagatgcatacacttgtgtagaaatcaataatcaattaatagaagtgaaaaaatagacattaaaatgatttatttct

SEQ ID NO: 58119 - DNA, 935 bp, Artificial Sequence
  derived and/or modified sequence
gcgaaagcctctccacctcttccgagcggggtcacggcccggccgtcggtaacctggtttccgagagtgccgggcggtcggcgggtcagggcagcccggggcctgacgccatgtcccggaacctgcgcaccgcgctcattttcggcggcttcatctccctgatcggcgccgccttctatcccatctacttccggcccctaatgagattggaggagtacaagaaggaacaagctataaatcgggctggaattgttcaagaggatgtgcagccaccagggttaaaagtgtggtctgatccatttggcaggaaatgagagggctgtcatcagctctgattaagaaaggagatttcttcatgctttcgattctgcatggggtacagccagtcacctcaccagagaatgacggctggagaagaaaactctgtaataccataaataagagtgcttgtaataaaagactgtgcacaaggattaatatttcccttcttaagtatcaaaagaactctggaacaaattataccattaggaaggttttcatgattcagttgattttccaaaaatgaagctatctcacccagctgggtttggaggagcaatctgcttattattctgtcgttaccacttactcaagcgagctgtgatatgaatacaagcaaccagtgggctcgggaaggtccgggtctcttctgccatcttccagataagagatttcagtaaaaaactgccatgctgagctgccttatagagctcttcgaaaatgttcgagttgataaagctctttgaggacaaggtacttcgtgcacctcatgctgaagattgcaccgtgttggaaaataaatatgaagcaagtcaaactagatgcatacacttgtgtagaaatcaataatcaattaatagaagtgaaaaaatagacattaaaatgatttatttcta

SEQ ID NO: 58120 - DNA, 507 bp, Artificial Sequence
  derived and/or modified sequence
atggtgaaggaggtgtggagagtgctgagagaggagcccggcagaagaaaggagagcagacagaacagagccagaggcaacagagtgcagcagaacagcagcaacctgaaccccacccccgcccccggcccccacagcaccgagagcagaggcagaagaagagccggcagcgaggccccccccgtgcccggcagcgagagcctgagcaccagcagcgagagaggccacggccccgccgtgggcaacctggtgagcgagagcgccggcagaagcgccggccagggcagccccggccccgacgccatgagcagaaacctgagaaccgccctgatcttcggcggcttcatcagcctgatcggcgccgccttctaccccatctacttcagacccctgatgagactggaggagtacaagaaggagcaggccatcaacagagccggcatcgtgcaggaggacgtgcagccccccggcctgaaggtgtggagcgaccccttcggcagaaagtag

SEQ ID NO: 58121 - DNA, 204 bp, Artificial Sequence
  derived and/or modified sequence
atgagcagaaacctgagaaccgccctgatcttcggcggcttcatcagcctgatcggcgccgccttctaccccatctacttcagacccctgatgagactggaggagtacaagaaggagcaggccatcaacagagccggcatcgtgcaggaggacgtgcagccccccggcctgaaggtgtggagcgaccccttcggcagaaagtag

SEQ ID NO: 58122 - DNA, 507 bp, Artificial Sequence
  derived and/or modified sequence
atggtgaaagaggtttggagagtgctgcgcgaagaaccaggccggcgaaaagaaagccgacagaatcgagcgcgcggcaaccgcgtccagcagaatagcagcaacctgaacccgactcccgcccctggtccacattctaccgaatcaagggggcgaagaagggcggggtctgaggccccacctgttcccgggagtgagtctttgtccacaagctccgagcgcggccatggcccggcagtgggtaatttggtttctgaatccgccgggcgatctgccggccagggttccccagggcccgacgccatgtctcgaaacctccggactgctctgattttcggtggttttattagtctaatcggcgccgcattctaccccatttattttaggcccctgatgcgactcgaggagtacaaaaaagagcaagcaatcaatagggcaggcattgtgcaggaagacgtccagcctcctggccttaaagtatggagcgaccccttcggcaggaagtag

SEQ ID NO: 58123 - DNA, 204 bp, Artificial Sequence
  derived and/or modified sequence
atgagccgcaacctcagaactgccttgatctttggagggttcattagtctgattggcgccgccttttacccgatttacttccgccccctgatgaggctggaagagtacaaaaaagaacaggctattaatcgggccgggattgttcaggaagacgtgcagcccccgggtcttaaagtgtggtctgacccatttggccgtaagtag

SEQ ID NO: 58124 - DNA, 507 bp, Artificial Sequence
  derived and/or modified sequence
atggtgaaggaggtgtggagggtgctgcgggaggagcctggaagaaggaaggagagccggcagaacagagcccggggcaacagagtgcagcagaacagcagcaacctgaaccccaccccagcccctggcccccacagcacagagagccggggcagaagaagagctggcagcgaggcccctcctgtgcccggcagcgagagcctgagcaccagcagcgagcggggccacggccctgctgtgggcaacctggtgtctgagagcgctggccgctctgctggccagggcagccctggcccagatgccatgagcaggaacctgaggacagccctgatctttggaggcttcatcagcctgattggagctgccttctaccccatctacttccggcccctgatgaggctggaggagtacaagaaggagcaggccatcaacagagctggcatcgtgcaggaggatgtgcagcccccaggcctgaaggtgtggagcgacccctttggaaggaagtag

SEQ ID NO: 58125 - DNA, 204 bp, Artificial Sequence
  derived and/or modified sequence
atgagcaggaacctgaggacagccctgatctttggaggcttcatcagcctcatcggggccgccttctaccccatctacttccggcccctgatgaggctggaggagtacaagaaggagcaggccatcaacagagctggcatcgtgcaggaggatgtgcagcccccaggcctgaaggtgtggagcgaccccttcggcaggaagtag

SEQ ID NO: 58126 - DNA, 507 bp, Artificial Sequence
  derived and/or modified sequence
atggtgaaggaggtgtggcgggtgctgcgggaggagcccggccggagaaaagaatccagacagaatagggcgcgtggcaatagggtccagcaaaatagtagcaatttaaatccaaccccagctccaggcccccactccaccgagtccagggggcgacgccgcgctggcagtgaagctccaccggtgcccggaagtgagtccttgagcactagttcagagcgaggacatggccctgcagttggaaatctcgtgtcggaaagcgccggacggagcgcaggtcaggggagccccgggcctgatgccatgagccggaatttgaggaccgccctgatcttcgggggctttatttcgctgatcggcgcggcattttacccaatctacttcaggcctctaatgcgtctggaagagtataagaaggagcaggcaatcaatcgggccggcattgtgcaggaagacgtgcagccccccggtctgaaagtgtggagcgatccctttggacggaagtag

SEQ ID NO: 58127 - DNA, 204 bp, Artificial Sequence
  derived and/or modified sequence
atgagccggaacctgcggaccgccctgatcttcggcggcttcatcagcctcattggagctgctttctacccaatctacttccgccccttaatgcgccttgaggagtacaaaaaggaacaggcgatcaaccgagctgggattgtgcaggaagatgtccagccccctggactgaaggtatggtcagacccattcggccgtaaatag

SEQ ID NO: 58128 - DNA, 507 bp, Artificial Sequence
  derived and/or modified sequence
atggtgaaggaggtgtggagggtgctccgagaggagcctggccgtcggaaagaatccaggcaaaatcgggctaggggcaatcgggtccagcagaattcctcgaatctgaatcccacacccgctccgggaccccattctactgagagccgaggcagacggcgtgctggctctgaggcccctccggtgcctggatcagagtcattgtctacaagtagtgaaagaggacatggccctgccgtaggtaacttagtgagcgagagcgccggaaggtcggccggacagggctctccaggtcccgacgccatgtcacggaacctgagaacagctctgattttcgggggattcatctctctgatcggagccgctttctatccaatctactttcgcccactgatgcgattggaagagtataaaaaggaacaagccatcaacagagccggaattgtgcaagaggacgtgcagccacccggattgaaggtgtggtctgaccccttcgggcgtaagtag

SEQ ID NO: 58129 - DNA, 204 bp, Artificial Sequence
  derived and/or modified sequence
atgtcgcggaacctgagaaccgctctgatcttcggcggttttatctcattgatcggagccgcattttacccaatatattttcgacctctgatgagactggaagagtataagaaggaacaggcaatcaaccgagccggaattgtacaggaagacgtccagccaccaggtctcaaagtctggagcgatccattcggaagaaagtag

SEQ ID NO: 58130 - protein, 721 aa, Artificial Sequence
  derived and/or modified sequence
MTEGTCLRRRGGPYKTEPATDLGRWRLNCERGRQTWTYLQDERAGREQTGLEAYALGLDTKNYFKDLPKAHTAFEGALNGMTFYVGLQAEDGHWTGDYGGPLFLLPGLLITCHVARIPLPAGYREEIVRYLRHIEDKSTVFGTALNYVSLRILGVGPDDPDLVRARNILHKKGGAVAIPSWGKFWLAVLNVYSWEGLNTLFPEMWLFPDWAPAHPSTLWCHCRQVYLPMSYCYAVRLSAAEDPLVQSLRQELYVEDFASIDWLAQRNNVAPDELYTPHSWLLRVVYALLNLYEHHHSAHLRQRAVQKLYEHIVADDRFTKSISIGPISKTINMLVRWYVDGPASTAFQEHVSRIPDYLWMGLDGMKMQGTNGSQIWDTAFAIQALLEAGGHHRPEFSSCLQKAHEFLRLSQVPDNPPDYQKYYRQMRKGGFSFSTLDCGWIVSDCTAEALKAVLLLQEKCPHVTEHIPRERLCDAVAVLLNMRNPDGGFATYETKRGGHLLELLNPSEVFGDIMIDYTYVECTSAVMQALKYFHKRFPEHRAAEIRETLTQGLEFCRRQQRADGSWEGSWGVCFTYGTWFGLEAFACMGQTYRDGTACAEVSRACDFLLSRQMADGGWGEDFESCEERRYLQSAQSQIHNTCWAMMGLMAVRHPDIEAQERGVRCLLEKQLPNGDWPQENIAGVFNKSCAISYTSYRNIFPIWALGRFSQLYPERALAGHP

SEQ ID NO: 58131 - DNA, 2166 bp, Artificial Sequence
  derived and/or modified sequence
atgaccgaggggacctgcctaaggcgccgtgggggtccctacaaaaccgagcctgcaacagacctaggacgctggcgactaaattgtgagcgcgggcgccaaacctggacctatttgcaggatgagcgggccggtagagagcagaccggtctagaggcgtacgcattgggactggacactaagaattattttaaagatttgccaaaggcacatacggccttcgagggggccttgaacggaatgaccttttatgtcggcctccaggccgaggatggccactggactggggattatggtgggcctctctttttgctgcccggcctgctcatcacctgccatgttgcccgaatccccttgcctgctggatacagagaggaaattgtgagatatcttcgccacattgaggacaagagcaccgtattcggaacagccctgaactacgtttccctccgcattctcggagtaggccctgatgatcccgaccttgtgagggcccgaaatatccttcataaaaaggggggagccgtcgctattccatcctggggcaaattttggctcgcagtgctcaatgtctatagctgggagggactgaatacactatttcctgaaatgtggctgtttcccgactgggctcctgcccacccgagcaccttatggtgccactgtaggcaagtgtatctgcctatgagttattgttatgccgtgagactgtctgccgctgaagacccacttgtacagtcgcttcgccaggaactgtatgtggaggatttcgcctccattgactggctggctcagcggaacaatgttgcccctgatgaactctacaccccccatagttggctcctcagggtggtctacgcgttgctgaacttgtacgagcaccatcacagtgcccaccttaggcagcgggcggtccaaaagttgtacgaacacattgtagccgacgatcgttttacgaagagtatctctattggacccatatctaagactatcaacatgcttgtgaggtggtatgtcgatggtcctgcatcaactgccttccaagaacatgtgtcgagaatcccagattatctctggatgggattggacggaatgaaaatgcagggaaccaacggctcgcagatttgggataccgcttttgcgatccaagcgttactcgaggccggtggtcatcaccggcccgagttctcgtcttgtctgcagaaagctcacgagtttctgcgactcagtcaggtgccggacaatcctccagattaccagaagtactaccgccagatgaggaagggagggttctccttctcaaccctcgattgcggatggattgtttcagactgtactgccgaggccctcaaagccgtgcttctgctgcaagaaaaatgtccgcatgtgaccgaacacataccgcgagagcggctgtgtgatgctgtagccgtgctgcttaatatgcgcaaccccgatggagggttcgccacttacgagacaaaacggggcggccatctgctggagttacttaacccgtccgaggtgttcggcgacattatgatcgattatacgtacgtagagtgtacttcagctgtgatgcaggcccttaaatattttcataagcgctttccagagcacagagctgccgaaatcagagagacactgactcaagggctcgaattttgccggcggcagcagcgcgcagacgggagctgggagggctcttggggggtctgttttacatacggcacctggttcgggctagaggcattcgcgtgcatgggccaaacatatagagatggaacagcgtgcgccgaagtgtcccgggcgtgtgacttccttttatcccgtcagatggccgatggtggatggggagaggactttgagtcatgtgaggaacgaagatatttgcagagcgctcagtctcaaatccacaatacatgctgggctatgatgggcctcatggccgtgagacaccccgacatcgaagcccaggaacgtggagtgagatgtcttctggagaaacagcttcctaatggagactggccccaggagaacatcgccggagtcttcaataagtcctgcgccataagttatacatcttataggaacatcttccccatttgggcccttggccgcttttctcagctgtacccggaaagagcgttggctggtcatccatag

SEQ ID NO: 58132 - DNA, 2523 bp, Artificial Sequence
  derived and/or modified sequence
agctggcagtgggcggcgtagagcactgcagcagcaatgacggagggcacgtgtctgcggcgccgagggggcccctacaagaccgagcccgccaccgacctcggccgctggcgactcaactgcgagaggggccggcagacgtggacctacctgcaggacgagcgcgccggccgcgagcagaccggcctggaagcctacgccctggggctggacaccaagaattactttaaggacttgcccaaagcccacaccgcctttgagggggctctgaacgggatgacattttacgtggggctgcaggctgaggatgggcactggacgggtgattatggtggcccacttttcctcctgccaggcctcctgatcacttgccacgtggcacgcatccctctgccagccggatacagagaagagattgtgcggtacctgcggcacattgaggataagtccaccgtgtttgggactgcgctcaactatgtgtctctcagaattctgggtgttgggcctgacgatcctgacctggtacgagcccggaacattcttcacaagaaaggtggtgctgtggccatcccctcctgggggaagttctggctggctgtcctgaatgtttacagctgggaaggcctcaataccctgttcccagagatgtggctgtttcctgactgggcaccggcacacccctccacactctggtgccactgccggcaggtgtacctgcccatgagctactgctacgccgttcggctgagtgccgcggaagacccgctggtccagagcctccgccaggagctctatgtggaggacttcgccagcattgactggctggcgcagaggaacaacgtggcccccgacgagctgtacacgccgcacagctggctgctccgcgtggtatatgcgctcctcaacctgtatgagcaccaccacagtgcccacctgcggcagcgggccgtgcagaagctgtatgaacacattgtggccgacgaccgattcaccaagagcatcagcatcggcccgatctcgaaaaccatcaacatgcttgtgcgctggtatgtggacgggcccgcctccactgccttccaggagcatgtctccagaatcccggactatctctggatgggccttgacggcatgaaaatgcagggcaccaacggctcacagatctgggacaccgcattcgccatccaggctctgcttgaggcgggcgggcaccacaggcccgagttttcgtcctgcctgcagaaggctcatgagttcctgaggctctcacaggtcccagataaccctcccgactaccagaagtactaccgccagatgcgcaagggtggcttctccttcagtacgctggactgcggctggatcgtttctgactgcacggctgaggccttgaaggctgtgctgctcctgcaggagaagtgtccccatgtcaccgagcacatccccagagaacggctctgcgatgctgtggctgtgctgctgaacatgagaaatccagatggagggttcgccacctatgagaccaagcgtggggggcacttgctggagctgctgaacccctcggaggtcttcggggacatcatgattgactacacctatgtggagtgcacctcagccgtgatgcaggcgcttaagtatttccacaagcgtttcccggagcacagggcagcggagatccgggagaccctcacgcagggcttagagttctgtcggcggcagcagagggccgatggctcctgggaaggctcctggggagtttgcttcacctacggcacctggtttggcctggaggccttcgcctgtatggggcagacctaccgagatgggactgcctgtgcagaggtctcccgggcctgtgacttcctgctgtcccggcagatggcagacggaggctggggggaggactttgagtcctgcgaggagcggcgttatttgcagagtgcccagtcccagatccataacacatgctgggccatgatggggctgatggccgttcggcatcctgacatcgaggcccaggagagaggagtccggtgtctacttgagaaacagctccccaatggcgactggccgcaggaaaacattgctggggtcttcaacaagtcctgtgccatctcctacacgagctacaggaacatcttccccatctgggccctcggccgcttctcccagctgtaccctgagagagcccttgctggccacccctgagaacatgcctacctgctgggtgccgtctgtgcgttccagtgaggccaaggggtcctggccgggttggggagccctcccataaccctgtcttgggctccaacccctcaacctctatctcatagatgtgaatctgggggccaggctggaggcagggatggggacagggtgggtggcttagactcttgatttttactgtaggttcatttctgaaagtagcttgtcgggcttgggtgaggaagggggcacaggagccgtgacccctgaggaggcacagcgccttctgccacctctgggcacggcctcaaggtagtgaggctagga

SEQ ID NO: 58133 - DNA, 2166 bp, Artificial Sequence
  derived and/or modified sequence
atgacagagggcacctgcctgcggaggagaggaggcccctacaagacagagcccgccacagacctgggccgctggaggctgaactgtgagcggggccggcagacctggacctacctgcaggatgagcgggccggccgggagcagacaggcctggaggcctatgccctgggcctggacaccaagaactacttcaaggacctgcccaaggcccacacagcctttgagggcgccctgaatggcatgaccttctacgtgggcctgcaggccgaggatggccactggacaggagactatggaggccccctcttcctgctgcccggcctgctgatcacctgccacgtggcccgcatccccctgcctgctggctaccgggaggagatcgtgcgctacctgcggcacatcgaggacaagagcacagtgtttggaacagccctgaactacgtgtccctgcgcatcctgggcgtgggcccagatgatcctgacctggtgcgggccaggaacatcctgcacaagaagggcggcgctgtggccatccccagctggggcaagttctggctggccgtgctgaatgtgtacagctgggagggcctgaacaccctcttccctgagatgtggctgttcccagactgggccccagcccaccccagcaccctgtggtgccactgccggcaggtgtacctgcccatgagctactgctatgctgtgcggctgtctgctgctgaggaccccctggtgcagagcctgcggcaggagctgtatgtggaggactttgccagcattgactggctggcccagaggaacaacgtggccccagatgagctgtacaccccccacagctggctgctgcgggtggtgtatgccctgctgaacctgtatgagcaccaccacagcgcccacctgcggcagagagctgtgcagaagctgtatgagcacatcgtggctgatgaccgcttcaccaagagcatcagcatcggccccatcagcaagaccatcaacatgctggtgcgctggtacgtggatggccctgccagcacagccttccaggagcacgtgagccgcatcccagactacctgtggatgggcctggatggcatgaagatgcagggcaccaacggcagccagatctgggacacagcctttgccatccaggccctgctggaggccggcggccaccacaggcctgagttcagcagctgcctgcagaaggcccacgagttcctgcggctgagccaggtgcctgacaaccccccagactaccagaagtactaccggcagatgaggaagggcggcttctccttcagcaccctggactgtggctggatcgtgtctgactgcacagctgaggccctgaaggctgtgctgctgctgcaggagaagtgcccccacgtgacagagcacatcccccgggagcggctgtgtgatgctgtggccgtgctgctgaacatgagaaatccagatggcggctttgccacctatgagaccaagagaggaggccacctgctggagctgctgaaccccagcgaggtgtttggagacatcatgattgactacacctacgtggagtgcaccagcgctgtgatgcaggccctgaagtacttccacaagcgcttccctgagcacagagctgctgagatccgggagaccctgacccagggcctggagttctgccggcggcagcagagagcagatggctcctgggagggctcctggggcgtgtgcttcacctacggcacctggtttggcctggaggcctttgcctgcatgggccagacctacagagatggaacagcctgtgccgaggtgtcccgggcctgtgacttcctgctgagccggcagatggctgatggcggctggggcgaggactttgagagctgtgaggagcggcgctacctgcagagcgcccagagccagatccacaacacctgctgggccatgatgggcctgatggctgtgcgccacccagacatcgaggcccaggagcggggcgtgcgctgcctgctggagaagcagctgcccaatggagactggccccaggagaacattgctggggtcttcaacaagagctgtgccatctcctacaccagctacagaaacatcttccccatctgggccctgggccgcttcagccagctgtacccagagcgggccctggccggccacccctag

SEQ ID NO: 58134 - DNA, 2166 bp, Artificial Sequence
  derived and/or modified sequence
atgaccgagggcacctgcctgcggcggcggggcggcccctacaagacggaaccggccacagacctgggtcgttggaggctgaattgtgaacggggcaggcagacctggacctacctgcaggatgaacgagccggccgagaacagaccggccttgaggcatacgcgcttggtctagatacaaagaactacttcaaggacctgcctaaggctcacaccgcatttgagggggctcttaatggcatgacattctacgttggccttcaggctgaggatggccattggacgggtgactacgggggccccctatttctcttgcctggcctgctcattacatgccatgtggcccggattcccctccccgccggataccgagaggagattgtcaggtacctgaggcacattgaagacaagtcaactgtattcggcactgcgctgaactacgtctctctcaggattttgggcgtcggcccggacgaccccgaccttgtgagggccaggaacatcctgcacaaaaaaggcggtgcggtagcaattccgtcatggggcaaattctggctcgcagtgttgaacgtgtatagctgggaaggtttaaatactctgtttccggaaatgtggctgttccccgattgggcaccagcccacccgagcaccctgtggtgccactgcaggcaggtctacttgcccatgagctactgctacgccgtaagactcagtgccgccgaagacccattagtacaatctttgagacaggaattgtacgtggaagacttcgcttccatcgattggcttgcccagcgtaacaacgtggcacccgacgagctatacactcctcattcctggctgctgcgggtagtgtacgccctgcttaacttgtacgagcatcaccattctgcccatctaaggcaacgggcggtgcagaagctttacgagcacatcgtcgctgatgacagattcactaagagtatctcaatcggacctattagcaagaccattaacatgttggtccgctggtacgtggacgggcctgcatcaaccgcatttcaggagcatgtcagcagaataccggactacctatggatgggtctcgacggaatgaaaatgcagggtacaaatggttctcaaatctgggatacagcctttgccatccaggcgcttctcgaagctgggggccaccacagacccgagtttagcagttgtctgcaaaaggcccatgagtttctgcgcctgtctcaagtacccgataacccaccggactatcagaagtattacaggcagatgagaaagggagggttttctttcagtactctggattgtggctggattgtttctgattgtaccgccgaggcgcttaaggcggtcctgttgctccaggaaaagtgcccacacgtgacagagcacatccctcgagagagactgtgcgatgcggtggcagtcctcttaaatatgcgcaatcccgacggcgggtttgcaacttacgaaacaaagcggggcggccacctgctggagcttctcaatccatccgaagttttcggcgatataatgattgactatacttacgtagagtgcacttcggcagtcatgcaagccctcaagtacttccacaagagattccctgagcaccgtgcagccgagattagagaaacattgacgcagggtctcgagttctgtcgacgccagcaaagagctgatgggtcttgggaagggtcatggggcgtctgttttacatacggaacatggttcgggctggaggcttttgcatgcatggggcagacctaccgcgacgggacagcatgcgccgaagtgagcagagcttgcgattttctgctaagccgccagatggctgatggggggtggggggaggatttcgagtcctgtgaggagaggcggtaccttcagagtgcacagtcacagatacacaacacctgctgggcaatgatggggctgatggcagtgaggcacccagacattgaagcgcaggaaagaggcgtaaggtgtctgttggagaagcagctgcccaacggagattggccacaggaaaatatagcaggggtttttaataaatcctgtgccattagttatacttcctaccgaaacattttcccaatttgggcccttggaagattctcccagctgtaccccgaaagggccctggcaggccatccctag

SEQ ID NO: 58135 - DNA, 2166 bp, Artificial Sequence
  derived and/or modified sequence
atgacagagggcacctgcttaaggcgcagaggcggtccttacaaaaccgaaccagccaccgacctggggagatggcggttgaattgtgaaagaggacggcaaacatggacctatctccaagatgagagggccggaagagagcaaactggcctggaagcttacgccctgggacttgataccaaaaactactttaaggacctgccaaaagcccacaccgcctttgaaggcgcactcaacgggatgacattttacgtcggtctgcaggccgaggacggtcattggacgggggattacgggggacccctcttcctgctaccaggcctgctgataacttgccacgtagcgagaattccactacctgccggatacagggaggagatagtgcgatacctgcggcacatcgaagacaaatcaacagtcttcgggacagccttaaattacgtttcccttagaatcctgggcgttggccctgatgacccagatttggtgcgggctcggaacatccttcacaagaaaggcggtgctgtagcaatcccctcttggggcaaattttggctcgccgtgctaaatgtatattcttgggagggcctcaacacgctgtttcccgaaatgtggctgttccctgattgggccccagcccatcccagcactctctggtgccattgtcggcaggtctatctgcccatgtcctactgctacgccgtgcgtctaagcgccgctgaggaccctctggttcaaagtttgagacaggaattgtacgtcgaagacttcgctagtatcgactggctcgctcagcgcaacaacgttgctccagacgagttgtataccccccactcatggctgctgcgcgtggtgtatgccctgcttaatctttacgagcatcaccacagcgcgcatctgagacagagggctgttcagaaactctacgaacacatcgtcgctgacgaccgcttcactaagagcataagtatagggcctatctctaagactataaatatgctggtgagatggtacgttgacggcccagcaagcactgcctttcaagaacacgttagcaggatccctgactacttgtggatgggcctggacggtatgaagatgcaggggactaatggatcccagatctgggataccgcatttgcaatacaggcgcttcttgaagcgggaggccaccaccggcctgagttcagctcatgtctgcagaaggcccatgagtttcttcggctgagccaggttcctgataatccgccagactaccagaagtactaccgtcagatgagaaagggcggtttctctttttccacccttgactgtggttggatcgtctcagactgcacagccgaagcgctgaaggccgtcctcctgctgcaggaaaaatgtccgcatgtgaccgaacacattcccagggagcgtctgtgtgacgccgtcgccgtgctgcttaacatgagaaatccggacggtggcttcgccacgtatgagacaaagcgtggaggccacttactcgaattgctgaacccatctgaagtgtttggcgacatcatgatagattatacttacgtggagtgcaccagcgccgtcatgcaggccctcaagtactttcataagcgattcccggagcatagggctgctgaaatccgcgagacactcacccaaggattggagttttgcagacgtcagcagcgcgcagatggcagctgggagggctcctggggggtgtgctttacatacggcacctggtttgggctggaggcgtttgcgtgtatggggcagacttatagagatgggacagcctgcgctgaagttagccgtgcgtgtgatttcctgttgtcccggcagatggcagacgggggttggggagaagattttgagtcctgtgaggagcggcgatacctccagagcgcacaaagccagattcataatacatgttgggccatgatggggctgatggctgttcgacatcctgatattgaggcccaagaacgcggtgtgcggtgtctgttggagaaacaactgccgaacggagactggcctcaggagaatatcgctggggtgttcaataaatcgtgcgctatcagctacacatcttaccggaatatttttcctatctgggccctcggcagattcagtcagctgtaccctgaacgggcactcgccggacatccttag

SEQ ID NO: 58136 - DNA, 2166 bp, Artificial Sequence
  derived and/or modified sequence
atgaccgagggcacctgcctgagaagaagaggcggcccctacaagaccgagcccgccaccgacctgggcagatggagactgaactgcgagagaggcagacagacctggacctacctgcaggacgagagagccggcagagagcagaccggcctggaggcctacgccctgggcctggacaccaagaactacttcaaggacctgcccaaggcccacaccgccttcgagggcgccctgaacggcatgaccttctacgtgggcctgcaggccgaggacggccactggaccggcgactacggcggccccctgttcctgctgcccggcctgctgatcacctgccacgtggccagaatccccctgcccgccggctacagagaggagatcgtgagatacctgagacacatcgaggacaagagcaccgtgttcggcaccgccctgaactacgtgagcctgagaatcctgggcgtgggccccgacgaccccgacctggtgagagccagaaacatcctgcacaagaagggcggcgccgtggccatccccagctggggcaagttctggctggccgtgctgaacgtgtacagctgggagggcctgaacaccctgttccccgagatgtggctgttccccgactgggcccccgcccaccccagcaccctgtggtgccactgcagacaggtgtacctgcccatgagctactgctacgccgtgagactgagcgccgccgaggaccccctggtgcagagcctgagacaggagctgtacgtggaggacttcgccagcatcgactggctggcccagagaaacaacgtggcccccgacgagctgtacaccccccacagctggctgctgagagtggtgtacgccctgctgaacctgtacgagcaccaccacagcgcccacctgagacagagagccgtgcagaagctgtacgagcacatcgtggccgacgacagattcaccaagagcatcagcatcggccccatcagcaagaccatcaacatgctggtgagatggtacgtggacggccccgccagcaccgccttccaggagcacgtgagcagaatccccgactacctgtggatgggcctggacggcatgaagatgcagggcaccaacggcagccagatctgggacaccgccttcgccatccaggccctgctggaggccggcggccaccacagacccgagttcagcagctgcctgcagaaggcccacgagttcctgagactgagccaggtgcccgacaacccccccgactaccagaagtactacagacagatgagaaagggcggcttcagcttcagcaccctggactgcggctggatcgtgagcgactgcaccgccgaggccctgaaggccgtgctgctgctgcaggagaagtgcccccacgtgaccgagcacatccccagagagagactgtgcgacgccgtggccgtgctgctgaacatgagaaaccccgacggcggcttcgccacctacgagaccaagagaggcggccacctgctggagctgctgaaccccagcgaggtgttcggcgacatcatgatcgactacacctacgtggagtgcaccagcgccgtgatgcaggccctgaagtacttccacaagagattccccgagcacagagccgccgagatcagagagaccctgacccagggcctggagttctgcagaagacagcagagagccgacggcagctgggagggcagctggggcgtgtgcttcacctacggcacctggttcggcctggaggccttcgcctgcatgggccagacctacagagacggcaccgcctgcgccgaggtgagcagagcctgcgacttcctgctgagcagacagatggccgacggcggctggggcgaggacttcgagagctgcgaggagagaagatacctgcagagcgcccagagccagatccacaacacctgctgggccatgatgggcctgatggccgtgagacaccccgacatcgaggcccaggagagaggcgtgagatgcctgctggagaagcagctgcccaacggcgactggccccaggagaacatcgccggcgtgttcaacaagagctgcgccatcagctacaccagctacagaaacatcttccccatctgggccctgggcagattcagccagctgtaccccgagagagccctggccggccacccctag

SEQ ID NO: 58137 - protein, 652 aa, Artificial Sequence
  derived and/or modified sequence
MTFYVGLQAEDGHWTGDYGGPLFLLPGLLITCHVARIPLPAGYREEIVRYLRSVQLPDGGWGLHIEDKSTVFGTALNYVSLRILGVGPDDPDLVRARNILHKKGGAVAIPSWGKFWLAVLNVYSWEGLNTLFPEMWLFPDWAPAHPSTLWCHCRQVYLPMSYCYAVRLSAAEDPLVQSLRQELYVEDFASIDWLAQRNNVAPDELYTPHSWLLRVVYALLNLYEHHHSAHLRQRAVQKLYEHIVADDRFTKSISIGPISKTINMLVRWYVDGPASTAFQEHVSRIPDYLWMGLDGMKMQGTNGSQIWDTAFAIQALLEAGGHHRPEFSSCLQKAHEFLRLSQVPDNPPDYQKYYRQMRKGGFSFSTLDCGWIVSDCTAEALKAVLLLQEKCPHVTEHIPRERLCDAVAVLLNMRNPDGGFATYETKRGGHLLELLNPSEVFGDIMIDYTYVECTSAVMQALKYFHKRFPEHRAAEIRETLTQGLEFCRRQQRADGSWEGSWGVCFTYGTWFGLEAFACMGQTYRDGTACAEVSRACDFLLSRQMADGGWGEDFESCEERRYLQSAQSQIHNTCWAMMGLMAVRHPDIEAQERGVRCLLEKQLPNGDWPQENIAGVFNKSCAISYTSYRNIFPIWALGRFSQLYPERALAGHP

SEQ ID NO: 58138 - protein, 307 aa, Artificial Sequence
  derived and/or modified sequence
MARLGSTGGVSGRVVTQHRDSAPFLGAPRLGLRELGPIRGTAPEWHGRWNAAERSDKMYQVPLPLDRDGTLVRLRFTMVALVTVCCPLVAFLFCILWSLLFHFKETTATHCGVPNYLPSVSSAIGGEVPQRYVWRFCIGLHSAPRFLVAFAYWNHYLSCTSPCSCYRPLCRLNFGLNVVENLALLVLTYVSSSEDFTIHENAFIVFIASSLGHMLLTCILWRLTKKHTDRKSYSWKQRLFIINFISFFSALAVYFRHNMYCEAGVYTIFAILEYTVVLTNMAFHMTAWWDFGNKELLITSQPEEKRF

SEQ ID NO: 58139 - DNA, 924 bp, Artificial Sequence
  derived and/or modified sequence
atggccagactgggcagcaccggcggcgtgagcggcagagtggtgacccagcacagagacagcgcccccttcctgggcgcccccagactgggcctgagagagctgggccccatcagaggcaccgcccccgagtggcacggcagatggaacgccgccgagagaagcgacaagatgtaccaggtgcccctgcccctggacagagacggcaccctggtgagactgagattcaccatggtggccctggtgaccgtgtgctgccccctggtggccttcctgttctgcatcctgtggagcctgctgttccacttcaaggagaccaccgccacccactgcggcgtgcccaactacctgcccagcgtgagcagcgccatcggcggcgaggtgccccagagatacgtgtggagattctgcatcggcctgcacagcgcccccagattcctggtggccttcgcctactggaaccactacctgagctgcaccagcccctgcagctgctacagacccctgtgcagactgaacttcggcctgaacgtggtggagaacctggccctgctggtgctgacctacgtgagcagcagcgaggacttcaccatccacgagaacgccttcatcgtgttcatcgccagcagcctgggccacatgctgctgacctgcatcctgtggagactgaccaagaagcacaccgacagaaagagctacagctggaagcagagactgttcatcatcaacttcatcagcttcttcagcgccctggccgtgtacttcagacacaacatgtactgcgaggccggcgtgtacaccatcttcgccatcctggagtacaccgtggtgctgaccaacatggccttccacatgaccgcctggtgggacttcggcaacaaggagctgctgatcaccagccagcccgaggagaagagattctag

SEQ ID NO: 58140 - DNA, 924 bp, Artificial Sequence
  derived and/or modified sequence
atggcaagactcggatcgactggaggcgtgagcggccgagtagtaacccagcatagggactctgctccattcctgggcgcgcctcgcctggggctgagagaacttggcccaatcagagggaccgcccctgagtggcacgggagatggaatgcagctgaaagatccgacaaaatgtaccaagttccattgcctcttgatcgggatggaaccctggtacgtcttcgtttcaccatggtggctctggtgaccgtgtgctgccctctggtcgccttcctgttctgcatcctctggagtctactttttcacttcaaggagactaccgcaacccattgtggagtgcccaactatttgccttcagtgagtagcgccataggcggagaagtgccacagaggtacgtctggcggttctgtatcggcctgcacagcgctcctcggttcttggtcgcttttgcctactggaaccactatctttcctgcaccagtccatgttcctgctatagaccactgtgccgccttaattttgggctaaacgtcgttgaaaacttagccttactcgtccttacatatgtcagcagtagtgaggactttaccatccacgagaatgcattcatcgtctttatcgcttccagcctggggcacatgctgctgacctgcattctgtggcggctgacaaagaagcacaccgatagaaaatcctacagctggaagcagcggctgttcattattaatttcatatcgttcttcagtgctctagccgtctacttccgccacaacatgtactgtgaggcaggagtgtatactatctttgctattttagagtatacagtcgtactgacaaacatggctttccacatgaccgcctggtgggatttcggcaacaaggaattactgatcacctctcagcccgaggagaaaagattctag

SEQ ID NO: 58141 - DNA, 924 bp, Artificial Sequence
  derived and/or modified sequence
atggcccggctgggcagcactggaggagtgtctggccgggtggtgacccagcaccgggacagcgcccccttcctgggcgccccccggctgggcctgcgggagctgggccccatccggggcacagcccctgagtggcacggccgctggaatgctgctgagaggagtgacaagatgtaccaggtgcccctgcccctggacagagatggcaccctggtgcggctgcgcttcaccatggtggccctggtgacagtgtgctgccccctggtggccttcctgttctgcatcctgtggagcctgctcttccacttcaaggagaccacagccacccactgcggcgtgcccaactacctgcccagcgtgagcagcgccatcggcggggaggtgccccagcgctacgtgtggaggttctgcatcggcctgcacagcgccccccgcttcctggtggcctttgcctactggaaccactacctgagctgcaccagcccctgcagctgctaccggcccctgtgccgcctgaactttggcctgaatgtggtggagaacctggccctgctggtgctgacctacgtgagcagcagcgaggacttcaccatccatgaaaatgccttcatcgtgttcatcgccagcagcctgggccacatgctgctgacctgcatcctgtggaggctgaccaagaagcacacagacaggaagagctacagctggaagcagaggctcttcatcatcaacttcatctccttcttcagcgccctggccgtgtacttccgccacaacatgtactgtgaggccggcgtgtacaccatctttgccatcctggagtacacagtggtgctgaccaacatggccttccacatgacagcctggtgggactttggaaacaaggagctgctgatcaccagccagcctgaggagaagcgcttctag

SEQ ID NO: 58142 - DNA, 924 bp, Artificial Sequence
  derived and/or modified sequence
atggcccggctgggcagcaccggcggcgtgagcggccgggtggtgactcaacatagggattccgcccctttcctcggagcaccaagactcgggctgcgcgaactgggtcccattcggggaactgcccccgagtggcacggccggtggaacgctgctgagagaagtgacaagatgtaccaggttccactcccgttggaccgggatggtacactggtacgtcttcggttcacgatggtggctttggtgacagtttgctgtccccttgttgcattcctcttctgcatactgtggtctttactctttcattttaaggaaaccactgcgactcactgcggtgttcccaactatctgccaagcgttagctccgcaattggcggggaggtgccacaacgctacgtctggcggttctgcataggtttgcattcagctccacggtttctagtggcctttgcttattggaaccattacctctcatgtacgagtccctgctcttgttacaggccgctatgccgacttaactttggtcttaatgtggtggagaacctcgccctgctggtcctcacctatgtctcaagttccgaggatttcacaatccacgagaatgccttcatcgtgtttatcgcctctagcctgggacatatgctgctgacatgtatattatggaggttgaccaagaagcacacagacagaaagtcgtacagctggaaacaaaggctgtttattatcaattttattagctttttctctgcgctagcagtctacttccgtcacaatatgtattgcgaggctggcgtgtacactatttttgctatcctcgaatacaccgtcgtgctaaccaacatggcttttcatatgactgcatggtgggacttcggcaacaaagagctcctcatcaccagtcagcctgaagagaagcgcttttag

SEQ ID NO: 58143 - DNA, 1843 bp, Artificial Sequence
  derived and/or modified sequence
agggcctctcgaagtgggcttgtgaatggctagattgggaagcaccggcggggtgtcgggaagggtggtgacgcaacatagagactccgcccccttccttggagcgccgcgactcgggctgagggagctcgggccaatcagagggacggccccagaatggcatggtagatggaacgcagctgagaggtctgacaagatgtaccaggtcccactaccactggatcgggatgggaccctggtacggctccgcttcaccatggtggccctggtcacggtctgctgtccacttgtcgccttcctcttctgcatcctctggtccctgctcttccacttcaaggagacaacggccacacactgtggggtgcccaattacctgccctcggtgagctcagccatcggcggggaggtgccccagcgctacgtgtggcgtttctgcatcggcctgcactcggcgcctcgcttcttggtggccttcgcctactggaaccactacctcagctgcacctccccgtgttcctgctatcgcccgctctgccgcctcaacttcggcctcaatgtcgtggagaacctcgcgttgctagtgctcacttatgtctcctcctccgaggacttcaccatccacgaaaatgctttcattgtgttcattgcctcatccctcgggcacatgctcctcacctgcattctctggcggttgaccaagaagcacacagatcgcaagtcctacagctggaaacagcggctcttcatcatcaacttcatctccttcttctcggcgctggctgtctactttcggcacaacatgtattgtgaggctggagtgtacaccatctttgccatcctggagtacactgttgtcttaaccaacatggcgttccacatgacggcctggtgggacttcgggaacaaggagctgctcataacctctcagcctgaggaaaagcgattctgaacccttcagtcctgcttgggaggacgcagcccactgcccagaaacaagaaacacgataccattctggccttccccaccccacatcctctcttggccttactgaagatgggggaagggtaagaaggaagggtgtaggccaaggctcaccccagtgctgctggcttctcctctccacccctcatatgggcgtggggtcctcaaacatcacctttacctgagaggccccaagaagctgagctggcagagagctccaccatttggtgctaaaaaaaaaaacgtcctgaggttcatgaccaccatccagtttctggcctttacacagtcacctttcactgaggtcaggagcccctgagcagtggctgctccctgacaaccacagccatttctctgcacgggggtcattcataggactaatgtatttcatgatctactgtgcacatccaggcctgtggccacagtcccctgctaaagttgctcaggtgttctagtcctgacttcacctttttgatttggtgtgtgccctagggtatgtacccttccccatctgagcctcggtgtgtccatgtgtctggcgggggatgggtggactgtatgatttccaaggactctaccagtcagtggttctgatgtcatcgggtggaggtggtgttctatacctaaaggatgacctgctccagaaacagcaccagcacagcatgtattttcttctcttctgaaagttctggcttgtagacccctcccctcctttgcaaaggtatgggatagaggggtcagatgcagatctctactgtaaaatgggctccctggtatctcctgtcttccctactgctccaaaccctaaattttggttgtacattttatttgaaaggaaaataaattttttttttgggccaa

SEQ ID NO: 58144 - DNA, 924 bp, Artificial Sequence
  derived and/or modified sequence
atggcgaggctcggcagcactggcggtgtgagtggacgtgtggttacccagcaccgcgactctgcccctttcctaggagcgcctcggttaggactcagggaactcgggccaatcaggggaaccgcacctgaatggcacggcagatggaacgccgctgagcgctctgataagatgtaccaggtgcctcttccgttggaccgggacggaacactggttaggctgagattcaccatggttgcactggtcactgtgtgttgcccacttgtagcttttctcttttgtatcctctggtccctactgtttcatttcaaggagaccactgccactcactgtggggtgcctaattacctgccatctgtgtcgtccgcaatcggtggagaagtcccgcagagatatgtgtggaggttctgcatcggattgcattctgccccacggtttctcgtcgcattcgcatactggaaccactacttgtcatgtaccagcccatgtagttgttaccggccactatgccgactcaactttggactgaacgttgtcgagaatcttgcactcttggtcctcacttacgtcagtagctccgaagacttcactattcacgaaaacgccttcatcgtgtttatcgcttctagcctcggccacatgctgctgacgtgtattctgtggcggctcactaagaaacacacggacagaaagtcttactcctggaagcagcggctcttcatcatcaatttcatatcattcttctctgcactggccgtttactttcgccacaacatgtattgcgaagctggggtctacacaatctttgctatccttgaatacaccgtggttctgaccaacatggctttccatatgaccgcctggtgggattttggcaataaggagttgctgataaccagtcagcccgaggaaaaacggttttag

SEQ ID NO: 58145 - protein, 508 aa, Artificial Sequence
  derived and/or modified sequence
MVAEAGSMPAASSVKKPFGLRSKMGKWCRHCFPWCRGSGKSNVGTSGDHDDSAMKTLRSKMGKWCRHCFPWCRGSGKSNVGTSGDHDDSAMKTLRSKMGKWCCHCFPCCRGSGKSKVGPWGDYDDSAFMEPRYHVRREDLDKLHRAAWWGKVPRKDLIVMLKDTDMNKKDKQKRTALHLASANGNSEVVKLLLDRRCQLNILDNKKRTALTKAVQCQEDECALMLLEHGTDPNIPDEYGNTALHYAIYNEDKLMAKALLLYGADIESKNKHGLTPLLLGVHEQKQQVVKFLIKKKANLNALDRYGRTVLILAVCCGSASIVSLLLEQNIDVSSQDLSGQTAREYAVSSRHNVICQLLSDYKEKQILKVSSENSNPEQDLKLTSEEESQRLKGSENSQPEEMSQEPEINKGGDRKVEEEMKKHGSTHMGFPENLPNGATADNGDDGLIPPRKSRTPESQQFPDTENEQYHSDEQNDTQKQLSEEQNTGILQDEILIHEEKQIEVAENEF

SEQ ID NO: 58146 - protein, 486 aa, Artificial Sequence
  derived and/or modified sequence
MVAEAGSMPAASSVKKPFGLRSKMGKWCRHCFPWCRGSGKSNVGTSGDHDDSAMKTLRSKMGKWCRHCFPWCRGSGKSNVGTSGDHDDSAMKTLRSKMGKWCCHCFPCCRGSGKSKVGPWGDYDDSAFMEPRYHVRREDLDKLHRAAWWGKVPRKDLIVMLKDTDMNKKDKQKRTALHLASANGNSEVVKLLLDRRCQLNILDNKKRTALTKAVQCQEDECALMLLEHGTDPNIPDEYGNTALHYAIYNEDKLMAKALLLYGADIESKNKHGLTPLLLGVHEQKQQVVKFLIKKKANLNALDRYGRTVLILAVCCGSASIVSLLLEQNIDVSSQDLSGQTAREYAVSSRHNVICQLLSDYKEKQILKVSSENSNPEQDLKLTSEEESQRLKGSENSQPEEMSQEPEINKGGDRKVEEEMKKHGSTHMGFPENLPNGATADNGDDGLIPPRKSRTPESQQFPDTENEQYHRDFSGHPNFPTTLPIKQ

SEQ ID NO: 58147 - protein, 593 aa, Artificial Sequence
  derived and/or modified sequence
MVAEAGSMPAASSVKKPFGLRSKMGKWCRHCFPWCRGSGKSNVGTSGDHDDSAMKTLRSKMGKWCRHCFPWCRGSGKSNVGTSGDHDDSAMKTLRSKMGKWCCHCFPCCRGSGKSKVGPWGDYDDSAFMEPRYHVRREDLDKLHRAAWWGKVPRKDLIVMLKDTDMNKKDKQKRTALHLASANGNSEVVKLLLDRRCQLNILDNKKRTALTKAVQCQEDECALMLLEHGTDPNIPDEYGNTALHYAIYNEDKLMAKALLLYGADIESKNKIESHSVSQAGVQWCDHSSLQPRPPEAQMVLQPQPQFFFLSFFLFLFLFLFFFSRDEVFAMFLRLVLNSWAQAIHPPQPPKVLGLQHGLTPLLLGVHEQKQQVVKFLIKKKANLNALDRYGRTVLILAVCCGSASIVSLLLEQNIDVSSQDLSGQTAREYAVSSRHNVICQLLSDYKEKQILKVSSENSNPEQDLKLTSEEESQRLKGSENSQPEEMSQEPEINKGGDRKVEEEMKKHGSTHMGFPENLPNGATADNGDDGLIPPRKSRTPESQQFPDTENEQYHSDEQNDTQKQLSEEQNTGILQDEILIHEEKQIEVAENEF

SEQ ID NO: 58148 - protein, 508 aa, Artificial Sequence
  derived and/or modified sequence
MVAEAGSMPAASSVKKPFGLRSKMGKWCRHCFAWCRGSGKSNVGTSGDHDDSAMKTLRSKMGKWCCHCFPWCRGSGKSNVGTSGDHDDSAMKTLRSKMGKWCCHCFPCCRGSGKNKVGPWGDYDDSAFMEPRYHVRREDLDKLHRAAWWGKVPRKDLIVMLKDTDMNKKDKQKRTALHLASANGNSEVVKLLLDRRCQLNILDNKKRTALTKAVQCQEDECALMLLEHGTDPNIPDEYGNTALHYAIYNEDKLMAKALLLYGADIESKNKHGLTPLLLGVHEQKQQVVKFLIKKKANLNALDRYGRTALILAVCCGSASIVSLLLEQNIDVSSQDLSGQTAREYAVSSRHNVICQLLSDYKEKQILKVSSENSNPEQDLKLTSEEESQRLKGSENSQPEEMSQEPEINKGGDRKVEEEMKKHGSTHMGFPENLTNGATADNGDDGLIPPRKSRTPESQQFPDTENEQYHSDEQNDTQKQLSEEQNTGILQDEILIHEEKQIEVAENEF

SEQ ID NO: 58149 - DNA, 1527 bp, Artificial Sequence
  derived and/or modified sequence
atggtggccgaggccggcagcatgcccgccgccagcagcgtgaagaagcccttcggcctgagaagcaagatgggcaagtggtgcagacactgcttcccctggtgcagaggcagcggcaagagcaacgtgggcaccagcggcgaccacgacgacagcgccatgaagaccctgagaagcaagatgggcaagtggtgcagacactgcttcccctggtgcagaggcagcggcaagagcaacgtgggcaccagcggcgaccacgacgacagcgccatgaagaccctgagaagcaagatgggcaagtggtgctgccactgcttcccctgctgcagaggcagcggcaagagcaaggtgggcccctggggcgactacgacgacagcgccttcatggagcccagataccacgtgagaagagaggacctggacaagctgcacagagccgcctggtggggcaaggtgcccagaaaggacctgatcgtgatgctgaaggacaccgacatgaacaagaaggacaagcagaagagaaccgccctgcacctggccagcgccaacggcaacagcgaggtggtgaagctgctgctggacagaagatgccagctgaacatcctggacaacaagaagagaaccgccctgaccaaggccgtgcagtgccaggaggacgagtgcgccctgatgctgctggagcacggcaccgaccccaacatccccgacgagtacggcaacaccgccctgcactacgccatctacaacgaggacaagctgatggccaaggccctgctgctgtacggcgccgacatcgagagcaagaacaagcacggcctgacccccctgctgctgggcgtgcacgagcagaagcagcaggtggtgaagttcctgatcaagaagaaggccaacctgaacgccctggacagatacggcagaaccgtgctgatcctggccgtgtgctgcggcagcgccagcatcgtgagcctgctgctggagcagaacatcgacgtgagcagccaggacctgagcggccagaccgccagagagtacgccgtgagcagcagacacaacgtgatctgccagctgctgagcgactacaaggagaagcagatcctgaaggtgagcagcgagaacagcaaccccgagcaggacctgaagctgaccagcgaggaggagagccagagactgaagggcagcgagaacagccagcccgaggagatgagccaggagcccgagatcaacaagggcggcgacagaaaggtggaggaggagatgaagaagcacggcagcacccacatgggcttccccgagaacctgcccaacggcgccaccgccgacaacggcgacgacggcctgatcccccccagaaagagcagaacccccgagagccagcagttccccgacaccgagaacgagcagtaccacagcgacgagcagaacgacacccagaagcagctgagcgaggagcagaacaccggcatcctgcaggacgagatcctgatccacgaggagaagcagatcgaggtggccgagaacgagttctag

SEQ ID NO: 58150 - DNA, 1461 bp, Artificial Sequence
  derived and/or modified sequence
atggtggccgaggccggcagcatgcccgccgccagcagcgtgaagaagcccttcggcctgagaagcaagatgggcaagtggtgcagacactgcttcccctggtgcagaggcagcggcaagagcaacgtgggcaccagcggcgaccacgacgacagcgccatgaagaccctgagaagcaagatgggcaagtggtgcagacactgcttcccctggtgcagaggcagcggcaagagcaacgtgggcaccagcggcgaccacgacgacagcgccatgaagaccctgagaagcaagatgggcaagtggtgctgccactgcttcccctgctgcagaggcagcggcaagagcaaggtgggcccctggggcgactacgacgacagcgccttcatggagcccagataccacgtgagaagagaggacctggacaagctgcacagagccgcctggtggggcaaggtgcccagaaaggacctgatcgtgatgctgaaggacaccgacatgaacaagaaggacaagcagaagagaaccgccctgcacctggccagcgccaacggcaacagcgaggtggtgaagctgctgctggacagaagatgccagctgaacatcctggacaacaagaagagaaccgccctgaccaaggccgtgcagtgccaggaggacgagtgcgccctgatgctgctggagcacggcaccgaccccaacatccccgacgagtacggcaacaccgccctgcactacgccatctacaacgaggacaagctgatggccaaggccctgctgctgtacggcgccgacatcgagagcaagaacaagcacggcctgacccccctgctgctgggcgtgcacgagcagaagcagcaggtggtgaagttcctgatcaagaagaaggccaacctgaacgccctggacagatacggcagaaccgtgctgatcctggccgtgtgctgcggcagcgccagcatcgtgagcctgctgctggagcagaacatcgacgtgagcagccaggacctgagcggccagaccgccagagagtacgccgtgagcagcagacacaacgtgatctgccagctgctgagcgactacaaggagaagcagatcctgaaggtgagcagcgagaacagcaaccccgagcaggacctgaagctgaccagcgaggaggagagccagagactgaagggcagcgagaacagccagcccgaggagatgagccaggagcccgagatcaacaagggcggcgacagaaaggtggaggaggagatgaagaagcacggcagcacccacatgggcttccccgagaacctgcccaacggcgccaccgccgacaacggcgacgacggcctgatcccccccagaaagagcagaacccccgagagccagcagttccccgacaccgagaacgagcagtaccacagagacttcagcggccaccccaacttccccaccaccctgcccatcaagcagtag

SEQ ID NO: 58151 - DNA, 1782 bp, Artificial Sequence
  derived and/or modified sequence
atggtggccgaggccggcagcatgcccgccgccagcagcgtgaagaagcccttcggcctgagaagcaagatgggcaagtggtgcagacactgcttcccctggtgcagaggcagcggcaagagcaacgtgggcaccagcggcgaccacgacgacagcgccatgaagaccctgagaagcaagatgggcaagtggtgcagacactgcttcccctggtgcagaggcagcggcaagagcaacgtgggcaccagcggcgaccacgacgacagcgccatgaagaccctgagaagcaagatgggcaagtggtgctgccactgcttcccctgctgcagaggcagcggcaagagcaaggtgggcccctggggcgactacgacgacagcgccttcatggagcccagataccacgtgagaagagaggacctggacaagctgcacagagccgcctggtggggcaaggtgcccagaaaggacctgatcgtgatgctgaaggacaccgacatgaacaagaaggacaagcagaagagaaccgccctgcacctggccagcgccaacggcaacagcgaggtggtgaagctgctgctggacagaagatgccagctgaacatcctggacaacaagaagagaaccgccctgaccaaggccgtgcagtgccaggaggacgagtgcgccctgatgctgctggagcacggcaccgaccccaacatccccgacgagtacggcaacaccgccctgcactacgccatctacaacgaggacaagctgatggccaaggccctgctgctgtacggcgccgacatcgagagcaagaacaagatcgagagccacagcgtgagccaggccggcgtgcagtggtgcgaccacagcagcctgcagcccagaccccccgaggcccagatggtgctgcagccccagccccagttcttcttcctgagcttcttcctgttcctgttcctgttcctgttcttcttcagcagagacgaggtgttcgccatgttcctgagactggtgctgaacagctgggcccaggccatccaccccccccagccccccaaggtgctgggcctgcagcacggcctgacccccctgctgctgggcgtgcacgagcagaagcagcaggtggtgaagttcctgatcaagaagaaggccaacctgaacgccctggacagatacggcagaaccgtgctgatcctggccgtgtgctgcggcagcgccagcatcgtgagcctgctgctggagcagaacatcgacgtgagcagccaggacctgagcggccagaccgccagagagtacgccgtgagcagcagacacaacgtgatctgccagctgctgagcgactacaaggagaagcagatcctgaaggtgagcagcgagaacagcaaccccgagcaggacctgaagctgaccagcgaggaggagagccagagactgaagggcagcgagaacagccagcccgaggagatgagccaggagcccgagatcaacaagggcggcgacagaaaggtggaggaggagatgaagaagcacggcagcacccacatgggcttccccgagaacctgcccaacggcgccaccgccgacaacggcgacgacggcctgatcccccccagaaagagcagaacccccgagagccagcagttccccgacaccgagaacgagcagtaccacagcgacgagcagaacgacacccagaagcagctgagcgaggagcagaacaccggcatcctgcaggacgagatcctgatccacgaggagaagcagatcgaggtggccgagaacgagttctag

SEQ ID NO: 58152 - DNA, 1527 bp, Artificial Sequence
  derived and/or modified sequence
atggtggccgaggctggttccatgcctgccgcttcctcagtgaaaaaaccgttcggcctccgctctaaaatgggaaagtggtgtcgacattgctttccgtggtgtcggggcagcggaaagtcaaacgtcggcacttccggagatcacgatgattcggcaatgaaaacactgagaagtaagatgggaaagtggtgccgccattgtttcccctggtgcaggggctccggaaagagtaacgtgggcacaagcggcgaccatgacgactcggctatgaagacgctcagaagcaagatgggtaaatggtgctgtcattgctttccttgctgtaggggcagtggcaagagtaaggtgggcccctggggcgactatgacgactccgcgtttatggaaccacgttaccacgttcgaagggaggaccttgacaagctgcaccgggcagcctggtggggaaaggtgccgcgcaaggacctaattgtgatgctgaaagatacggatatgaataagaaggataaacagaaaagaacagccctgcatctcgctagtgccaacggcaattccgaggtcgttaagttacttctggacaggagatgccagttgaacatcctcgacaacaaaaagaggactgcccttactaaggctgtccaatgtcaggaggatgaatgcgcactaatgctactggaacacggaacggacccaaatatccctgatgagtacggcaacacagcactccattacgccatttataacgaggacaagctgatggcaaaagctctcttgctgtacggagccgacatagaatcgaagaataagcatgggttaacaccattgctgttaggagttcacgaacagaagcagcaagtggtcaaatttctgatcaagaaaaaggctaacctaaatgctctagatcgttatggcaggacagtcctgatcctagccgtgtgttgcggatcggcaagcatcgtttcccttttgctggaacagaacattgacgtgagctcccaggacctcagtgggcagaccgcgcgcgaatacgcggtgtcttccaggcataatgtcatctgtcagcttctgtccgactataaggagaagcagatcctcaaggttagcagcgagaactcgaatccagaacaggacttgaagctgacaagcgaggaggagtcccagcgactgaaagggagtgaaaatagccagcctgaagagatgagccaggagccagagattaataaagggggggaccgcaaggttgaggaggagatgaagaaacacggcagcacccacatgggcttcccggaaaatctccccaacggagctaccgcggacaatggcgacgacgggttgattcctccacggaagagtcgtacacccgagagtcagcaattccccgacaccgaaaacgaacagtatcacagtgacgagcagaacgacacccagaagcagctgtccgaagagcagaataccggcattctgcaggatgagattctgatacacgaagagaagcagatcgaggtagccgagaatgagttctag

SEQ ID NO: 58153 - DNA, 1461 bp, Artificial Sequence
  derived and/or modified sequence
atggtggctgaagccggaagcatgccagccgctagctcagtgaagaagcctttcggcctgcgctccaagatgggcaagtggtgtcgccattgcttcccatggtgccggggctcggggaagtctaatgtgggaacgtcaggcgatcacgacgactctgcgatgaaaacattgcggtccaagatgggtaagtggtgtagacactgctttccttggtgtaggggttcagggaagtcaaatgtggggacttccggagatcacgacgatagcgccatgaagacactgcggtccaagatggggaagtggtgttgtcactgctttccctgctgcagaggaagcggcaagagcaaagtagggccctggggcgactatgatgatagtgcatttatggaaccacgttatcacgtgcgacgcgaagacctggataaactccatcgggcggcttggtgggggaaagtccctagaaaggatctgatagtcatgcttaaagatacagacatgaacaaaaaagataaacagaaaagaaccgcccttcatttggcctctgccaatggcaattcggaagtggtgaagttgctgctggaccggagatgtcagctgaatatcctcgacaataaaaaaagaaccgctttgaccaaagcagtacagtgccaagaagatgaatgcgccctgatgctgctggagcacggcactgacccaaatattccagacgagtatggtaacacggccctacattacgccatatataatgaggacaagctcatggccaaggcactcctgctgtacggagccgatattgaaagcaagaacaaacatggactgacaccattgctactaggcgtgcacgaacagaagcaacaggttgtgaaattcctgattaaaaagaaagcaaacctaaacgcattagaccgatacggcaggactgtcttaatcctcgccgtctgttgtggatccgccagcattgtcagcctcctgctggagcagaatattgacgttagtagtcaggacctgtcaggacagacagctagagagtacgccgtttcgtcccgccacaacgtcatctgccagctcctttcagattacaaggaaaaacagatcctgaaggtgtcctctgaaaactcaaatccagagcaggatctcaagctaacaagcgaagaagaatctcagcggctgaagggctcagagaactctcagccggaagagatgtcgcaggaacctgagattaataagggcggagacaggaaggtggaagaggaaatgaagaaacacggctccactcacatggggtttcctgaaaacctgccaaatggtgctacagcagacaacggtgacgacggactgatacccccaaggaagtctcgaacaccagagagccagcagttcccggacaccgaaaacgagcagtaccatcgggattttagtggacaccctaactttccaaccacacttcccattaagcagtag

SEQ ID NO: 58154 - DNA, 1782 bp, Artificial Sequence
  derived and/or modified sequence
atggttgccgaagcggggtccatgcctgcggcatcctccgtgaaaaaaccattcggcctgcgctccaagatgggtaaatggtgcaggcattgcttcccatggtgtcgaggcagtgggaagtctaatgtgggcaccagtggggaccatgacgattctgcaatgaagacactgcgaagtaaaatgggcaaatggtgccggcactgctttccgtggtgccgcgggtctggcaaatcgaatgttgggacgtccggtgatcacgacgactccgcgatgaagacattaagaagtaaaatgggcaaatggtgctgtcattgtttcccttgttgcagaggctctggcaagtccaaagtgggtccttggggggattacgacgactctgccttcatggaaccgagatatcacgttcggagagaggatctcgataagctgcacagggctgcttggtgggggaaagttcccaggaaagaccttatcgtcatgcttaaggacactgatatgaacaaaaaggataaacagaagagaacggcactgcatcttgcttcagccaacgggaatagcgaggtcgtcaaactgctgctggacagacgctgtcagctgaatattttagataacaagaagcgcactgctctgaccaaggcggtccaatgccaggaggatgagtgtgccctgatgttgcttgagcacggcacagatccgaacatcccggacgaatatgggaataccgcgcttcattacgctatttataacgaagacaagttgatggcgaaagctctgctgctctacggggccgatattgagtcaaagaacaaaatcgagtcccattctgtgagtcaggcaggcgttcaatggtgcgatcatagcagccttcagccccggccccccgaagcccagatggtgttacagccacaaccacagttcttcttcttgtcattctttctcttcctgtttctctttctgttttttttcagtagggacgaggtattcgccatgtttctgaggctggtcctgaactcatgggcgcaagccatccatcccccccagccacctaaggtactcggtctccagcatggattaacccctctgctcctgggagtgcacgagcaaaagcagcaggtggtgaagttcttgatcaagaagaaagcgaatcttaacgccctggacaggtacggccgcaccgttctcatactggccgtttgttgtggatcagcttccattgtcagcctcctacttgaacagaacattgatgtttcctctcaggacctgagcgggcaaaccgcaagggaatatgccgtcagttcccggcacaacgttatctgtcagctccttagtgactacaaggagaaacagattttgaaggtgtccagtgaaaatagtaatccagagcaggatttgaagctgacatccgaggaggaaagtcaaagattgaagggcagtgaaaattcccaacccgaagaaatgtcacaggaacctgagataaacaaggggggagacagaaaggtggaggaagaaatgaagaagcacgggtcaactcatatgggcttccctgagaatctgccaaacggggcgactgcagataacggtgacgatggactgatccccccacgcaaaagcaggacacctgaatcacagcagttcccagatacggagaatgagcagtaccattctgacgaacagaacgatacacagaaacagctgtccgaagagcaaaataccgggattttacaggacgagattctcatccatgaggagaaacaaattgaggtggccgaaaacgaattttag

SEQ ID NO: 58155 - DNA, 1527 bp, Artificial Sequence
  derived and/or modified sequence
atggtggccgaggccggctccatgcctgctgccagctctgtgaagaagcccttcggcctgcggagcaagatgggcaagtggtgccgccactgcttcccctggtgccggggcagcggcaagagcaatgtgggcaccagcggggaccatgatgacagcgccatgaagaccctgcggagcaagatgggcaagtggtgccgccactgcttcccctggtgccggggcagcggcaagagcaatgtgggcaccagcggggaccatgatgattctgccatgaagaccctgcggagcaagatgggcaagtggtgctgccactgcttcccctgctgccggggcagcggcaagagcaaggtgggcccctggggagactatgatgacagcgccttcatggagccccgctaccacgtgcggcgggaggacctggacaagctgcaccgggccgcctggtggggcaaggtgcccaggaaggacctgattgtgatgctgaaggacacagacatgaacaagaaggacaagcagaagaggacagccctgcacctggccagcgccaatggaaacagcgaggtggtgaagctgctgctggaccggcgctgccagctgaacatcctggacaacaagaagaggacagccctgaccaaggctgtgcagtgccaggaggatgaatgtgccctgatgctgctggagcacggcacagaccccaacatcccagatgaatatggcaacacagccctgcactacgccatctacaatgaagacaagctgatggccaaggccctgctgctgtatggagctgacatcgagagcaagaacaagcacggcctgacccccctgctgctgggcgtgcatgagcagaagcagcaggtggtgaagttcctgatcaagaagaaggccaacctgaatgccctggacagatatggccgcacagtgctgatcctggccgtgtgctgcggcagcgccagcatcgtgtccctgctgctggagcagaacattgatgtgagcagccaggacctgagcggccagacagcccgggagtatgctgtgagcagccgccacaacgtcatctgccagctgctgagtgactacaaggagaagcagatcctgaaggtgtcctctgagaacagcaaccctgagcaggacctgaagctgaccagcgaggaggagagccagaggctgaagggcagcgagaacagccagcctgaggagatgagccaggagcctgagatcaacaagggcggggacaggaaggtggaggaggagatgaagaagcacggcagcacccacatgggcttccctgagaacctgcccaatggagccacagctgacaatggagatgatggcctcatcccccccaggaagagcaggaccccagagagccagcagttcccagacacagaaaatgagcagtaccacagtgatgagcagaatgacacccagaagcagctgtctgaggagcagaacacaggcatcctgcaggatgagatcctgatccacgaggagaagcagatcgaggtggctgaaaatgagttctag

SEQ ID NO: 58156 - DNA, 1461 bp, Artificial Sequence
  derived and/or modified sequence
atggtggccgaggccggctccatgcctgctgccagctctgtgaagaagcccttcggcctgcggagcaagatgggcaagtggtgccgccactgcttcccctggtgccggggcagcggcaagagcaatgtgggcaccagcggggaccatgatgacagcgccatgaagaccctgcggagcaagatgggcaagtggtgccgccactgcttcccctggtgccggggcagcggcaagagcaatgtgggcaccagcggggaccatgatgattctgccatgaagaccctgcggagcaagatgggcaagtggtgctgccactgcttcccctgctgccggggcagcggcaagagcaaggtgggcccctggggagactatgatgacagcgccttcatggagccccgctaccacgtgcggcgggaggacctggacaagctgcaccgggccgcctggtggggcaaggtgcccaggaaggacctgattgtgatgctgaaggacacagacatgaacaagaaggacaagcagaagaggacagccctgcacctggccagcgccaatggaaacagcgaggtggtgaagctgctgctggaccggcgctgccagctgaacatcctggacaacaagaagaggacagccctgaccaaggctgtgcagtgccaggaggatgaatgtgccctgatgctgctggagcacggcacagaccccaacatcccagatgaatatggcaacacagccctgcactacgccatctacaatgaagacaagctgatggccaaggccctgctgctgtatggagctgacatcgagagcaagaacaagcacggcctgacccccctgctgctgggcgtgcatgagcagaagcagcaggtggtgaagttcctgatcaagaagaaggccaacctgaatgccctggacagatatggccgcacagtgctgatcctggccgtgtgctgcggcagcgccagcatcgtgtccctgctgctggagcagaacattgatgtgagcagccaggacctgagcggccagacagcccgggagtatgctgtgagcagccgccacaacgtcatctgccagctgctgagtgactacaaggagaagcagatcctgaaggtgtcctctgagaacagcaaccctgagcaggacctgaagctgaccagcgaggaggagagccagaggctgaagggcagcgagaacagccagcctgaggagatgagccaggagcctgagatcaacaagggcggggacaggaaggtggaggaggagatgaagaagcacggcagcacccacatgggcttccctgagaacctgcccaatggagccacagctgacaatggagatgatggcctcatcccccccaggaagagcaggaccccagagagccagcagttcccagacacagaaaatgagcagtaccaccgggacttcagcggccaccccaacttccccaccaccctgcccatcaagcagtag

SEQ ID NO: 58157 - DNA, 1782 bp, Artificial Sequence
  derived and/or modified sequence
atggtggccgaggccggctccatgcctgctgccagctctgtgaagaagcccttcggcctgcggagcaagatgggcaagtggtgccgccactgcttcccctggtgccggggcagcggcaagagcaatgtgggcaccagcggggaccatgatgacagcgccatgaagaccctgcggagcaagatgggcaagtggtgccgccactgcttcccctggtgccggggcagcggcaagagcaatgtgggcaccagcggggaccatgatgattctgccatgaagaccctgcggagcaagatgggcaagtggtgctgccactgcttcccctgctgccggggcagcggcaagagcaaggtgggcccctggggagactatgatgacagcgccttcatggagccccgctaccacgtgcggcgggaggacctggacaagctgcaccgggccgcctggtggggcaaggtgcccaggaaggacctgattgtgatgctgaaggacacagacatgaacaagaaggacaagcagaagaggacagccctgcacctggccagcgccaatggaaacagcgaggtggtgaagctgctgctggaccggcgctgccagctgaacatcctggacaacaagaagaggacagccctgaccaaggctgtgcagtgccaggaggatgaatgtgccctgatgctgctggagcacggcacagaccccaacatcccagatgaatatggcaacacagccctgcactacgccatctacaatgaagacaagctgatggccaaggccctgctgctgtatggagctgacatcgagagcaagaacaagattgagagccacagcgtgtcccaggccggcgtgcagtggtgtgaccacagcagcctgcagcccaggcctcctgaggcccagatggtgctgcagccccagccccagttcttcttcctgtccttcttcctgttcctgttcctgttcctgttcttcttcagcagagatgaggtgtttgccatgttcctgcggctggtgctgaacagctgggcccaggccatccaccccccccagccccccaaggtgctgggcctgcagcacggcctgacccccctgctgctgggcgtgcatgagcagaagcagcaggtggtgaagttcctgatcaagaagaaggccaacctgaatgccctggacagatatggccgcacagtgctgatcctggccgtgtgctgcggcagcgccagcatcgtgtccctgctgctggagcagaacattgatgtgagcagccaggacctgagcggccagacagcccgggagtatgctgtgagcagccgccacaacgtcatctgccagctgctgagtgactacaaggagaagcagatcctgaaggtgtcctctgagaacagcaaccctgagcaggacctgaagctgaccagcgaggaggagagccagaggctgaagggcagcgagaacagccagcctgaggagatgagccaggagcctgagatcaacaagggcggggacaggaaggtggaggaggagatgaagaagcacggcagcacccacatgggcttccctgagaacctgcccaacggggccacagctgacaatggagatgatggcctcatcccccccaggaagagcaggaccccagagagccagcagttcccagacacagaaaatgagcagtaccacagtgatgagcagaatgacacccagaagcagctgtctgaggagcagaacacaggcatcctgcaggatgagatcctgattcatgaggagaagcagatcgaggtggccgagaatgagttctag

SEQ ID NO: 58158 - DNA, 1527 bp, Artificial Sequence
  derived and/or modified sequence
atggtggccgaggccggcagcatgcccgccgccagcagcgtgaagaagcctttcggcttaagaagcaagatgggtaagtggtgcagacactgcttcccctggtgccggggaagcgggaaaagtaacgtcggaacatccggagaccacgacgactccgccatgaagacactacggagtaaaatgggcaaatggtgtagacattgcttcccttggtgtcgcggtagtggaaagtccaacgtcggtacaagtggggatcacgatgacagcgctatgaaaactctgcgcagtaaaatgggaaaatggtgttgtcattgctttccgtgttgtcggggatccggcaaaagtaaagtcgggccatggggagactacgatgattctgccttcatggagccacgatatcatgtccgacgggaggaccttgataagctccaccgcgccgcctggtggggaaaggttccacgcaaggacttgattgtcatgctcaaggatacagacatgaacaagaaagataaacagaaacggacagccctccacctcgcgtctgccaacggcaactccgaagtggtgaagttactgctcgatcgtaggtgtcagctgaacatcctggacaacaagaaacgcaccgctcttacaaaagccgtgcagtgccaggaagacgaatgcgctttaatgctgctagagcacgggacggaccctaacattccagacgagtatggaaatactgccctgcactatgcaatctacaatgaggataaacttatggccaaggctcttctgttgtatggggccgacatcgagtcaaagaacaagcacggccttacaccactgcttttgggggttcatgaacagaagcaacaggtagtgaagttcctgatcaagaaaaaggctaatctcaacgcgctagaccgatacgggagaacagtgttaattttggctgtctgttgtggttcagcatctatcgtgtcgctacttcttgaacagaacatcgatgtgtctagtcaggacctgtccggacagacagccagagagtacgcagtgagttccaggcacaatgtgatctgccagctgctgtccgattacaaggagaaacagatcctcaaagtgtcgagcgaaaattccaatcccgagcaggacttaaaactgacctcagaagaagagtcccaacgactgaagggctcagagaactctcagcccgaagagatgagtcaagagcctgaaattaacaagggaggggatagaaaagtggaggaagagatgaagaagcatgggtccacccatatgggctttccagagaacctccctaacggcgccactgccgacaatggggatgacggcctgatccccccgcgaaaatcaaggacccccgagagccaacaattccccgataccgaaaacgagcagtatcacagcgatgagcagaacgatactcaaaaacagctgtcagaggagcagaataccggcatcctgcaggatgagatcctcatccatgaagagaaacaaatcgaggtggctgagaatgaattttag

SEQ ID NO: 58159 - DNA, 1461 bp, Artificial Sequence
  derived and/or modified sequence
atggtggccgaggccggcagcatgcccgccgccagcagcgtgaagaagcccttcggtttgcgctcgaaaatgggaaagtggtgtagacactgcttcccttggtgtcggggtagtggaaaaagtaatgtcggaacctcaggagaccatgatgactcagcaatgaaaactcttcggtctaaaatggggaaatggtgtagacattgctttccttggtgccgcgggtcaggcaaaagcaacgttggcacgtcaggagatcacgatgacagtgcaatgaagaccctgcgctctaagatgggtaaatggtgttgccactgtttcccttgctgccgagggtctggaaagtccaaggtgggcccctggggggactatgatgacagtgcctttatggaaccacgatatcacgtgagacgcgaggatctggacaaactgcatcgagccgcctggtggggaaaggtgccaagaaaggatcttatagtgatgctcaaggatactgatatgaataagaaagataagcaaaaacgcactgccctgcacctggcaagtgccaacggcaatagcgaagttgttaaactactgttggatagacggtgtcaactgaacatccttgataacaagaagagaaccgctctcaccaaggctgtgcaatgtcaggaggatgagtgtgccttgatgcttctagaacacggcaccgatcccaatattccggacgagtacgggaatacggcactgcactacgcaatttacaacgaagataaactgatggccaaggccctgctgttgtatggagctgacatagaatctaagaacaagcacggcctgacccccctgctgttgggtgttcatgagcagaagcaacaggtggtgaaatttttgatcaaaaaaaaggccaacctcaacgccctagatcgctacggcagaaccgtcttgattctggctgtgtgttgcgggtcagcatccattgtttccctgttgctggagcagaatatcgacgtcagctctcaagacctgtcaggccagacggctcgtgaatatgccgtttcctctagacacaatgtcatatgccagctgctttcggactacaaggagaagcagattctgaaggtgtcctctgagaacagtaaccctgaacaggatttgaagctgacctctgaggaagaatcacagcggttgaagggcagcgagaattcccagcccgaggaaatgagtcaggagccggagatcaataaaggaggcgacaggaaggtagaagaggagatgaaaaagcacggctccacccatatgggttttcctgagaacttgccgaatggagccacagccgataatggagacgatggacttatccccccccggaagagcagaaccccggagtctcagcagttcccagacactgaaaacgagcaatatcatcgggattttagcggccacccaaatttcccaaccactttgccgatcaaacagtag

SEQ ID NO: 58160 - DNA, 1782 bp, Artificial Sequence
  derived and/or modified sequence
atggtggccgaggccggcagcatgcccgccgccagcagcgtgaagaagccttttggactgagaagcaagatgggcaagtggtgccggcactgcttcccttggtgcagaggcagcggcaagagcaacgtgggcacatcaggcgatcacgatgatagtgccatgaaaacactgagatccaagatgggaaaatggtgtagacattgcttcccctggtgtcgcgggtccgggaaaagcaacgtgggcacgagcggcgatcacgacgactcggcgatgaagactctccgcagtaagatggggaaatggtgttgccattgctttccctgttgcaggggctccgggaaaagcaaggttgggccttggggggattatgacgattccgcgtttatggaacctcggtatcacgtgcgccgcgaagacctggataagctccacagagcagcatggtggggcaaggttccccggaaggacctcattgtaatgctgaaagatacggacatgaacaagaaggataagcagaagcgcaccgccctccatctggcctccgctaatggaaatagcgaggtggtgaaactgctcttggaccggcggtgccaactgaatatcctcgacaataagaaaagaaccgctctcaccaaggctgtgcaatgccaggaggacgagtgcgctctcatgctgctggagcatggaacggatcctaatattcctgatgaatatggaaatactgcactgcattacgcaatctacaacgaagataaactgatggcaaaggccctgcttctgtatggggctgacatcgagtctaaaaacaaaatcgaaagtcacagtgtgagccaggcgggagtccaatggtgtgaccactcttccttacagcctagaccccctgaggcacagatggtcctgcagcctcagccccagttctttttcctctcttttttcttgttcctttttctgtttctgttctttttttcaagggatgaggtattcgctatgttcctgaggttggtgctgaacagttgggcacaggcaattcacccaccccaaccacctaaggtgctagggctacagcatggactgaccccacttctcctgggtgtacacgagcagaaacagcaggtggtcaaattcctgattaaaaaaaaggccaaccttaatgcgctggacagatacgggagaacagtgctgattctggctgtttgttgcggttctgcctcaatcgtctccttgctcctggaacagaacattgatgtttcttctcaggatctgtccggccagactgcaagggagtacgccgtaagcagccgtcataacgtgatttgtcagctcctctctgattacaaagagaaacagatcctaaaagtcagctccgagaactccaatcctgagcaagacttgaagctgacgtccgaagaggagtcccagaggcttaaagggtccgagaacagtcagcccgaggagatgagccaggagcctgaaatcaacaaagggggggataggaaggtcgaagaggagatgaagaagcacggctccacgcatatgggattcccagaaaacctgcccaatggagcaactgccgacaacggcgacgacggactcatacccccccggaagagtcgcactcccgaaagccaacagttcccagacaccgagaatgagcagtaccactccgatgagcaaaacgacacccagaagcaactctctgaggaacaaaacaccggaattttgcaggatgagatacttatccatgaagagaaacagatcgaggtcgcagaaaatgagttctag

SEQ ID NO: 58161 - DNA, 1527 bp, Artificial Sequence
  derived and/or modified sequence
atggtggctgaagccggatctatgcccgctgcaagctccgtgaagaaacctttcgggctcaggagcaaaatgggcaaatggtgcagacactgtttcccttggtgcagagggagcggaaaaagcaatgtgggtacgagcggtgatcacgacgacagcgctatgaagaccctgcgcagcaaaatgggcaagtggtgtcggcattgtttcccctggtgccggggaagcggcaaatcaaatgtggggacttcaggagaccatgacgactcggcaatgaagactctccgctctaagatggggaaatggtgttgtcattgcttcccctgctgtagaggatctggcaaatctaaagttggcccttggggggactatgatgactccgcattcatggagcctcgttatcatgttcgtagggaggacctggataagctccatcgagcagcctggtggggaaaggtgcctaggaaggatctcatcgtgatgttgaaggataccgatatgaacaaaaaggataagcagaaaagaacggctctgcaccttgcatccgccaatggaaactcggaggtggtaaagctgcttttagatcgcagatgccagttgaacatcctggacaataagaaacgaaccgccttgaccaaggctgtgcaatgccaggaagacgagtgtgccctgatgcttctcgaacacggaacagatcccaatatccccgatgagtacggaaatactgcgctgcactatgcaatctataacgaagataagctgatggccaaggctctcctgctatatggggctgacatcgaaagtaaaaacaagcacggcctcacgccactgctgctgggagtccacgaacagaagcagcaggtggtcaagttcctcataaaaaaaaaggcaaatttaaatgccctggatcggtacggtcggactgtgttaattctggccgtttgctgcggatctgccagcattgtttctttactgcttgagcagaatatcgacgtttcctcacaagatcttagtggacagactgcaagggagtatgcagtctcatctcgccacaatgtcatttgccagctcctgtccgattacaaagaaaagcagatcttgaaggtgtcttcagaaaatagtaatcccgaacaggatctcaagctgacctcggaagaggagagccagcgcttgaagggctccgaaaacagtcagccagaagaaatgtcccaggaaccagagattaataaagggggagatcgcaaggtagaggaggagatgaaaaagcacggaagtacccatatgggttttccggagaatctgcctaacggagctacagctgacaatggagacgacggccttattccgccacggaaaagccgaacaccggaaagtcaacagttcccagacacagaaaatgagcagtaccacagcgacgaacagaacgatacacagaagcagttaagcgaggaacagaatactggcatcctccaagacgaaatcctcattcatgaggagaaacagatagaggtagccgagaacgagttctag

SEQ ID NO: 58162 - DNA, 1461 bp, Artificial Sequence
  derived and/or modified sequence
atggtggcagaggcgggatctatgccggcagctagctcagtgaaaaaaccattcggcctccgcagcaaaatggggaaatggtgtcgacattgcttcccttggtgtcggggaagtggaaaatccaacgtgggcacctccggtgaccacgatgactccgctatgaagactctgcgatccaagatgggaaagtggtgtcgacattgcttcccatggtgccggggatccggtaaaagcaatgtggggacatcaggagaccatgacgactcagcgatgaagaccctgaggtctaagatggggaagtggtgttgtcactgcttcccatgctgtcgcggttctgggaagagcaaagtagggccttggggagattacgacgacagcgccttcatggagccacgttaccatgtacggagagaagaccttgacaagctgcatcgggctgcctggtggggaaaggtaccccgtaaggacttaatcgtcatgttgaaggacacagacatgaataagaaagacaaacaaaaacggaccgccctgcacctggccagcgctaatggtaattcagaggtcgttaagctcctgctggacaggcgttgccagctcaacatactggataacaaaaagcggacagccctgacaaaggctgtgcagtgtcaggaagatgaatgcgcactaatgctattggaacatggcacagatcctaatattcccgacgagtatggtaataccgctcttcattacgctatctacaacgaagacaaactgatggccaaagctttgctcctgtacggtgcagacatcgagtctaaaaataaacacgggctgacccccctcctgctgggagttcacgaacagaagcagcaggttgtaaaatttctcataaaaaagaaagccaacttaaatgctctggataggtacggacgaactgtcttaatcttggctgtgtgttgcgggtccgcctccatcgtgtccctcctgcttgagcagaatattgatgttagctctcaggatctgtccgggcagactgctcgggaatatgccgtgagcagccggcacaacgtcatctgccaactcctcagcgattacaaggaaaagcagattttgaaggtttcaagtgagaacagcaaccctgagcaggacctgaaactgactagtgaagaggagagccaacgcctgaaggggagcgagaactcccagccagaggagatgagccaggagccagaaattaacaagggcggagatcgtaaagtggaggaggagatgaaaaaacacggttcaacccacatgggattcccagagaacctgcccaatggcgctactgccgacaacggggatgatggcttgatacccccaaggaaatctcgcacaccagaaagtcagcagtttcctgatacagaaaacgagcagtatcacagagattttagtggccaccctaattttccgacaacccttcctatcaaacagtag

SEQ ID NO: 58163 - DNA, 1782 bp, Artificial Sequence
  derived and/or modified sequence
atggtggctgaagccggttccatgccggctgcctcctcagttaagaaaccattcggcctgcggtctaagatgggcaaatggtgccgccattgcttcccctggtgccggggaagcggaaagagcaatgtcggaacttccggggatcatgacgacagcgccatgaagacactgcggagcaaaatggggaagtggtgcagacactgttttccatggtgtcgcggttctggtaaatcaaacgtgggcacatccggagaccacgatgatagtgctatgaaaacactaaggtccaagatgggcaagtggtgttgtcactgtttcccatgctgcagagggagcggaaagtctaaggtaggaccctggggtgactatgatgacagcgcgttcatggaaccaagataccacgtacggagagaagacctggataagcttcatcgtgcggcttggtggggaaaagtgccaagaaaggacctcatagtcatgctgaaggacactgacatgaacaagaaggataaacaaaaacgcacagctctgcacttggccagcgcaaacggaaactctgaggtcgtcaagctactgttggacagaaggtgtcagctcaacattttggacaacaaaaaacgcacagctctgaccaaagcggtgcagtgccaggaagacgagtgcgcactgatgttgttagaacacggcaccgaccctaatatccccgacgaatatggaaataccgcccttcattatgccatatacaacgaagataagttgatggccaaggctttactgctctatggcgctgacatcgagtccaaaaacaagatcgagtcacactccgtatctcaggctggcgtgcagtggtgtgatcattccagcttgcagcccaggccacctgaagcgcagatggttctccaaccacaaccacagttttttttcctatcctttttcttatttttattcctgttcttattctttttttcgagggacgaggtgttcgccatgttcctccgactggtattgaattcttgggcccaagcgatacacccacctcagcccccaaaagtccttgggctccagcatggcttaacaccacttttgctgggcgtgcacgagcaaaagcagcaggtggttaaattcctgatcaagaagaaagccaacttgaatgccctcgatcgatatggccgtacggtactgattcttgctgtgtgttgtggatcggcatctattgtgtccttacttctcgagcagaacatcgacgtttctagtcaggacctctccggacagacagcgagagaatacgcagtttccagtagacacaatgtcatctgtcaactactgtccgattacaaagaaaagcagatcctgaaggtttcttctgaaaactccaaccctgaacaagacctcaagctgacatctgaggaagaatcccagagattaaagggctcggaaaattcgcaaccggaggagatgtcccaggaaccagagatcaacaaaggcggtgaccggaaagttgaggaggagatgaagaagcatggctctacccacatgggattccccgagaatttgcccaacggcgctaccgccgataatggagacgacggcctcattccacctcgtaaatctagaacccccgaatcacagcagtttccagacaccgaaaatgagcagtatcattctgacgagcagaatgacacccagaaacaactgagtgaggaacagaatactggcattctgcaggacgagatcttaatccacgaggaaaagcagatcgaagtggccgaaaacgagttttag

SEQ ID NO: 58164 - DNA, 7061 bp, Artificial Sequence
  derived and/or modified sequence
ggtagacgcgatctgctggctactaccggcctcccctggctgttaaaagcagatggtggctgaggctggttcaatgccggctgcctcctctgtgaagaagccatttggtctcagaagcaagatgggcaagtggtgccgccactgcttcccctggtgcagggggagcggcaagagcaacgtgggcacttctggagaccacgatgattctgctatgaagacactcaggagcaagatgggcaagtggtgccgccactgcttcccctggtgcagggggagcggcaagagcaacgtgggcacttctggagaccacgacgactctgctatgaagacactcaggagcaagatgggcaagtggtgctgccactgcttcccctgctgcagggggagcggcaagagcaaagtgggcccctggggagactacgacgacagcgctttcatggagccgaggtaccacgtccgtcgagaagatctggacaagctccacagagctgcctggtggggtaaagtccccagaaaggatctcatcgtcatgctcaaggacactgacatgaacaagaaggacaagcaaaagaggactgctctacatctggcctctgccaatggaaattcagaagtagtaaaactcctgctggacagacgatgtcaacttaatatccttgacaacaaaaagaggacagctctgacaaaggccgtacaatgccaggaagatgaatgtgcgttaatgttgctggaacatggcactgatccgaatattccagatgagtatggaaataccgctctacactatgctatctacaatgaagataaattaatggccaaagcactgctcttatacggtgctgatatcgaatcaaaaaacaagcatggcctcacaccactgttacttggtgtacatgagcaaaaacagcaagtggtgaaattcttaatcaagaaaaaagcaaatttaaatgcactggatagatatggaagaactgttctcatacttgctgtatgttgtggatcggcaagtatagtcagccttctacttgagcaaaacattgatgtatcttctcaagatctatctggacagacggccagagagtatgctgtttctagtcgtcataatgtaatttgccagttactttctgactacaaagaaaaacagatactaaaagtctcttctgaaaacagcaatccagaacaagacttaaagctgacatcagaggaagagtcacaaaggcttaaaggaagtgaaaatagccagccagaggaaatgtctcaagaaccagaaataaataagggtggtgatagaaaggttgaagaagaaatgaagaagcacggaagtactcatatgggattcccagaaaacctgcctaacggtgccactgctgacaatggtgatgatggattaattccaccaaggaaaagcagaacacctgaaagccagcaatttcctgacactgagaatgaacagtatcacagtgatgaacaaaatgatactcagaagcaactttctgaagaacagaacactggaatattacaagatgagattctgattcatgaagaaaagcagatagaagtggctgaaaatgaattctgagctttctcttagttataagaaagaaaaagacctcttgcatgaaaatagtacgttgcaggaagaaattgtcatgctaagactggaactagacgtaatgaaacatcagagccagctaagagaaaagaaatatttggaggaaattgaaagtgtggaaaaaaagaatgataatcttttaaagggtctacaactgaatgagctcaccatggatgatgatactgccgtgctcgtcattgacaacggctctggcatgtgcaaggccggctttgcaggtgacgatgccccccgggctgtcttcccttccatcgtggggtgccccaggcaccagaacatgatggggggcatgcgtcagatggagtcctatgtgggcaatgaggcccagagcaagagaggcatcctgaccctgaagtaccccatggagcacggcatcatcaccaactgggacgacatggagaagatctggcaccacaccttctacaatgagctgcgtgtggctcccgaggagcaccccatcctgctgaccgaggcacccctgaaccccaaggccaaccgtgagaagatgacccagatcatgtttgagaccttcaacaccccagccatgtacgtggccatccaagccgtgctgtccttgtacacctctggccgtactactggcattgtgatggactctggtgacggggtcacccacactgtgcccatctatgaggggaatgccctcccccatgccaccctgcgcctagacctggctggccgggaactgactgactacctcatgaagatcctcaccgagcgtggctatagtttcaccaccatggccgagcaggaaatcgtgcgtgacatcacagagaagctgtgctatgttgccctggacttcgagcaggagatggccacagcggcctccagctcctccctagagaacagctatgagctgcccaacggccaggtcatcaccattagcaacgagcggttccgctgccccgaggtgctcttccagccttgcttcctgggcatggaatcctgtggcatccacgaaactaccttcaactctatcatgaagtctgatgtggacatccacaaagacctgtacaccaacacagtgctatctggtggcaccaccatgtaccctggcattgcccacaggatgcagaaggagatcgctgccctggcgcctagcacgatgaagatcaagattgttgctcctcccaagcgcaagtactccgtgtgggtcggtggctccatcctggcctcgctgtccaccttccagcagatgtggatcagcaagcaggagtatgatgagtcaggcccctccattgtccaccgcaaatgcttctaggtggacgctgacttagttgcattacaccctttcttgacaaaaccaaacttcgcagaaagccacatgagattggtatggctttaattgttttcttatttcattttttgttttgttttttattggcttgactcaggatttaaaaactggaatggtgaaggcgagagcagttggttggagtgagcttcccccaaagttctacaatgtggctgaggactttgatcgtacattgtttttcttttcaatagtcattccaaatattgtgagatgcattgtttcaggaagccccttgcccttctaaaagccaccccacttctctctaaggagaatggcccagtcctctccctaattcacacaggggaggtgatggcattgctttcatgcaaattacgtaatgcagaattttttgaatctttgcctaaatactttttaattttgttttatttagaatgatcagccttcgcggccccccttttttgtaccccaacttggggtgtatgaaggcttttggtctccctgagagtggctggaggcagccagggcttacctgtactctgacttaaggagagttggaaaaaagtgcacaccttaaaaaaaattcaatgaggaagcattaacaaaaacagtatttctgtacagtggacagcttagcatgttgacaactgagaataaaatgctcagttctgaactggacaatgtaagacacaacgacgaaacactggaaatggaaattcaattacatcattgtagactggctactgctctacatgattgtgaccaaagtcagagagctgaaagagacttctttccagagaacaagacatgaacaggtttatttacagaagacaatgaattctcatttgtctaacctaaaagattacagaatctttctcaacaagtctaatgtagacagtaaaatcaacaggctaaaaattaagttccatgaaacaagataaaactctgagagaaaagatggggcaggccgccatctttcccgttcgggcaacttagtcattccagcctgagggctttggagagtacaaactgaccagggaaagaagagatcccagagcacagcatagctgctttaccaaatcatggccagactgcttctgtaagcaggcccctgatcctgttccacctcactggacaggacctcccaactggggcctccagctacccccaccagcatcccttggccaatggaaatttgaaatgttcctgggacagagctcctggagagaggggcaggccaccacctttgctgtttgggtgactagccgttctggcctgcaggctttggagagcccaagctgacaaggggtagaagaggtgcctcagcacagcacagccacgctacgaaaacatggccagactcttgtttaagtcagtccccgaacacatttctagtcagtgggtgaagtctttcaaccagggtctctggctaccttgactgctgttctctggccgacagaggtctcaggcctccctgagtcagagctcccggggggaggaccagattgtcatctttgctgtttgggtgacccagccatttcagccttagggcttcagagtgtctgaggtagccaggggctgaagtgaacccccagcacagcacagctgctctataaaaacgtggccagactttttctttaagcaagtccctgttcttattcctcctgactaggtaagacttctcaacttgcctccagccacatcttattggtgtgttcagattggcaacaggttcgtacctcagtggtacagagctcccagaggaaggggtaggctatcatcttccctggaaaatacgagtcaattagggacttgaggggacccccagcattccacagcagcccttcagaaaagtggccagactctgtacttgatgggcagatcctcctggcctgtgtctctagccagcccaccactggagctatcaagccagtagcaactcagcagttccttggacagagcttccaggagcaaatgaaatcctttctgccactgcctttgcagtgaactgcccttgctatcctcagaagatatatcacgggagcaaagaccctaagtgccatatcaacacctccaataagctgcagttgacccaaagaacaagccaatccatctcccataggtaccacacacactccactactcatcaccagacagggaaccctggcttgggcccacagcacagaccctccatcctgggccgattacactgagtgattgctaactcacatgtctctgggatggagcacccaggagacaagcaaagtggtggagcagcaagtcaggtgatgtggagcccagagggcagggacagctatctctctaggctccacttgcccttgtgagacactttgtcccagcactttaggaatgctgaggtcagaccagccacatctcatgtgcaagattgcccagcagacatcaggtctgagagttccccttttaaaaaaggggacttgcttaaaaaagaagtctagccacgattgtgtagagcagctgtgctgtgctggagattcacttttgagagagttctcctctgagacctgatctttagaggctgggcagtcttgcacatgagatggggctggtctgatctcagcactccttagtctgcttgcctctcccagggccccagcctggccacacctgcttacagggcactctcagatgcccataccatagtttctgtgctagtggaccgtaccatatcagtggagagctgcagcaaggtggcccctacggccacgcaccagcctgcacattacctctccatactgcagccctttatatggaaacttcctacatcactttgctgtgtgtgtttacacaggtggattttgctttacttgcactgacagcacacaggagggcagcacacaccccaacccacatcaactgccattaaagaaaagaaatttcagcccataatttcatgtccagcaaaattaggcatcataagtgaaggagaaataagatccttttcagacaagcaaatgctgagggaattcaatatcaccagatctaccttacaagagctcctgaaggaagcactaaatatggaaagaaaaaaccatcaccagccactacaaaaatgcagtgaagaacgcagtgaattacgcagtccagtgatgctaaaaaccaaccacatacgttaagtctgcaaaataaccagctgacagcatgacgacaggataaaatccacacataccattactaaccttaaatgaaaatgggctaaatgctcccattgaaagacacggggcaagctggataaagaaccaagacccactggagtatgctgtcttcaagaaacccatctcacatgcggtggcatacataggctcaaaataaaggaatggagaaaaatatttcaagcaaatggaaaacagaaaaaagcaggtgttgcactcctactttctgacaaaacagactatgcgaataaagataaaaaagagaaggacattacaaaggtggtcctgacctttgataaatctcattgcttgataccaacctgggctgttttaattgcccaaaccaataggataatttgctgaggttgtggagcttctcccctgcagagagtccctgatctcccaaaatttggttgagatgtaaggttgattttgctgtacaactccttttctgaagttttactcatttccaaaaaggaaggcaagttttcctgcttccatgacgatggagagcaggcatctcctttcctgagtttcagcttgcttctgacagggaaggtgagtgtaagttttttccagcttctaagatggcagagaacgatcaccagcctgagccttatttccaggtaagtagctgaattagagttttgtcttaaaatttttccttaatgaataaaatgtaagattacccaccagctgcttttaatttctccttagcattagaacactcagtaatcatatgaattgtgcatttgtttgttttgcttaactctttctgtttgtttatgtttggggttttattgttgttgtttcacttttctcccatctcttcctgacttggtcaaatccaaaggaatcttccaaattgtggggagcaaggcatctgaaatggctaaaactcctgtggctgcaaaaaataaaaataaaaaaaaatatataaaaaaataaa

SEQ ID NO: 58165 - DNA, 1510 bp, Artificial Sequence
  derived and/or modified sequence
ggtagacgcgatctgctggctactaccggcctcccctggctgttaaaagcagatggtggctgaggctggttcaatgccggctgcctcctctgtgaagaagccatttggtctcagaagcaagatgggcaagtggtgccgccactgcttcccctggtgcagggggagcggcaagagcaacgtgggcacttctggagaccacgatgattctgctatgaagacactcaggagcaagatgggcaagtggtgccgccactgcttcccctggtgcagggggagcggcaagagcaacgtgggcacttctggagaccacgacgactctgctatgaagacactcaggagcaagatgggcaagtggtgctgccactgcttcccctgctgcagggggagcggcaagagcaaagtgggcccctggggagactacgacgacagcgctttcatggagccgaggtaccacgtccgtcgagaagatctggacaagctccacagagctgcctggtggggtaaagtccccagaaaggatctcatcgtcatgctcaaggacactgacatgaacaagaaggacaagcaaaagaggactgctctacatctggcctctgccaatggaaattcagaagtagtaaaactcctgctggacagacgatgtcaacttaatatccttgacaacaaaaagaggacagctctgacaaaggccgtacaatgccaggaagatgaatgtgcgttaatgttgctggaacatggcactgatccgaatattccagatgagtatggaaataccgctctacactatgctatctacaatgaagataaattaatggccaaagcactgctcttatacggtgctgatatcgaatcaaaaaacaagcatggcctcacaccactgttacttggtgtacatgagcaaaaacagcaagtggtgaaattcttaatcaagaaaaaagcaaatttaaatgcactggatagatatggaagaactgttctcatacttgctgtatgttgtggatcggcaagtatagtcagccttctacttgagcaaaacattgatgtatcttctcaagatctatctggacagacggccagagagtatgctgtttctagtcgtcataatgtaatttgccagttactttctgactacaaagaaaaacagatactaaaagtctcttctgaaaacagcaatccagaacaagacttaaagctgacatcagaggaagagtcacaaaggcttaaaggaagtgaaaatagccagccagaggaaatgtctcaagaaccagaaataaataagggtggtgatagaaaggttgaagaagaaatgaagaagcacggaagtactcatatgggattcccagaaaacctgcctaacggtgccactgctgacaatggtgatgatggattaattccaccaaggaaaagcagaacacctgaaagccagcaatttcctgacactgagaatgaacagtatcacagggacttttctggccatcccaactttcccacgacccttcccatcaaacag

SEQ ID NO: 58166 - DNA, 2181 bp, Artificial Sequence
  derived and/or modified sequence
ggtagacgcgatctgctggctactaccggcctcccctggctgttaaaagcagatggtggctgaggctggttcaatgccggctgcctcctctgtgaagaagccatttggtctcagaagcaagatgggcaagtggtgccgccactgcttcccctggtgcagggggagcggcaagagcaacgtgggcacttctggagaccacgatgattctgctatgaagacactcaggagcaagatgggcaagtggtgccgccactgcttcccctggtgcagggggagcggcaagagcaacgtgggcacttctggagaccacgacgactctgctatgaagacactcaggagcaagatgggcaagtggtgctgccactgcttcccctgctgcagggggagcggcaagagcaaagtgggcccctggggagactacgacgacagcgctttcatggagccgaggtaccacgtccgtcgagaagatctggacaagctccacagagctgcctggtggggtaaagtccccagaaaggatctcatcgtcatgctcaaggacactgacatgaacaagaaggacaagcaaaagaggactgctctacatctggcctctgccaatggaaattcagaagtagtaaaactcctgctggacagacgatgtcaacttaatatccttgacaacaaaaagaggacagctctgacaaaggccgtacaatgccaggaagatgaatgtgcgttaatgttgctggaacatggcactgatccgaatattccagatgagtatggaaataccgctctacactatgctatctacaatgaagataaattaatggccaaagcactgctcttatacggtgctgatatcgaatcaaaaaacaagattgagtctcactctgtttcccaggctggagtgcagtggtgtgatcacagctcactgcaacctcgacctcccgaagctcagatggtcctccaacctcaacctcagtttttttttctttctttctttttatttttatttttatttttatttttttttagtagagatgaggtttttgccatgtttctcaggctggtcttgaactcctgggctcaagcaattcatccccctcagcctcccaaagtgctaggattacagcatggcctcacaccactgttacttggtgtacatgagcaaaaacagcaagtggtgaaattcttaatcaagaaaaaagcaaatttaaatgcactggatagatatggaagaactgttctcatacttgctgtatgttgtggatcggcaagtatagtcagccttctacttgagcaaaacattgatgtatcttctcaagatctatctggacagacggccagagagtatgctgtttctagtcgtcataatgtaatttgccagttactttctgactacaaagaaaaacagatactaaaagtctcttctgaaaacagcaatccagaacaagacttaaagctgacatcagaggaagagtcacaaaggcttaaaggaagtgaaaatagccagccagaggaaatgtctcaagaaccagaaataaataagggtggtgatagaaaggttgaagaagaaatgaagaagcacggaagtactcatatgggattcccagaaaacctgcctaacggtgccactgctgacaatggtgatgatggattaattccaccaaggaaaagcagaacacctgaaagccagcaatttcctgacactgagaatgaacagtatcacagtgatgaacaaaatgatactcagaagcaactttctgaagaacagaacactggaatattacaagatgagattctgattcatgaagaaaagcagatagaagtggctgaaaatgaattctgagctttctcttagttataagaaagaaaaagacctcttgcatgaaaatagtacgttgcaggaagaaattgtcatgctaagactggaactagacgtaatgaaacatcagagccagctaagagaaaagaaatatttggaggaaattgaaagtgtggaaaaaaagaatgataatcttttaaagggtctacaactgaatgagctcaccatggatgatgatactgccgtgctcgtcattgacaacggctctggcatgtgcaaggccggctttgcaggtgacgatgccccccgggctgtcttcccttccatcgtggggtgccccaggcaccagaacatgatggggggcatgcgtc

SEQ ID NO: 58167 - DNA, 1527 bp, Artificial Sequence
  derived and/or modified sequence
atggtggctgaggcgggatctatgccagctgcgtcttctgtcaagaaacccttcgggctgagatctaaaatgggcaaatggtgccggcactgctttgcttggtgtcgcggctctgggaagtctaacgtagggacgagcggcgaccacgacgactccgcaatgaagaccctgcgctctaagatggggaagtggtgttgtcactgcttcccgtggtgtcgcgggtctggcaagagcaacgtcggcacaagcggtgaccacgacgactctgcaatgaagacattaaggagcaagatgggcaagtggtgttgtcactgcttcccgtgttgtcgcgggtctggaaagaataaggtgggcccatggggcgattacgacgacagcgcattcatggagcccagataccatgttagaagggaggatttagacaaactgcatcgggctgcatggtgggggaaggtgccgcggaaggacctgattgtgatgctcaaggacaccgatatgaataagaaggataaacaaaaaaggacagccctccaccttgcgtcagccaacggcaacagtgaggtcgtgaaactactgctggacaggcgctgccagttaaatatcctggacaataagaagcggacagctctcacgaaggctgtgcaatgccaagaagacgagtgtgctcttatgctgctagaacatgggactgatccgaatatcccagacgaatatggtaataccgctctgcactatgcaatttataacgaggacaaactcatggccaaagccttgctcctttacggcgcagacatcgaaagtaagaataaacacggcctcacaccactgctgctgggtgtccatgagcagaaacaacaggtcgtgaaattcctgatcaagaaaaaagcgaatctgaatgctctcgaccgttatggccgcacagctcttattctcgctgtatgctgtggctcagcaagcatcgtaagtttgctccttgagcagaatatcgatgtgagttctcaggatctgtcggggcagacagcaagagagtatgcagtctccagtaggcataatgtgatttgtcagttactgagcgattacaaagaaaagcagatcttgaaggtctcttctgaaaatagcaaccctgaacaggatctcaagctgacctcagaagaggagtctcagcgtctgaaagggtccgaaaactcacaacctgaagaaatgtcccaggagcctgagataaacaagggcggagaccgcaaggttgaggaggaaatgaaaaagcacggctctactcatatgggctttcctgagaaccttactaatggagcaaccgctgacaatggcgacgatggtttaattccgcccagaaaatcccggacaccagaaagccagcagtttcccgataccgagaatgaacagtatcactcagacgagcagaacgacactcagaagcagctgtccgaagaacaaaatacagggattctgcaggacgagattcttattcacgaagagaaacagatcgaagtcgccgaaaatgaattttag

SEQ ID NO: 58168 - DNA, 1527 bp, Artificial Sequence
  derived and/or modified sequence
atggtggccgaggccggctccatgcctgctgccagctctgtgaagaagcccttcggcctgcggagcaagatgggcaagtggtgccgccactgctttgcctggtgccggggcagcggcaagagcaatgtgggcaccagcggggaccatgatgacagcgccatgaagaccctgcggagcaagatgggcaagtggtgctgccactgcttcccctggtgccggggcagcggcaagagcaatgtgggcaccagcggggaccatgatgattctgccatgaagaccctgcggagcaagatgggcaagtggtgctgccactgcttcccctgctgccggggcagcggcaagaacaaggtgggcccctggggagactatgatgacagcgccttcatggagccccgctaccacgtgcggcgggaggacctggacaagctgcaccgggccgcctggtggggcaaggtgcccaggaaggacctgattgtgatgctgaaggacacagacatgaacaagaaggacaagcagaagaggacagccctgcacctggccagcgccaatggaaacagcgaggtggtgaagctgctgctggaccggcgctgccagctgaacatcctggacaacaagaagaggacagccctgaccaaggctgtgcagtgccaggaggatgaatgtgccctgatgctgctggagcacggcacagaccccaacatcccagatgaatatggcaacacagccctgcactacgccatctacaatgaagacaagctgatggccaaggccctgctgctgtatggagctgacatcgagagcaagaacaagcacggcctgacccccctgctgctgggcgtgcatgagcagaagcagcaggtggtgaagttcctgatcaagaagaaggccaacctgaatgccctggacagatatggccgcacagccctgatcctggccgtgtgctgcggcagcgccagcatcgtgtccctgctgctggagcagaacattgatgtgagcagccaggacctgagcggccagacagcccgggagtatgctgtgagcagccgccacaacgtcatctgccagctgctgagtgactacaaggagaagcagatcctgaaggtgtcctctgagaacagcaaccctgagcaggacctgaagctgaccagcgaggaggagagccagaggctgaagggcagcgagaacagccagcctgaggagatgagccaggagcctgagatcaacaagggcggggacaggaaggtggaggaggagatgaagaagcacggcagcacccacatgggcttccctgagaacctgaccaatggagccacagctgacaatggagatgatggcctcatcccccccaggaagagcaggaccccagagagccagcagttcccagacacagaaaatgagcagtaccacagtgatgagcagaatgacacccagaagcagctgtctgaggagcagaacacaggcatcctgcaggatgagatcctgatccacgaggagaagcagatcgaggtggctgaaaatgagttctag

SEQ ID NO: 58169 - DNA, 1527 bp, Artificial Sequence
  derived and/or modified sequence
atggtggccgaggccggcagcatgcccgccgccagcagcgtgaagaagcccttcggtttaaggtcaaaaatgggcaagtggtgtcgccactgcttcgcatggtgcagagggtcgggcaaatccaacgtgggcacttctggggaccacgacgatagcgctatgaagacattgaggagcaaaatgggcaaatggtgctgtcactgctttccttggtgcaggggaagtgggaaaagtaatgtgggtacgtccggagaccatgatgatagtgctatgaagacactccgctcaaagatgggcaaatggtgctgccactgcttcccctgctgtagaggctcaggtaaaaataaggttggcccttggggagattacgatgattcggccttcatggagccgcggtaccatgtgcgccgggaggacctagacaagctgcatcgagcagcttggtggggtaaggtgcctaggaaggaccttattgtgatgctgaaggataccgacatgaataagaaggataagcaaaaaagaacagccctacacttggcgtccgccaacggtaattcagaagtggtcaaactattgctggaccgacgctgccaactgaacatattggacaacaagaagagaaccgctctgaccaaagctgtgcagtgccaggaggatgaatgcgctctgatgctgctggagcatggtacagatccaaacattcccgatgagtacggcaataccgctctacactatgctatctacaacgaggataagctgatggccaaggctctgttgttgtacggcgcagacatcgagtcaaagaacaagcatggtttgacaccgttgctgttgggagtacacgagcagaagcagcaggtggtgaagtttctaatcaagaagaaggccaacttaaacgccttggacaggtatggccgaacagctctgatactggcagtgtgttgcgggtccgctagtatcgtgtccctcttgctggagcagaatattgatgtgagttcacaggacctctccggacaaactgcacgggagtatgctgtgagcagccgccacaatgtgatctgccagctgcttagcgactacaaggagaagcagattctaaaggtgtcaagcgaaaacagtaatcccgaacaggatctgaagctcacctccgaggaagagtctcagcgattaaaaggctccgaaaacagccagcccgaagagatgagccaagagcccgagattaacaagggtggcgacaggaaagttgaagaggagatgaaaaagcacggctctacccacatgggctttccggagaatctgacgaacggagccacagctgataatggtgatgatgggctgatcccccctaggaaaagtcgcacacctgaatcgcagcagttcccagacaccgaaaacgagcagtatcattccgacgagcaaaatgatacacaaaaacagctgagcgaggagcaaaataccggcattctgcaggatgaaatcctgattcacgaagagaaacaaatcgaagtggctgaaaacgaattctag

SEQ ID NO: 58170 - DNA, 1926 bp, Artificial Sequence
  derived and/or modified sequence
ggtagacgcgatctgctggctactaccggccttccctggctgttaaaagcagatggtggctgaggctggttcaatgccggctgcctcctctgtgaagaagccatttggtctcagaagcaagatgggcaagtggtgccgccactgcttcgcctggtgcagggggagcggcaagagcaacgtgggcacttctggagaccacgacgattctgctatgaagacactcaggagcaagatgggcaagtggtgctgccactgcttcccctggtgcagggggagcggcaagagcaacgtgggcacttctggagaccacgacgactctgctatgaagacactcaggagcaagatgggcaagtggtgctgccactgcttcccctgctgcagggggagcggcaagaacaaagtgggcccttggggagactacgacgacagcgctttcatggagccgaggtaccacgtccgtcgagaagatctggacaagctccacagagctgcctggtggggtaaagtccccagaaaggatctcatcgtcatgctcaaggacactgacatgaacaagaaggacaagcaaaagaggactgctctacatctggcctctgccaatggaaattcagaagtagtaaaactcctgctggacagacgatgtcaacttaatatccttgacaacaaaaagaggacagctctgacaaaggccgtacaatgccaggaagatgaatgtgcgttaatgttgctggaacatggcactgatccgaatattccagatgagtatggaaataccgctctacactatgctatctacaatgaagataaattaatggccaaagcactgctcttatacggtgctgatatcgaatcaaaaaacaagcatggcctcacaccactgttacttggtgtacatgagcaaaaacagcaagtggtgaaatttttaatcaagaaaaaagcaaatttaaatgcactggatagatatggaagaactgctctcatacttgctgtatgttgtggatcggcaagtatagtcagccttctacttgagcaaaacattgatgtatcttctcaagatctatctggacagacggccagagagtatgctgtttctagtcgtcataatgtaatttgccagttactttctgactacaaagaaaaacagatactaaaagtctcttctgaaaacagcaatccagaacaagacttaaagctgacatcagaggaagagtcacaaaggcttaaaggaagtgaaaatagccagccagaggaaatgtctcaagaaccagaaataaataagggtggtgatagaaaggttgaagaagaaatgaagaagcacggaagtactcatatgggattcccagaaaacctgactaacggtgccactgctgacaatggtgatgatggattaattccaccaaggaaaagcagaacacctgaaagccagcaatttcctgacactgagaatgaacagtatcacagtgatgaacaaaatgatactcagaagcaactttctgaagaacagaacactggaatattacaagatgagattctgattcatgaagaaaagcagatagaagtggctgaaaatgaattctgagctttctcttagttataagaaagaaaaagacctcttgcatgaaaatagtacgttgcaggaagaaattgtcatgctaagactggaactagacataatgaaacatcagagccagctaagagaaaagaaatatttggaggaaattgaaagtgtggaaaaaaagaatgataatcttttaaagggtctacaactgaatgagctcaccatggatgatgatactgccgtgctcgtcattgacaacggctctggcatgtgcaaggccggctttgcaggtgacgatgccccccgggctgtcttcccttccatcgtggggtgccccaggcaccagaacatgatggggggcatgcgtc

SEQ ID NO: 58171 - DNA, 1527 bp, Artificial Sequence
  derived and/or modified sequence
atggtggccgaagctggtagcatgccggctgcttcctctgtgaaaaagcccttcggtctccgctcaaagatgggcaaatggtgccgccactgcttcgcgtggtgtaggggaagcggcaagtctaatgtaggaacctcaggagatcacgatgactcggctatgaaaacactgagatcaaagatgggcaaatggtgctgccattgcttcccctggtgcagggggagcggcaaatctaacgtggggactagtggtgaccacgatgattccgcaatgaaaacgctgaggtccaagatggggaaatggtgttgtcactgcttcccctgttgcaggggctccgggaagaataaggttggcccttggggcgactacgacgatagcgccttcatggaacctaggtaccacgtcagacgcgaggacctggataagctgcatagggccgcatggtggggcaaggtgcccagaaaagatctgattgtgatgttgaaggatacagatatgaacaaaaaggacaaacagaagagaactgcattacaccttgcgagcgcgaacgggaatagcgaagtggttaagctcttgctggaccggaggtgccaactcaatatcctggataacaagaaacgaaccgcactgactaaagctgttcagtgccaggaggatgagtgcgctctgatgctgttggaacacggaactgacccgaacatccccgacgaatatgggaacaccgctctgcattatgccatctacaatgaagataagctgatggctaaggcattacttctctacggcgcagacatcgagagtaaaaacaaacatggactgaccccactgcttttgggcgtgcatgagcagaagcagcaggtggtcaaatttctgatcaagaagaaggctaatttgaacgctttagatcgctacggacgaacggccctcatattagccgtttgttgtggctccgcctccatcgtgagtctcctgctagaacagaatattgacgtatcatcacaggatctgtctggccagactgcccgtgagtacgcggtcagctctaggcataatgtgatctgccagctgctgagtgattataaagagaagcagatcctgaaggtgagttccgaaaatagcaaccctgagcaggacttgaaattgactagtgaggaagagtcacagagactcaaggggtccgagaatagccagccggaagaaatgagtcaggaaccagagattaacaaaggcggagaccgaaaagtggaggaggaaatgaagaaacacggaagcacacacatgggattccccgaaaatttgacaaatggcgctacagcagacaacggagacgatggccttatccctccccgaaagtcgaggacgcctgagagccagcaattccctgacaccgaaaatgaacagtatcattcagatgagcagaatgacactcaaaagcagctctctgaggagcagaatacaggaatcctgcaggacgaaatcctgatacacgaagagaagcagattgaagtggccgagaacgagttctag

SEQ ID NO: 58172 - DNA, 1527 bp, Artificial Sequence
  derived and/or modified sequence
atggtggccgaggccggcagcatgcccgccgccagcagcgtgaagaagcccttcggcctgagaagcaagatgggcaagtggtgcagacactgcttcgcctggtgcagaggcagcggcaagagcaacgtgggcaccagcggcgaccacgacgacagcgccatgaagaccctgagaagcaagatgggcaagtggtgctgccactgcttcccctggtgcagaggcagcggcaagagcaacgtgggcaccagcggcgaccacgacgacagcgccatgaagaccctgagaagcaagatgggcaagtggtgctgccactgcttcccctgctgcagaggcagcggcaagaacaaggtgggcccctggggcgactacgacgacagcgccttcatggagcccagataccacgtgagaagagaggacctggacaagctgcacagagccgcctggtggggcaaggtgcccagaaaggacctgatcgtgatgctgaaggacaccgacatgaacaagaaggacaagcagaagagaaccgccctgcacctggccagcgccaacggcaacagcgaggtggtgaagctgctgctggacagaagatgccagctgaacatcctggacaacaagaagagaaccgccctgaccaaggccgtgcagtgccaggaggacgagtgcgccctgatgctgctggagcacggcaccgaccccaacatccccgacgagtacggcaacaccgccctgcactacgccatctacaacgaggacaagctgatggccaaggccctgctgctgtacggcgccgacatcgagagcaagaacaagcacggcctgacccccctgctgctgggcgtgcacgagcagaagcagcaggtggtgaagttcctgatcaagaagaaggccaacctgaacgccctggacagatacggcagaaccgccctgatcctggccgtgtgctgcggcagcgccagcatcgtgagcctgctgctggagcagaacatcgacgtgagcagccaggacctgagcggccagaccgccagagagtacgccgtgagcagcagacacaacgtgatctgccagctgctgagcgactacaaggagaagcagatcctgaaggtgagcagcgagaacagcaaccccgagcaggacctgaagctgaccagcgaggaggagagccagagactgaagggcagcgagaacagccagcccgaggagatgagccaggagcccgagatcaacaagggcggcgacagaaaggtggaggaggagatgaagaagcacggcagcacccacatgggcttccccgagaacctgaccaacggcgccaccgccgacaacggcgacgacggcctgatcccccccagaaagagcagaacccccgagagccagcagttccccgacaccgagaacgagcagtaccacagcgacgagcagaacgacacccagaagcagctgagcgaggagcagaacaccggcatcctgcaggacgagatcctgatccacgaggagaagcagatcgaggtggccgagaacgagttctag

SEQ ID NO: 58173 - protein, 500 aa, Artificial Sequence
  derived and/or modified sequence
MPFRKACGPKLTNSPTVIVMVGLPARGKTYISKKLTRYLNWIGVPTKVFNVGEYRREAVKQYSSYNFFRPDNEEAMKVRKQCALAALRDVKSYLAKEGGQIAVFDATNTTRERRHMILHFAKENDFKAFFIESVCDDPTVVASNIMEVKISSPDYKDCNSAEAMDDFMKRISCYEASYQPLDPDKCDRDLSLIKVIDVGRRFLVNRVQDHIQSRIVYYLMNIHVQPRTIYLCRHGENEHNLQGRIGGDSGLSSRGKKFASALSKFVEEQNLKDLRVWTSQLKSTIQTAEALRLPYEQWKALNEIDAGVCEELTYEEIRDTYPEEYALREQDKYYYRYPTGESYQDLVQRLEPVIMELERQENVLVICHQAVLRCLLAYFLDKSAEEMPYLKCPLHTVLKLTPVAYGCRVESIYLNVESVCTHRERSEDAKKGPNPLMRRNSVTPLASPEPTKKPRINSFEEHVASTSAALPSCLPPEVPTQLPGQNMKGSRSSADSSRKH

SEQ ID NO: 58174 - protein, 184 aa, Artificial Sequence
  derived and/or modified sequence
MPFRKACGPKLTNSPTVIVMVGLPARGKTYISKKLTRYLNWIGVPTKVFNVGEYRREAVKQYSSYNFFRPDNEEAMKVRKQCALAALRDVKSYLAKEGGQIAVFDATNTTRERRHMILHFAKENDFKAFFIESVCDDPTVVASNIMQKAFQRDLSATPLWCCRKLKSPARITKTATRQKPWTTS

SEQ ID NO: 58175 - DNA, 1503 bp, Artificial Sequence
  derived and/or modified sequence
atgccattcagaaaggcctgcggtccaaagctcacaaactcaccaacagtgatcgtcatggtggggctgcccgccagaggaaagacatatattagcaagaagctgactaggtaccttaactggatcggagtccccaccaaagtgtttaatgtgggcgagtatcgcagagaggccgtcaaacaatacagcagttataacttcttccggccagataatgaagaggccatgaaggttcgtaagcaatgcgccctggccgccctgagagatgtgaagagttatttggccaaagaaggagggcagattgcagttttcgatgctacaaacacaacccgggagaggaggcacatgatcctccacttcgctaaagaaaacgattttaaggccttcttcatcgagagcgtttgcgatgaccctaccgtggtggcctctaatattatggaggtaaaaatcagcagtccagattataaagattgtaattccgccgaggctatggatgacttcatgaagcgaatttcctgctacgaggccagttaccagcccctggatcctgataagtgcgatagagatctgtctcttattaaagtcatagacgtgggcaggagattccttgtgaaccgggttcaggatcacattcaatctcggatcgtctattatcttatgaacattcacgtgcagccaagaaccatctatctgtgccgccacggcgagaacgaacataacctgcaggggagaatcgggggtgattccggcctttcaagtcgtggcaagaagttcgccagcgctctgtctaaattcgtggaagagcagaacctaaaagatctccgagtgtggaccagtcagctgaaatctacaatccagacggcagaggcattgcggcttccctacgagcagtggaaggccttgaacgaaatagacgctggggtctgtgaggaactgacctatgaggagattcgggatacctaccccgaggagtacgcactccgcgaacaagataagtactattaccgctatccaactggagaaagttatcaggacttagttcagcggctggaaccagttatcatggagttggagcgccaagagaatgtacttgtcatctgccatcaggctgtgctccggtgcctgctggcctattttttggacaagtctgctgaggagatgccctatctgaagtgtccattacacactgtgctgaaactgactcccgtagcctacgggtgtagagtcgaatctatctatctgaatgtagagagcgtgtgtacccatcgggagcggtcagaagacgctaagaaggggcccaatccacttatgaggagaaacagcgtgaccccactggcaagtcctgagcctaccaaaaagcctaggatcaatagtttcgaggaacacgtggcgagcaccagtgctgcactgccatcctgccttccccctgaagttccaacacagttgcctggacagaacatgaaaggctctcgcagtagtgcagacagctcccggaagcactag

SEQ ID NO: 58176 - DNA, 555 bp, Artificial Sequence
  derived and/or modified sequence
atgccctttcggaaggcctgcggccccaaactgactaacagtcccacggtcattgtgatggttggcttgcccgcgcgcggtaagacttatatttccaagaagctcacccgctacctgaactggatcggcgtgccgacgaaagtctttaatgttggggagtatagacgcgaggctgtgaagcagtactcttcttacaatttctttaggccagacaatgaagaagccatgaaagttcgaaagcagtgcgctctggccgccctcagagacgtcaagtcctacttagctaaggaagggggtcagattgccgtgtttgacgctacgaacaccactcgggaaaggagacacatgatattgcattttgctaaggagaacgattttaaggctttttttatcgagtcagtgtgtgatgatccaaccgtggtggcctcaaacatcatgcagaaggcctttcagcgggacctcagcgcaacccctttatggtgttgcaggaaactgaagtcccccgcccggattactaagactgctacgcgccagaaaccctggacgactagctag

SEQ ID NO: 58177 - DNA, 1503 bp, Artificial Sequence
  derived and/or modified sequence
atgcccttcaggaaggcctgtggccccaagctgaccaacagccccaccgtcatcgtgatggtgggcctgcctgcccggggcaagacctacatcagcaagaagctgacccgctacctgaactggattggagtgcccaccaaggtgttcaacgtgggggagtacagaagagaggccgtgaagcagtacagcagctacaacttcttccggccagacaatgaggaggccatgaaggtgaggaagcagtgtgccctggccgccctgagagatgtgaagagctacctggccaaggagggcggccagattgctgtgtttgatgccaccaacaccacccgggagaggaggcacatgatcctgcactttgccaaggaaaatgacttcaaggccttcttcattgaatctgtgtgtgatgaccccaccgtggtggccagcaacatcatggaggtgaagatcagcagcccagactacaaggactgcaacagcgctgaggccatggatgacttcatgaagaggatcagctgctatgaggccagctaccagcccctggaccctgacaagtgtgaccgggacctgagcctcatcaaggtgattgatgtgggccgccgcttcctggtgaacagagtgcaggaccacatccagagcagaattgtgtactacctgatgaacatccacgtgcagcccaggaccatctacctgtgccgccacggggagaatgagcacaacctgcagggcagaattggaggagacagcggcctgagcagccggggcaagaagtttgccagcgccctgagcaagtttgtggaggagcagaacctgaaggacctgcgggtgtggaccagccagctgaagagcaccatccagacagctgaggccctgcggctgccctatgagcagtggaaggccctgaatgaaattgatgctggggtgtgtgaggagctgacctatgaggagatccgggacacctacccagaggagtatgccctgcgggagcaggacaagtactactaccgctaccccactggagagagctaccaggacctggtgcagaggctggagcccgtcatcatggagctggagcggcaggagaatgtgctggtgatctgccaccaggccgtgctgcgctgcctgctggcctacttcctggacaagtctgctgaggagatgccctacctgaagtgccccctgcacacagtgctgaagctgacccctgtggcctacggctgccgggtggagagcatctacctgaatgtggagagcgtgtgcacccaccgggagaggagtgaagatgccaagaagggccccaaccccctgatgagaagaaattctgtgacccccctggccagccctgagcccaccaagaagccccgcatcaacagctttgaggagcacgtggccagcaccagcgctgccctgcccagctgcctgcccccagaggtgcccacccagctgcccggccagaacatgaagggcagccgcagcagcgctgacagcagcaggaagcactag

SEQ ID NO: 58178 - DNA, 555 bp, Artificial Sequence
  derived and/or modified sequence
atgcccttcaggaaggcctgtggccccaagctgaccaacagccccaccgtcatcgtgatggtgggcctgcctgcccggggcaagacctacatcagcaagaagctgacccgctacctgaactggattggagtgcccaccaaggtgttcaacgtgggggagtacagaagagaggccgtgaagcagtacagcagctacaacttcttccggccagacaatgaggaggccatgaaggtgaggaagcagtgtgccctggccgccctgagagatgtgaagagctacctggccaaggagggcggccagattgctgtgtttgatgccaccaacaccacccgggagaggaggcacatgatcctgcactttgccaaggaaaatgacttcaaggccttcttcattgaatctgtgtgtgatgaccccaccgtggtggccagcaacatcatgcagaaggccttccagagggacctgagcgccacccccctgtggtgctgcaggaagctgaagagccctgcccgcatcaccaagacagccacccggcagaagccctggaccaccagctag

SEQ ID NO: 58179 - DNA, 1503 bp, Artificial Sequence
  derived and/or modified sequence
atgcccttccggaaggcctgcggccccaagctgaccaacagccccaccgtgatcgtgatggttggtctcccggcccgagggaagacttatatctcaaagaagctcactcgctaccttaactggatcggtgtgcctaccaaggtgttcaatgttggagagtatagaagagaggccgttaagcaatattccagctacaacttctttcggccggataacgaagaagcgatgaaggtcagaaaacagtgcgccctcgctgccctacgtgacgtaaaatcgtacctggcgaaagagggcgggcagatcgccgtctttgatgctacaaacacgacaagggaacggagacatatgattctgcattttgctaaagagaacgatttcaaggcatttttcatagagtccgtatgcgatgaccccacagtagtggcctccaatattatggaggttaagataagtagtccggactataaggactgtaactcagctgaggcgatggacgatttcatgaagcgcatttcgtgttatgaggcctcttaccagcctctggatcccgacaagtgcgacagggatctatccctaataaaagttattgacgtgggtagaaggttcttggtcaatagagtgcaagaccatatccagagccgaatcgtatactatctgatgaacatccacgtacagcctcgcactatctatctctgtagacacggggaaaatgagcacaatctgcagggacgaatcggaggggattccgggctgtcttccaggggaaagaaattcgctagtgccctgtcaaaattcgtggaagagcaaaaccttaaggacctgcgagtatggacatctcagctgaaatccacaattcagaccgctgaggcactgcggctgccctacgaacagtggaaggctctgaatgagatcgatgccggcgtctgcgaagaactgacatatgaagagattcgcgacacttatccggaagagtacgccttgagagagcaggacaagtactattatcgctaccccacaggggagtcatatcaagacctcgttcagcgcctagaacctgtcatcatggagctggaacgccaggagaacgtgttagtaatatgccatcaagccgtgttgcgatgtctgcttgcctatttcttggacaagtctgccgaggagatgccatacctgaaatgccctcttcacactgtcctgaaacttaccccagtggcgtatggatgccgggttgagagcatctacctgaacgtcgagtcagtgtgtacgcatagggagcgctccgaagatgctaagaaaggccccaaccccctcatgcgccgcaattcagttacacccctggcttcccccgaaccaactaagaagccccgcatcaattcttttgaggaacacgttgcctcaacctccgccgccctcccgtcctgtctgccgccggaagtgcctacccagctgccagggcagaatatgaaaggctccaggtctagtgccgactcttcacgcaaacactag

SEQ ID NO: 58180 - DNA, 555 bp, Artificial Sequence
  derived and/or modified sequence
atgcccttccggaaggcctgcggccccaagctgaccaacagccccactgtgatagtcatggtgggactccctgctcgcggaaaaacttacatctcaaaaaaactgacgcgatatctcaactggatcggggtccctactaaagtgtttaatgtaggagaatatcggagggaggctgttaaacagtacagttcttacaatttcttcaggcccgataacgaagaagccatgaaggtgagaaagcagtgtgcacttgccgctctgagagacgtcaagtcttacctagctaaagagggtgggcagatagccgtcttcgacgccaccaacaccaccagggaaaggaggcacatgattctgcatttcgcgaaggaaaatgactttaaggcattctttattgagtccgtatgcgatgatcctaccgtggtcgcctcaaatatcatgcagaaagccttccagagggatttgtctgcaaccccgctatggtgctgcagaaagttgaagtctcctgcacggattaccaaaacagccaccagacagaagccgtggacgaccagctag

SEQ ID NO: 58181 - DNA, 1503 bp, Artificial Sequence
  derived and/or modified sequence
atgcctttccgtaaagcctgcggcccaaaactgacgaattcccctacggtgatcgtaatggtaggtttacctgctcgcggaaaaacctacatttcaaaaaagctgacacgctacctcaattggatcggagttcccaccaaagtgttcaacgtaggggaataccgccgtgaggccgtcaagcagtacagcagttataacttcttcaggcccgataatgaagaagccatgaaggtgaggaagcagtgtgccttggccgcactgcgcgacgtcaagtcatatctggccaaggaggggggacagatagccgtgttcgacgccactaatactactcgcgaacgacgccacatgatcctgcatttcgcaaaagaaaacgattttaaagccttcttcatagagtcggtgtgcgatgaccccactgtggtggcctccaacatcatggaggtgaagatctcgtcgcctgactacaaggattgcaattccgccgaggctatggacgactttatgaaaagaattagttgctatgaggcctcctaccaaccactcgatcctgacaaatgtgatcgggacctctcgttgatcaaggtgattgatgtgggaaggcggtttctggtcaatcgcgtgcaggaccatattcaatcacgcattgtatactacctaatgaatatccacgtgcagcctagaactatctatctgtgcagacacggagagaacgaacacaatcttcagggccgtatcggaggggatagcgggctgtcaagtcgcggaaagaagtttgcaagtgccctgagtaaatttgtggaagagcagaatttgaaagatctgcgggtttggacctctcaattgaaaagcaccatccaaacagccgaagcgctccggctaccatatgagcagtggaaagccctgaacgaaatcgacgccggtgtgtgcgaagagctaacatatgaagagatcagagatacataccccgaagaatacgccctgcgcgaacaggacaaatattattaccgctaccccaccggtgaatcctatcaggacctggtccagcggctggagcccgtgatcatggagttggaaaggcaggagaatgtgctggtgatttgccaccaggccgtgttacgctgtcttctggcttatttcttagacaagtcagctgaagaaatgccttacctcaagtgcccgctgcacacagtgctgaagctgacccccgtggcctacgggtgtcgcgtggaatcaatctatttgaacgtagaatctgtgtgcacacaccgagaaagatccgaggatgctaagaaagggcctaacccgctgatgcgtaggaatagtgtaacgcctttagccagccctgagcctactaagaaacccaggatcaactcctttgaagagcacgtggcctcaacctcggctgccctgccatcctgcctacctccggaggtgcccactcagctgcccggacagaatatgaaaggttcccgttcctcagcggactcttctcgcaagcactag

SEQ ID NO: 58182 - DNA, 555 bp, Artificial Sequence
  derived and/or modified sequence
atgcccttccggaaggcgtgcgggccaaagctcacaaattctcccacagtcatcgtgatggtaggactgcccgctagaggtaaaacctacatttccaagaagctaacgcggtaccttaactggattggggtgcctacaaaggtctttaacgtgggcgagtatagaagggaggccgtgaaacagtactcatcctataacttcttccgccctgataacgaagaagccatgaaggtgcggaaacagtgcgcgctggcagccctcagggacgtgaagagctatctggccaaagaaggcggacagatcgctgtgtttgacgctactaacacaactagagaacgccgacatatgattcttcacttcgctaaggaaaatgattttaaagcattttttatagagagcgtctgtgacgacccgactgtggttgcatccaatataatgcagaaggcattccagcgcgatctgtcggcaactcccctttggtgctgtcggaaactgaagagtcctgcccgtatcaccaagacagctaccaggcagaagccctggactacaagttag

SEQ ID NO: 58183 - DNA, 4157 bp, Artificial Sequence
  derived and/or modified sequence
gccgcttggacgtcgtcctgtctgggtgtcgcgggccggccccgcggggagcgcccccggcgcgatgcccttcaggaaagcctgtgggccaaagctgaccaactcccccaccgtcatcgtcatggtgggcctccccgcccggggcaagacctacatctccaagaagctgactcgctacctcaactggattggcgtccccacaaaagtgttcaacgtcggggagtatcgccgggaggctgtgaagcagtacagctcctacaacttcttccgccccgacaatgaggaagccatgaaagtccggaagcaatgtgccttagctgccttgagagatgtcaaaagctacctggcgaaagaagggggacaaattgcggttttcgatgccaccaatactactagagagaggagacacatgatccttcattttgccaaagaaaatgactttaaggcgtttttcatcgagtcggtgtgcgacgaccctacagttgtggcctccaatatcatggaagttaaaatctccagcccggattacaaagactgcaactcggcagaagccatggacgacttcatgaagaggatcagttgctatgaagccagctaccagcccctcgaccccgacaaatgcgacagggacttgtcgctgatcaaggtgattgacgtgggccggaggttcctggtgaaccgggtgcaggaccacatccagagccgcatcgtgtactacctgatgaacatccacgtgcagccgcgtaccatctacctgtgccggcacggcgagaacgagcacaacctccagggccgcatcgggggcgactcaggcctgtccagccggggcaagaagtttgccagtgctctgagcaagttcgtggaggagcagaacctgaaggacctgcgcgtgtggaccagccagctgaagagcaccatccagacggccgaggcgctgcggctgccctacgagcagtggaaggcgctcaatgagatcgacgcgggcgtctgtgaggagctgacctacgaggagatcagggacacctaccctgaggagtatgcgctgcgggagcaggacaagtactattaccgctaccccaccggggagtcctaccaggacctggtccagcgcttggagccagtgatcatggagctggagcggcaggagaatgtgctggtcatctgccaccaggccgtcctgcgctgcctgcttgcctacttcctggataagagtgcagaggagatgccctacctgaaatgccctcttcacaccgtcctgaaactgacgcctgtcgcttatggctgccgtgtggaatccatctacctgaacgtggagtccgtctgcacacaccgggagaggtcagaggatgcaaagaagggacctaacccgctcatgagacgcaatagtgtcaccccgctagccagccccgaacccaccaaaaagcctcgcatcaacagctttgaggagcatgtggcctccacctcggccgccctgcccagctgcctgcccccggaggtgcccacgcagctgcctggacaaaacatgaaaggctcccggagcagcgctgactcctccaggaaacactgaggcagacgtgtcggttccattccatttccatttctgcagcttagcttgtgtcctgccctccgcccgaggcaaaacgtatcctgaggacttcttccggagagggtggggtggagcagcgggggagccttggccgaagagaaccatgcttggcaccgtctgtgtcccctcggccgctggacaccagaaagccacgtgggtccctggcgccctgcctttagccgtggggcccccacctccactctctgggtttcctaggaatgtccagcctcggagaccttcacaaagccttgggagggtgatgagtgctggtcctgacaggaggccgctggggacactgtgctgttttgtttcgtttctgtgatctcccggcacgtttggagctgggaagaccacactggtggcagaatcctaaaattaaaggaggcaggctcctagttgctgaaagttaaggaatgtgtaaaacctccacgtgactgtttggtgcatcttgacctgggaagacgcctcatgggaacgaacttggacaggtgttgggttgaggcctcttctgcaggaagtccctgagctgagacgcaagttggctgggtggtccgcaccctggctctcctgcaggtccacacaccttccaggcctgtggcctgcctccaaagatgtgcaagggcaggctggctgcacggggagagggaagtattttgccgaaatatgagaactggggcctcctgctcccagggagctccagggcccctctctcctcccacctggacttggggggaactgagaaacactttcctggagctgctggcttttgcacttttttgatggcagaagtgtgacctgagagtcccaccttctcttcaggaacgtagatgttggggtgtcttgccctggggggcttggaacctctgaaggtggggagcggaacacctggcatccttccccagcacttgcattaccgtccctgctcttcccaggtggggacagtggcccaagcaaggcctcactcgcagccacttcttcaagagctgcctgcacactgtcttggagcatctgccttgtgcctggcactctgccggtgccttgggaaggtcggaagagtggactttgtcctggccttcccttcatggcgtctatgacacttttgtggtgatggaaagcatgggacctgtcgtctcagcctgttggtttctcctcattgcctcaaaccctggggtaggtgggacggggggtctcgtgcccagatgaaaccatttggaaactcggcagcagagtttgtccaaatgacccttttcaggatgtctcaaagcttgtgccaaaggtcacttttctttcctgccttctgctgtgagccctgagatcctcctcccagctcaagggacaggtcctgggtgagggtgggagatttagacacctgaaactgggcgtggagagaagagccgttgctgtttgttttttgggaagagcttttaaagaatgcatgtttttttcctggttggaattgagtaggaactgaggctgtgcttcaggtatggtacaatcaagtgggggattttcatgctgaaccattcaagccctccccgcccgttgcacccactttggctggcgtctgctggagaggatgtctctgtccgcattcccgtgcagctccaggctcgcgcagttttctctctctccctggatgttgagtctcatcagaatatgtgggtagggggtggacgtgcacgggtgcatgattgtgcttaacttggttgtatttttcgatttgacatggaaggcctgttgctttgctcttgagaatagtttctcgtgtccccctcgcaggcctcattctttgaacatcgactctgaagtttgatacagataggggcttgatagctgtggtcccctctcccctctgactacctaaaatcaatacctaaatacagaagccttggtctaacacgggacttttagtttgcgaagggcctagatagggagagaggtaacatgaatctggacagggagggagatactatagaaaggagaacactgcctactttgcaagccagtgacctgccttttgaggggacattggacgggggccgggggcgggggttgggtttgagctacagtcatgaacttttggcgtctactgattcctccaactctccaccccacaaaataacggggaccaatatttttaactttgcctatttgtttttgggtgagtttcccccctccttattctgtcctgagaccacgggcaaagctcttcattttgagagagaagaaaaactgtttggaaccacaccaatgatatttttctttgtaatacttgaaatttatttttttattattttgatagcagatgtgctatttatttatttaatatgtataaggagcctaaacaatagaaagctgtagagattgggtttcattgttaattggtttgggagcctcctatgtgtgacttatgacttctctgtgttctgtgtatttgtctgaattaatgacctgggatataaagctatgctagctttcaaacaggagatgcctttcagaaatttgtatattttgcagttgccagaccaataaaatacctggttgaaataca

SEQ ID NO: 58184 - DNA, 3922 bp, Artificial Sequence
  derived and/or modified sequence
cccgagtcgcggggctgccgcttggacgtcgtcctgtctgggtgtcgcgggccggccccgcggggagcgcccccggcgcgatgcccttcaggaaagcctgtgggccaaagctgaccaactcccccaccgtcatcgtcatggtgggcctccccgcccggggcaagacctacatctccaagaagctgactcgctacctcaactggattggcgtccccacaaaagtgttcaacgtcggggagtatcgccgggaggctgtgaagcagtacagctcctacaacttcttccgccccgacaatgaggaagccatgaaagtccggaagcaatgtgccttagctgccttgagagatgtcaaaagctacctggcgaaagaagggggacaaattgcggttttcgatgccaccaatactactagagagaggagacacatgatccttcattttgccaaagaaaatgactttaaggcgtttttcatcgagtcggtgtgcgacgaccctacagttgtggcctccaatatcatgcagaaagccttccagcgtgatttatcagccacccctttgtggtgttgcaggaagttaaaatctccagcccggattacaaagactgcaactcggcagaagccatggacgacttcatgaagaggatcagttgctatgaagccagctaccagcccctcgaccccgacaaatgcgacagggacttgtcgctgatcaaggtgattgacgtgggccggaggttcctggtgaaccgggtgcaggaccacatccagagccgcatcgtgtactacctgatgaacatccacgtgcagccgcgtaccatctacctgtgccggcacggcgagaacgagcacaacctccagggccgcatcgggggcgactcaggcctgtccagccggggcaagaagtttgccagtgctctgagcaagttcgtggaggagcagaacctgaaggacctgcgcgtgtggaccagccagctgaagagcaccatccagacggccgaggcgctgcggctgccctacgagcagtggaaggcgctcaatgagatcgacgcgaggagatgccctacctgaaatgccctcttcacaccgtcctgaaactgacgcctgtcgcttatggatgcaaagaagggacctaacccgctcatgagacgcaatagtgtcaccccgctagccagccccgaacccaccaaaaagcctcgcatcaacagctttgaggagcatgtggcctccacctcggccgccctgcccagctgcctgcccccggaggtgcccacgcagctgcctggacaaaacatgaaaggctcccggagcagcgctgactcctccaggaaacactgaggcagacgtgtcggttccattccatttccatttctgcagcttagcttgtgtcctgccctccgcccgaggcaaaacgtatcctgaggacttcttccggagagggtggggtggagcagcgggggagccttggccgaagagaaccatgcttggcaccgtctgtgtcccctcggccgctggacaccagaaagccacgtgggtccctggcgccctgcctttagccgtggggcccccacctccactctctgggtttcctaggaatgtccagcctcggagaccttcacaaagccttgggagggtgatgagtgctggtcctgacaggaggccgctggggacactgtgctgttttgtttcgtttctgtgatctcccggcacgtttggagctgggaagaccacactggtggcagaatcctaaaattaaaggaggcaggctcctagttgctgaaagttaaggaatgtgtaaaacctccacgtgactgtttggtgcatcttgacctgggaagacgcctcatgggaacgaacttggacaggtgttgggttgaggcctcttctgcaggaagtccctgagctgagacgcaagttggctgggtggtccgcaccctggctctcctgcaggtccacacaccttccaggcctgtggcctgcctccaaagatgtgcaagggcaggctggctgcacggggagagggaagtattttgccgaaatatgagaactggggcctcctgctcccagggagctccagggcccctctctcctcccacctggacttggggggaactgagaaacactttcctggagctgctggcttttgcacttttttgatggcagaagtgtgacctgagagtcccaccttctcttcaggaacgtagatgttggggtgtcttgccctggggggcttggaacctctgaaggtggggagcggaacacctggcatccttccccagcacttgcattaccgtccctgctcttcccaggtggggacagtggcccaagcaaggcctcactcgcagccacttcttcaagagctgcctgcacactgtcttggagcatctgccttgtgcctggcactctgccggtgccttgggaaggtcggaagagtggactttgtcctggccttcccttcatggcgtctatgacacttttgtggtgatggaaagcatgggacctgtcgtctcagcctgttggtttctcctcattgcctcaaaccctggggtaggtgggacggggggtctcgtgcccagatgaaaccatttggaaactcggcagcagagtttgtccaaatgacccttttcaggatgtctcaaagcttgtgccaaaggtcacttttctttcctgccttctgctgtgagccctgagatcctcctcccagctcaagggacaggtcctgggtgagggtgggagatttagacacctgaaactgggcgtggagagaagagccgttgctgtttgttttttgggaagagcttttaaagaatgcatgtttttttcctggttggaattgagtaggaactgaggctgtgcttcaggtatggtacaatcaagtgggggattttcatgctgaaccattcaagccctccccgcccgttgcacccactttggctggcgtctgctggagaggatgtctctgtccgcattcccgtgcagctccaggctcgcgcagttttctctctctccctggatgttgagtctcatcagaatatgtgggtagggggtggacgtgcacgggtgcatgattgtgcttaacttggttgtatttttcgatttgacatggaaggcctgttgctttgctcttgagaatagtttctcgtgtccccctcgcaggcctcattctttgaacatcgactctgaagtttgatacagataggggcttgatagctgtggtcccctctcccctctgactacctaaaatcaatacctaaatacagaagccttggtctaacacgggacttttagtttgcgaagggcctagatagggagagaggtaacatgaatctggacagggagggagatactatagaaaggagaacactgcctactttgcaagccagtgacctgccttttgaggggacattggacgggggccgggggcgggggttgggtttgagctacagtcatgaacttttggcgtctactgattcctccaactctccaccccacaaaataacggggaccaatatttttaactttgcctatttgtttttgggtgagtttcccccctccttattctgtcctgagaccacgggcaaagctcttcattttgagagagaagaaaaactgtttggaaccacaccaatgatatttttctttgtaatacttgaaatttatttttttattattttgatagcagatgtgctatttatttatttaatatgtataaggagcctaaacaatagaaagctgtagagattgggtttcattgttaattggtttgggagcctcctatgtgtgacttatgacttctctgtgttctgtgtatttgtctgaattaatgacctgggatataaagctatgctagctttcaaacaggagatgcctttcagaaatttgtatattttgcagttgccagaccaataaaatacctggttgaaatac

SEQ ID NO: 58185 - DNA, 1503 bp, Artificial Sequence
  derived and/or modified sequence
atgcccttcagaaaggcctgcggccccaagctgaccaacagccccaccgtgatcgtgatggtgggcctgcccgccagaggcaagacctacatcagcaagaagctgaccagatacctgaactggatcggcgtgcccaccaaggtgttcaacgtgggcgagtacagaagagaggccgtgaagcagtacagcagctacaacttcttcagacccgacaacgaggaggccatgaaggtgagaaagcagtgcgccctggccgccctgagagacgtgaagagctacctggccaaggagggcggccagatcgccgtgttcgacgccaccaacaccaccagagagagaagacacatgatcctgcacttcgccaaggagaacgacttcaaggccttcttcatcgagagcgtgtgcgacgaccccaccgtggtggccagcaacatcatggaggtgaagatcagcagccccgactacaaggactgcaacagcgccgaggccatggacgacttcatgaagagaatcagctgctacgaggccagctaccagcccctggaccccgacaagtgcgacagagacctgagcctgatcaaggtgatcgacgtgggcagaagattcctggtgaacagagtgcaggaccacatccagagcagaatcgtgtactacctgatgaacatccacgtgcagcccagaaccatctacctgtgcagacacggcgagaacgagcacaacctgcagggcagaatcggcggcgacagcggcctgagcagcagaggcaagaagttcgccagcgccctgagcaagttcgtggaggagcagaacctgaaggacctgagagtgtggaccagccagctgaagagcaccatccagaccgccgaggccctgagactgccctacgagcagtggaaggccctgaacgagatcgacgccggcgtgtgcgaggagctgacctacgaggagatcagagacacctaccccgaggagtacgccctgagagagcaggacaagtactactacagataccccaccggcgagagctaccaggacctggtgcagagactggagcccgtgatcatggagctggagagacaggagaacgtgctggtgatctgccaccaggccgtgctgagatgcctgctggcctacttcctggacaagagcgccgaggagatgccctacctgaagtgccccctgcacaccgtgctgaagctgacccccgtggcctacggctgcagagtggagagcatctacctgaacgtggagagcgtgtgcacccacagagagagaagcgaggacgccaagaagggccccaaccccctgatgagaagaaacagcgtgacccccctggccagccccgagcccaccaagaagcccagaatcaacagcttcgaggagcacgtggccagcaccagcgccgccctgcccagctgcctgccccccgaggtgcccacccagctgcccggccagaacatgaagggcagcagaagcagcgccgacagcagcagaaagcactag

SEQ ID NO: 58186 - DNA, 555 bp, Artificial Sequence
  derived and/or modified sequence
atgcccttcagaaaggcctgcggccccaagctgaccaacagccccaccgtgatcgtgatggtgggcctgcccgccagaggcaagacctacatcagcaagaagctgaccagatacctgaactggatcggcgtgcccaccaaggtgttcaacgtgggcgagtacagaagagaggccgtgaagcagtacagcagctacaacttcttcagacccgacaacgaggaggccatgaaggtgagaaagcagtgcgccctggccgccctgagagacgtgaagagctacctggccaaggagggcggccagatcgccgtgttcgacgccaccaacaccaccagagagagaagacacatgatcctgcacttcgccaaggagaacgacttcaaggccttcttcatcgagagcgtgtgcgacgaccccaccgtggtggccagcaacatcatgcagaaggccttccagagagacctgagcgccacccccctgtggtgctgcagaaagctgaagagccccgccagaatcaccaagaccgccaccagacagaagccctggaccaccagctag

SEQ ID NO: 58187 - protein, 1132 aa, Artificial Sequence
  derived and/or modified sequence
MDAVNAFNQELFSLMDMKPPISRAKMILITKAAIKAIKCKPEYKVPGLYVIDSIVRQSRHQFGTDKDVFGPRFSKNITATFQYLYLCPSEDKSKIVRVLNLWQKNGVFKIEIIQPLLDMAAGTSNAAPVAENVTNNEGSPPPPVKVSSEPPTQATPNSVPAVPQLPSSDAFAAVAQLFQTTQGQQLQQILQTFQQPPKPQSPALDNAVMAQVQAITAQLKTTPTQPSEQKAAFPPPEQKTAFDKKLLDRFDYDDEPEAVEESKKEDTTAVTTTAPAAAVPPAPTATVPAAAAPAAASPPPPQAPFGFPGDGMQQPAYTQHQNMDQFQPRMMGIQQDPMHHQVPLPPNGQMPGFGLLPTPPFPPMAQPVIPPTPPVQQPFQASFQAQNEPLTQKPHQQEMEVEQPCIQEVKRHMSDNRKSRSRSASRSPKRRRSRSGSRSRRSRHRRSRSRSRDRRRHSPRSRSQERRDREKERERRQKGLPQVKPETASVCSTTLWVGQLDKRTTQQDVASLLEEFGPIESINMIPPRGCAYIVMVHRQDAYRALQKLSRGNYKVNQKSIKIAWALNKGIKADYKQYWDVELGVTYIPWDKVKPEELESFCEGGMLDSDTLNPDWKGIPKKPENEVAQNGGAETSHTEPVSPIPKPLPVPVPPIPVPAPITVPPPQVPPHQPGPPVVGALQPPAFTPPLGIPPPGFGPGVPPPPPPPPFLRPGFNPMHLPPGFLPPGPPPPITPPVSIPPPHTPPISIPNSTIAGINEDTTKDLSIGNPIPTVVSGARGNAESGDSVKMYGSAVPPAAPTNLPTPPVTQPVSLLGTQGVAPGPVIGLQAPSTGLLGARPGLIPLQRPPGMPPPHLQRFPLMPPRPMPPHMMHRGPPPGPGGFAMPPPHGMKGPFPPHGPFVRPGGMPGLGGPGPGPGGPEDRDGRQQPPQQPQQQPQPQAPQQPQQQQQQQPPPSQQPPPTQQQPQQFRNDNRQQFNSGRDQERFGRRSFGNRVENDRERYGNRNDDRDNSNRDRREWGRRSPDRDRHRDLEERNRRSSGHRDRERDSRDRESRREKEEARGKEKPEVTDRAGGNKTVEPPISQVGNVDTASELEKGVSEAAVLKPSEELPAEATSSVEPEKDSGSAAEAPR

SEQ ID NO: 58188 - DNA, 3399 bp, Artificial Sequence
  derived and/or modified sequence
atggacgctgtgaatgcttttaaccaggaacttttctccctgatggatatgaaacctccaatctctagggccaagatgatcctaatcactaaggcggccatcaaagccattaaatgtaagccagaatacaaagtgcctgggctatacgtcattgattccatcgtgcgccagagtcggcaccagttcggaacggataaggacgtcttcggacctcgcttttccaagaacatcaccgccaccttccagtatctttatctgtgtccttccgaggacaagtcaaaaatcgttagagtcctgaacctgtggcagaagaatggtgtattcaagatagagatcatacagcctctgctcgatatggccgccgggacctccaacgcggcaccagtagcagagaatgtgaccaataacgagggttctcccccacccccagtcaaggtgagttccgaaccgcctacacaggcaacacctaattccgttcccgccgttccgcagttgccttcttctgatgcttttgccgccgtggcacagctgttccagacgacacaaggccaacagctccaacaaattttacaaacttttcagcagcctcctaagccccaatcgcctgctctagacaatgctgtcatggcacaggtacaggctataaccgcccagctgaagaccactccaactcaaccatcagagcagaaagcggcctttcctcctccggagcaaaagacagcgtttgacaaaaaactgctggatcggtttgactacgatgatgaacccgaggcagtcgaagaaagcaagaaggaggacacgaccgcagtgacaactacagcccccgctgctgctgtgccacccgcccctactgccaccgtacccgccgccgctgcccctgctgcagcgagcccaccccctccccaggctccgttcggcttccccggtgatggcatgcaacagcctgcatatacccagcatcagaatatggaccaatttcagcctaggatgatgggtatacagcaggaccccatgcaccaccaagttcccctgccccctaacggtcaaatgcccggattcggactgttacctacgccaccttttcctccaatggcacaacccgtgatccctcccacccctcccgtgcagcagcccttccaggcctcctttcaggcccagaacgagccactaacacaaaagccgcatcagcaggagatggaagtagaacagccgtgtatccaggaagtgaaacggcacatgtctgataatcgaaagtcccggtctagaagcgcttctagatctcctaaaagacgccgctcccggtctggctctcgttctcgacgttcaaggcataggaggtcaaggagcaggtctcgagaccgaagacgacatagccctaggtctcggtcccaggaaaggcgagatcgggagaaggaacgcgagcgtaggcaaaagggtttaccccaagtcaagccagaaaccgcctcggtgtgcagcactaccttatgggtggggcaactggacaaaagaaccactcaacaggatgtagcatcgctcctggaggagttcggccctatagagtctattaatatgatcccgcctagagggtgtgcttacatagttatggtgcaccgtcaggacgcctatagggccctgcagaagctatcccgcggcaactacaaagtgaaccaaaagagtattaagattgcctgggcgctgaacaaagggatcaaggcagactacaagcagtactgggatgtggaacttggcgtgacctatattccatgggacaaggtgaaacccgaggagcttgagagcttttgtgaaggtggaatgttagactcggacaccctgaaccctgactggaaaggcattccgaaaaagccagaaaacgaggtggctcagaacgggggcgcagaaacctcccacacagagcccgtgagtcctatccctaaacccctgccagtcccagtgcccccaatccccgtcccagccccgattacggtacccccacctcaggttccaccacaccagcctggccctcccgttgtcggagcgctgcagccgcctgccttcacccctcccctagggataccaccacctggtttcgggcctggtgtccctccacctcctcctcccccccccttcctgcggcctggtttcaacccaatgcatcttccaccaggatttctgcctcctggccctcccccccccataaccccgccagttagtatcccccctccacatacgcctccaatttcaatcccaaatagtacaattgcgggaataaacgaggataccactaaggacctatccataggcaaccccattcccactgttgtttcaggagcaagaggtaatgccgaatcaggcgatagcgtcaaaatgtacggcagcgcagtaccccccgccgctccaacgaacctccctacaccccccgtgacccaaccagttagcctcctcgggactcagggggtggctccaggccccgtgattggccttcaagccccgtctacaggcctcctgggcgcaagaccaggcctcatacccctgcagcgcccaccaggtatgccacctccccatcttcagaggtttccgctcatgcctcctcggcctatgccgccacatatgatgcaccgcggccccccaccaggccccggtggatttgcaatgccaccaccccatgggatgaaaggaccctttccccctcacgggccattcgtgcgacctggcggcatgcctggcctcggtggtcctggccccggtccaggcggtcctgaagatagagacggacgccagcaacctccgcagcagccacaacagcaacctcagccacaggcccctcagcagcctcagcagcagcagcagcagcaacccccccccagccaacagcctcctcctactcagcagcagccacagcagtttagaaacgataacagacagcagttcaactccggccgggaccaagagcgttttggtaggcgcagttttggcaaccgggtggagaatgacagggaaaggtatggaaaccggaacgacgaccgagacaactctaatcgggacagacgagaatgggggcgcaggtcacccgacagggatcgccatagagacttggaggagagaaatcggaggtcgagtggacatagggatcgtgagagagactcacgggaccgcgaatctaggcgtgagaaggaggaggccagaggtaaggagaagccggaggtgactgaccgcgccggtggaaacaagacagtagagcctcccatttcacaggtgggcaacgtcgacacagcgagcgagttggaaaaaggcgtgagtgaagccgcagtgctgaaaccaagcgaggaactgcctgccgaagctaccagcagtgtggaacccgagaaggactcagggtccgctgcagaagcccccaggtag

SEQ ID NO: 58189 - DNA, 3399 bp, Artificial Sequence
  derived and/or modified sequence
atggatgctgtgaatgccttcaaccaggagctgttcagcctgatggacatgaagccacccatcagccgggccaagatgatcctgatcaccaaggccgccatcaaggccatcaagtgcaagccagagtacaaggtgcccggcctgtatgtgattgacagcatcgtgcggcagagccgccaccagtttggaacagacaaggatgtgtttggcccccgcttcagcaagaacatcacagccaccttccagtacctgtacctgtgccccagcgaggacaagagcaagatcgtgcgggtgctgaacctgtggcagaagaatggagtcttcaagattgagatcatccagcccctgctggacatggctgctggcaccagcaatgctgcccctgtggctgaaaatgtgaccaacaatgaaggcagccccccacctcctgtgaaggtgagcagcgagccccccacccaggccacccccaacagcgtgcctgctgtgccccagctgcccagcagtgatgcctttgctgctgtggcccagctgttccagaccacccagggccagcagctgcagcagatcctgcagaccttccagcagccccccaagccccagagccctgccctggacaatgctgtgatggcccaggtgcaggccatcacagcccagctgaagaccacccccacccagcccagcgagcagaaggccgccttccccccacctgagcagaagacagcctttgacaagaagctgctggacagatttgattatgatgatgagcctgaggccgtggaggagagcaagaaggaggacaccacagctgtgaccaccacagccccagctgctgctgtgcccccagcccccacagccaccgtgcctgctgctgctgccccagctgctgccagccccccaccaccccaggcccccttcggcttccctggagatggcatgcagcagcctgcctacacccagcaccagaacatggaccagttccagcccaggatgatgggcatccagcaggaccccatgcaccaccaggtgcccctgcccccaaatggccagatgcctggcttcggcctgctgcccaccccacccttcccccccatggcccagcctgtgatcccccccaccccacctgtgcagcagcccttccaggccagcttccaggcccagaatgagcccctgacccagaagccccaccagcaggagatggaggtggagcagccctgcatccaggaggtgaagaggcacatgtctgacaacaggaagagccgcagccgcagcgccagccgcagccccaagagaagaagaagccgcagcggcagccgcagccgccgcagccgccacagaagaagccgcagccgcagccgggacagaagaagacacagccccaggagccgcagccaggagcggcgggaccgggagaaggagcgggagcggcggcagaagggcctgccccaggtgaagccagagacagcctctgtgtgcagcaccaccctgtgggtgggccagctggacaagaggaccacccagcaggatgtggccagcctgctggaggagtttggccccatcgagagcatcaacatgatccccccccggggctgtgcctacatcgtgatggtgcaccggcaggatgcctaccgggccctgcagaagctgagccggggcaactacaaggtgaaccagaagagcatcaagatcgcctgggccctgaacaagggcatcaaggctgactacaagcagtactgggatgtggagctgggcgtgacctacatcccctgggacaaggtgaagccagaggagctggagagcttctgtgagggcggcatgctggacagcgacaccctgaacccagactggaagggcatccccaagaagccagaaaatgaggtggcccagaatggaggagctgagaccagccacacagagcctgtgagccccatccccaagcccctgcctgtgcctgtgccccccatccctgtgcctgcccccatcaccgtgcccccaccccaggtgcccccccaccagcccggcccccctgtggtgggcgccctgcagcccccagccttcaccccacccctgggcatccccccacctggcttcggccctggggtgcccccacctcctcctcctccacccttcctgcggcccggcttcaaccccatgcacctgcccccaggcttcctgcccccaggccccccaccacccatcaccccacctgtgtccatccccccaccccacaccccacccatcagcatccccaacagcaccatcgccggcatcaatgaagacaccaccaaggacctgagcatcggcaaccccatccccaccgtggtgtctggggcccggggaaatgctgagagcggggacagcgtgaagatgtatggcagcgctgtgcccccagctgcccccaccaacctgcccaccccacctgtgacccagcctgtgtccctgctgggcacccagggcgtggcccctggccctgtgattggcctgcaggcccccagcacaggcctgctgggcgcccggcccggcctcatccccctgcagaggcctcctggcatgcccccaccccacctgcagcgcttccccctgatgccaccccggcccatgccaccccacatgatgcaccggggccccccacctggccctgggggctttgccatgcccccaccccacggcatgaagggccccttcccccctcatggcccctttgtgcggcctgggggcatgcctggcctgggcggccctggccctggccctgggggccctgaggacagagatggccggcagcagcccccccagcagccccagcagcagccccagccccaggccccccagcagccccagcagcagcagcagcagcagcccccacccagccagcagcccccacccacccagcagcagccccagcagttcagaaatgacaaccggcagcagttcaacagcggccgggaccaggagagatttggaagaagaagctttggaaacagagtggagaatgaccgggagagatatggcaacagaaatgatgaccgggacaacagcaacagagacagaagagagtggggccgccgcagcccagaccgggacagacaccgggacctggaggagaggaacagaagaagcagcggccaccgggaccgggagcgggacagccgggaccgggagagccggcgggagaaggaggaggcccggggcaaggagaagccagaggtgacagaccgggccggcggcaacaagacagtggagccccccatcagccaggtgggcaatgtggacacagccagcgagctggagaagggcgtgtctgaggccgctgtgctgaagcccagcgaggagctgcctgctgaggccaccagctctgtggagcctgagaaggacagcggcagcgctgctgaggcccccaggtag

SEQ ID NO: 58190 - DNA, 3399 bp, Artificial Sequence
  derived and/or modified sequence
atggacgccgtgaacgccttcaaccaggagctgttcagcctgatggacatgaagccgccgatttcacgcgcaaagatgatcctcattacaaaggccgccattaaagccatcaagtgcaagcccgagtataaagtgccaggcttgtacgttatcgacagtatcgtccggcagtccagacaccagttcggcacagacaaggatgtcttcggcccaaggttcagtaaaaatatcacagctacgtttcagtatctgtatctttgtccctcagaggataaaagtaagattgtgcgcgtgttgaatctctggcagaagaacggtgtatttaagattgagataattcagcctctattggacatggctgctgggaccagcaatgctgctccagtggccgagaatgtaactaataatgagggaagcccgccgccacccgtgaaagtgtccagtgagcccccaacccaggccacccccaatagcgtcccagctgtcccgcagcttccctcatcagacgcctttgcagccgtggcccagctgttccagaccacccagggtcagcagctacagcaaatcctgcaaacatttcagcagcctcctaagccccagtctcccgcactggacaacgctgtcatggcacaggtgcaggccatcaccgcccagctgaagaccactcctacccagcccagtgagcagaaggcagcctttccaccgccggagcagaaaactgctttcgacaagaagctgttggatcggtttgattatgatgatgagccagaggccgtggaagaatcgaagaaagaagatactacggccgtgacaactacagctcctgctgcagctgtccctcccgcacctacggccacggtcccggccgcggcagctccagcagccgcatcgccacctcctccgcaggcccctttcggctttcccggcgacggaatgcagcagccagcctatacccagcatcagaacatggaccagttccagccacgcatgatgggcattcagcaggacccaatgcaccaccaggtgccgctccccccgaacgggcaaatgcccggcttcggattgttacccacacctcccttcccacctatggcccagcccgtaatcccacctactccgcccgtccagcagcccttccaggctagctttcaggcgcagaatgaacccttgacacaaaaaccccaccaacaggagatggaagtggaacagccctgtatccaggaagtcaagagacacatgagtgacaatcggaaatcccgcagccgctccgcatcccgctcccctaaaagacgacgctctcgttccggatctcgatcccggaggagtcgacaccggagaagccggtcccgctcgcgggatcgcagaagacacagccctcgatctaggagtcaggagcgccgagatcgagagaaggagagagagcggcgacaaaagggtctcccccaggtgaagccggagacagcgtctgtgtgtagcactaccctgtgggttggccagcttgacaagaggacgacacagcaggacgtcgcaagcctgctggaagaattcggccccattgaaagcattaatatgatcccaccacgcggatgtgcctatattgtgatggttcaccgccaagatgcttatagagccctgcagaagctgtcccggggcaactataaggttaatcagaaatctataaagatcgcttgggcactgaataaggggataaaggcggattataagcagtactgggatgtggagctgggagtcacctatataccttgggacaaagtcaagcccgaagaactggaatcattctgcgaagggggcatgctggatagcgatactctcaacccagattggaaaggcatccccaaaaagccagagaatgaggtcgctcagaatggtggcgctgagacctcccatacagaacccgtctcccccatacctaagccactacctgtgccagttcctcctattccggtcccagcacccatcactgtgccgccacctcaggtgcctccacaccagccgggccccccggtggtaggcgccctccaacccccagcatttacacctccactgggtattccaccccctggcttcggccctggcgtgccgcctccacccccacccccacctttcctgaggccaggatttaatcctatgcacctccctcccggctttctcccacctgggccgcccccccctatcacgccaccagtttcaatccctccgccacatacccccccaatcagcatccctaacagcaccatcgcgggcatcaatgaagacactactaaggaccttagtattggaaacccgatccccactgtggtctccggggcaagggggaatgccgagagcggggactccgtcaaaatgtacggtagcgccgtgccccctgctgcccctacaaatctgccaaccccaccagttacacagccagtaagccttctggggactcagggcgtcgctcccggacccgtgataggacttcaggctcccagtacaggcctcctgggggctcgtcctggactgatcccactgcagcgcccccccggcatgcctcccccccatctccaacgctttccgcttatgccaccacggcccatgcccccccatatgatgcatcggggaccccccccggggcccggagggttcgctatgcccccccctcacggtatgaagggaccattccctcctcacgggcctttcgtgaggccaggaggaatgccggggctgggcgggcctggtcctggaccgggtgggcctgaggacagagacgggagacagcaaccaccccagcagccccagcagcagcctcagccacaagcgccacagcaaccccagcagcagcagcagcagcagccgcccccgagtcaacagccaccaccaactcagcagcagccacaacaattccggaacgacaaccgacagcagtttaacagcggtagagatcaagagcggttcggacgtcgctcattcggcaatcgagtcgagaatgacagggagcggtatggaaatcgtaacgacgacagagacaactccaaccgggacaggcgagagtggggacggcgctcccctgacagggacaggcaccgtgatctcgaggagaggaacaggagatcgtcaggacaccgcgaccgggaacgggactccagagatcgcgagtccaggagggagaaagaagaagcacggggaaaggaaaagcccgaggtaaccgaccgcgcaggggggaataagaccgttgaacccccgattagccaagtgggaaatgttgacaccgcttccgagctcgaaaagggcgtgagcgaagcagccgtgctaaaaccaagcgaggaactacctgcggaggccacctcttccgttgagccagagaaggactctggatcggctgctgaggcaccacgctag

SEQ ID NO: 58191 - DNA, 4224 bp, Artificial Sequence
  derived and/or modified sequence
agggtgccccgcgcggcgtggactcgggccgctgccgccatcccgctggagagagggagagagaggcccgcccgctcgccggccgggccagtgtgagccagtgcgtgagggcgcggggggccgtgtcagcgagacgcagagcgcagccgccaccaccaaacggacatgttgaagaccagcgctgccgccgcctccttttcctcatcctgcgaacgggactgagagggggcccgccacctctccgcctctgcctcggccgcccgcctcgccgcttcgggcgcagcctcttcctgcccgggcctcggactccgccgctcgtcgcctccccccggccaccaggcccggctggtttcccagccccgctccgccgcggcgcgaggtctatgtgaccggcgggcccggagcagccgccgccgcagcgcgaacatggacgccgtcaacgccttcaaccaggagctcttttcgcttatggatatgaaacctcccatctctagagccaagatgattctcatcactaaagctgctattaaagctattaagtgtaaaccagaatacaaggttccgggattatatgtaattgactcaattgtgcgacagtctcgtcatcagtttggaactgataaagatgtttttgggccaagattctctaaaaacataactgccacattccaatatttatatctttgtccatctgaagataagagtaaaatagttcgtgtgctgaacctttggcaaaaaaatggagtgttcaaaattgaaattattcaacctcttttggacatggcagcgggaaccagtaatgcagccccagtagcagaaaatgttaccaataatgaaggctcacctccacctccagtaaaagtttcttctgaacctcccacacaagccactccaaactccgtcccagctgtaccacagttgcccagctctgatgcttttgctgctgtggctcagctgtttcagacaactcaaggccaacagcttcagcagatccttcagacttttcaacagcctccaaaaccacagtctcctgcccttgacaatgctgtgatggctcaggttcaggctatcacagctcagttaaagacaactcctacacaaccatctgaacaaaaagctgctttccccccacctgaacagaaaactgcatttgacaagaagttgcttgatagatttgactatgatgatgagccagaagctgtggaagaatcaaagaaagaggataccactgccgtcaccacgacagcacctgctgccgcagtaccccctgcacccaccgccaccgtgcctgctgctgctgcacccgctgctgcctctcctcctcctccacaggcaccatttggctttcctggagatggcatgcagcagccagcatacacacagcatcaaaatatggatcagtttcagccacgaatgatgggaatacaacaggatccaatgcaccatcaggttccacttcctcctaatggacaaatgccaggatttggacttcttcctacacctccatttcctcccatggctcagcctgtgattcctccaactccaccagtgcagcagcctttccaagcttcttttcaggcacaaaatgaaccacttacacagaagccgcatcagcaggaaatggaagtagaacaaccttgtattcaagaggttaagcgacatatgtctgataacagaaagtcaagatctaggtcagcatccaggtcaccaaaaaggaggcgatctagatctggttctagatctcgaaggtctcggcatcgacgttctcgatctcggtccagggatagacgccgacattctccccgatctcgatctcaagaaagacgggatcgagaaaaagagagagaacgtcgacaaaaaggcctccctcaagtgaaaccggaaactgcaagtgtttgcagtactaccctctgggtggggcagctggacaaaagaactactcagcaggatgttgccagtctcttggaagagtttggtccaattgaatcaattaatatgattcctcccaggggttgtgcctatattgttatggttcataggcaagatgcctatcgtgccctgcagaaactgagccgaggaaactataaagtgaaccagaaatccataaagattgcctgggccttaaacaaaggaataaaggcagattataagcagtattgggatgtagaacttggtgttacttatattccatgggacaaagtcaagcctgaggaactggagagtttttgtgaaggaggaatgttggacagtgacacacttaacccagattggaaaggaattcctaagaagcctgaaaatgaagttgctcaaaatggaggtgctgaaacctcacacacagaaccagtatcacccatacctaaaccattacctgtgcctgtccctcctattcctgttcctgcacctataacagtgccacctccacaggtcccaccacatcaaccgggtccacctgtagttggtgctctccagccgcctgctttcacgcctcctctgggaataccgcctccaggctttggtcctggtgttcctcctccccctcctcctccaccatttttgcgcccaggattcaacccaatgcatttaccaccaggttttctgcctcctggacccccacctcctataactccaccagtatccattcctcctcctcacactccaccaataagcatcccaaactctactatcgctggtataaatgaagacactacaaaagacttatctattggaaatcccattccaacagtggtgtctggggctagaggaaacgccgagtctggtgacagcgtgaaaatgtatggctctgccgtgccacctgctgcacccacgaatctgcccacccctcctgtaacccagcctgtttcacttcttggcactcaaggagttgcccctggtcctgtaattggacttcaggcaccatctactggtcttcttggcgcccggcccggtctcatcccactccagcgccctccaggaatgcccccacctcacttacagcggttccctttgatgccgccccgtcccatgccaccgcacatgatgcacagaggcccaccgccaggaccagggggctttgcgatgcctccacctcatggaatgaaaggtcccttcccaccgcatggcccctttgttaggcctggtggaatgccagggctcgggggcccagggccaggcccagggggtcctgaagacagagacggaaggcaacagccgccgcagcagccacagcagcagccacagccgcaggcgccccagcaaccacagcagcagcagcagcagcagccaccaccatcacaacagcctccaccaacacagcagcagccacagcagtttagaaatgataacaggcagcagttcaattcaggtagagaccaagaaaggtttggaagaagatcttttggaaatagggtggaaaatgaccgggaacggtatgggaaccgtaatgatgatagagataatagtaaccgtgacaggagagagtggggaaggaggagccctgaccgggacaggcacagagacttggaagagagaaatagacgctctagtgggcatcgagacagagagagagattctagagatagagagtctcgtagagagaaggaagaagcccgaggaaaggaaaagcctgaggtgacagacagggcaggtggtaacaaaaccgttgaacctcccattagccaagtgggaaatgtagacactgcttcagaacttgagaagggggtgtctgaggctgcagtcctaaagccttctgaagagttacctgctgaggctacctcatccgttgaacccgaaaaggattctggctcagcagcagaggctcctcgttagagactggaatttgtgaaaatgtgacagtgacacttcctggagtgtagagcttgaggtgtacagatgctgtattatatccgctcccgctgtactgcagccccgcgccagctggtggggaactgtaagcaatttgattgcttcccttctatttaaaaatagccacaaaataacaaaaaatactgaaaatatgaataaatattaccctttttgctgtaactttttaaaagttttgactttaaaaagtttacaaatcgtaattagaagtgctctctatttttttttttttttttaatttaagacaaggtaacggtgaaagctcctcaaaacaatagggatgtttttaataaactctattttcgtaacaaactttaatgtgtgctattcttcctacactgcatt

SEQ ID NO: 58192 - DNA, 3399 bp, Artificial Sequence
  derived and/or modified sequence
atggacgcagtcaatgcctttaatcaagaactatttagcctgatggacatgaagccaccaatcagtagagctaaaatgatcctgataactaaggccgctattaaggctatcaaatgcaagcctgagtataaggtgcccggattgtatgtgattgacagtatcgtcaggcagagcagacaccagttcgggacagataaagatgtcttcggcccacgatttagcaaaaacattactgctacctttcagtacctctacctgtgcccgtctgaggacaagtctaaaatcgtgcgcgtcttaaacttgtggcagaaaaacggagtgtttaagattgagattattcaacccctcctggacatggcagcgggtaccagtaatgctgcaccagtggcggagaatgtcacaaacaacgagggatctccccctcctcccgtcaaagtgtcctctgagcccccaactcaggctacaccaaactcagtgcccgcagtcccacaattgccgagttctgatgcttttgccgctgtggcacagctttttcagaccacccagggacagcagctgcagcagattctgcagactttccagcagcctcctaaacctcagtcaccagcactggataatgcagtcatggcccaagtccaggctatcacggcccaattgaagacaacccctacccaaccgtccgaacagaaagcagcttttccccctcctgaacagaaaacagccttcgataaaaaactgcttgataggttcgattacgatgatgagccggaggcagtggaggagtctaagaaggaagacacaacagcagttactaccaccgctccagctgctgccgtgccccctgccccaaccgctactgtgcccgcagctgcagcgcctgccgctgccagtcccccaccacctcaggctccgtttggattccctggagacggcatgcagcagccagcgtatacacaacatcagaatatggatcagttccaacctagaatgatgggtattcaacaggacccaatgcaccatcaggtgccactgccaccaaatggccagatgcctggttttggcttgttgcccacaccacccttcccccctatggcccaaccagtcatcccgcctacacccccagtgcagcagccgttccaggcatcatttcaagcccagaatgaacctcttacccaaaagccgcaccaacaggaaatggaggtggagcaaccatgtattcaagaagttaagaggcatatgtccgacaaccgaaagtcccggagcaggtcagccagcagatcccccaaaagacggcgttccagaagtgggagccgctctcggagaagcaggcatcgtaggagccggtcgcgtagcagagaccggcgaaggcactcccccaggtcgcggtcacaggaacgcagggacagggaaaaggagcgcgagcgtcgtcagaaaggcttgcctcaggtcaagcctgaaacagcatcggtgtgtagcaccaccctctgggttggtcagcttgacaagcggaccactcaacaagatgtcgcgtctcttctggaagaatttggacctattgagtctatcaacatgatccctcccagggggtgcgcctatatcgtgatggttcatcgccaagacgcgtacagggccctgcagaaactgagtagaggcaactataaagtgaaccagaagagtattaagattgcttgggccctgaacaaaggcattaaagccgattacaagcagtattgggatgtagaactcggggtgacgtatatcccatgggataaagttaaacctgaggagctggagagcttctgcgaggggggtatgttggactctgacactcttaaccccgactggaagggcattccgaagaagcctgagaatgaagtggcgcagaatggaggcgcagaaacttcacacactgagcccgtgagcccaattcctaagcctttacctgttccggtgccacccattcctgtgcctgctcccatcacagtgcctcccccacaggtgccccctcaccagccaggtccacctgttgtgggggcactgcagccgcctgcttttaccccaccactcggtatcccccctccaggctttggtccaggcgtgccgcctccgcctccaccgcctcccttccttcggcctgggtttaaccctatgcatctgccgcctggtttccttccccctgggcctccccctcccatcacccctcccgtgagcatacctcctccccatacccccccaatttccataccgaacagtaccatagccggtataaacgaggacacaaccaaggatctgtccatcggcaatccaattcctacggtggtctcaggggcacggggaaacgcagaatcaggcgactccgtgaagatgtacggctcagccgtcccacctgcagcaccgaccaacctcccaaccccccctgtcacgcagccagtgagtctactaggaacccagggggtagctccgggtcctgtgatcggtttacaggctccctccaccggtcttctcggcgctcggccaggtctaatccctctgcaacgacctcctgggatgcctcccccacacctacagaggtttcccctgatgccccctaggcccatgccccctcacatgatgcatcggggaccaccacctggacccggaggattcgccatgcctccccctcatggaatgaagggaccctttcctccacatggaccgtttgtgcgaccagggggaatgcccggtcttggcggtcccggaccgggacccggtgggcctgaggaccgagatgggagacagcagccaccacagcagcctcagcagcagccccagccgcaagctccacagcagccacagcagcagcagcagcagcaaccaccaccctctcagcagccccctcctacccagcagcagccccagcaatttcgtaacgacaaccgacagcagttcaatagcgggagggatcaggagcggttcgggcgacgatcgtttggcaatcgcgtggaaaacgaccgcgaacggtatgggaatcgaaatgacgacagagacaatagcaacagagatcggcgtgagtggggcagaagatcccctgatagagaccgtcatcgagacctcgaggagcgaaatagacgatcatcaggccacagggaccgagaacgagattcgagggaccgagaatcccgacgggaaaaggaagaggctagaggaaaggaaaaacctgaggttacagacagggccggaggaaacaagaccgtggagccgccaatttcccaagtggggaatgtggacaccgcctccgagctggagaaaggcgtttccgaagccgcagttctgaaaccatctgaggaactgcccgcagaagccacttcatccgttgagccggagaaagattccgggtccgcagccgaggcgcctcgttag

SEQ ID NO: 58193 - DNA, 3399 bp, Artificial Sequence
  derived and/or modified sequence
atggacgccgtgaacgccttcaaccaggagctgttcagcctgatggacatgaagccccccatcagcagagccaagatgatcctgatcaccaaggccgccatcaaggccatcaagtgcaagcccgagtacaaggtgcccggcctgtacgtgatcgacagcatcgtgagacagagcagacaccagttcggcaccgacaaggacgtgttcggccccagattcagcaagaacatcaccgccaccttccagtacctgtacctgtgccccagcgaggacaagagcaagatcgtgagagtgctgaacctgtggcagaagaacggcgtgttcaagatcgagatcatccagcccctgctggacatggccgccggcaccagcaacgccgcccccgtggccgagaacgtgaccaacaacgagggcagcccccccccccccgtgaaggtgagcagcgagccccccacccaggccacccccaacagcgtgcccgccgtgccccagctgcccagcagcgacgccttcgccgccgtggcccagctgttccagaccacccagggccagcagctgcagcagatcctgcagaccttccagcagccccccaagccccagagccccgccctggacaacgccgtgatggcccaggtgcaggccatcaccgcccagctgaagaccacccccacccagcccagcgagcagaaggccgccttccccccccccgagcagaagaccgccttcgacaagaagctgctggacagattcgactacgacgacgagcccgaggccgtggaggagagcaagaaggaggacaccaccgccgtgaccaccaccgcccccgccgccgccgtgccccccgcccccaccgccaccgtgcccgccgccgccgcccccgccgccgccagccccccccccccccaggcccccttcggcttccccggcgacggcatgcagcagcccgcctacacccagcaccagaacatggaccagttccagcccagaatgatgggcatccagcaggaccccatgcaccaccaggtgcccctgccccccaacggccagatgcccggcttcggcctgctgcccaccccccccttcccccccatggcccagcccgtgatcccccccaccccccccgtgcagcagcccttccaggccagcttccaggcccagaacgagcccctgacccagaagccccaccagcaggagatggaggtggagcagccctgcatccaggaggtgaagagacacatgagcgacaacagaaagagcagaagcagaagcgccagcagaagccccaagagaagaagaagcagaagcggcagcagaagcagaagaagcagacacagaagaagcagaagcagaagcagagacagaagaagacacagccccagaagcagaagccaggagagaagagacagagagaaggagagagagagaagacagaagggcctgccccaggtgaagcccgagaccgccagcgtgtgcagcaccaccctgtgggtgggccagctggacaagagaaccacccagcaggacgtggccagcctgctggaggagttcggccccatcgagagcatcaacatgatcccccccagaggctgcgcctacatcgtgatggtgcacagacaggacgcctacagagccctgcagaagctgagcagaggcaactacaaggtgaaccagaagagcatcaagatcgcctgggccctgaacaagggcatcaaggccgactacaagcagtactgggacgtggagctgggcgtgacctacatcccctgggacaaggtgaagcccgaggagctggagagcttctgcgagggcggcatgctggacagcgacaccctgaaccccgactggaagggcatccccaagaagcccgagaacgaggtggcccagaacggcggcgccgagaccagccacaccgagcccgtgagccccatccccaagcccctgcccgtgcccgtgccccccatccccgtgcccgcccccatcaccgtgccccccccccaggtgcccccccaccagcccggcccccccgtggtgggcgccctgcagccccccgccttcaccccccccctgggcatccccccccccggcttcggccccggcgtgccccccccccccccccccccccccttcctgagacccggcttcaaccccatgcacctgccccccggcttcctgccccccggcccccccccccccatcaccccccccgtgagcatcccccccccccacaccccccccatcagcatccccaacagcaccatcgccggcatcaacgaggacaccaccaaggacctgagcatcggcaaccccatccccaccgtggtgagcggcgccagaggcaacgccgagagcggcgacagcgtgaagatgtacggcagcgccgtgccccccgccgcccccaccaacctgcccaccccccccgtgacccagcccgtgagcctgctgggcacccagggcgtggcccccggccccgtgatcggcctgcaggcccccagcaccggcctgctgggcgccagacccggcctgatccccctgcagagaccccccggcatgccccccccccacctgcagagattccccctgatgccccccagacccatgcccccccacatgatgcacagaggccccccccccggccccggcggcttcgccatgccccccccccacggcatgaagggccccttccccccccacggccccttcgtgagacccggcggcatgcccggcctgggcggccccggccccggccccggcggccccgaggacagagacggcagacagcagcccccccagcagccccagcagcagccccagccccaggccccccagcagccccagcagcagcagcagcagcagcccccccccagccagcagcccccccccacccagcagcagccccagcagttcagaaacgacaacagacagcagttcaacagcggcagagaccaggagagattcggcagaagaagcttcggcaacagagtggagaacgacagagagagatacggcaacagaaacgacgacagagacaacagcaacagagacagaagagagtggggcagaagaagccccgacagagacagacacagagacctggaggagagaaacagaagaagcagcggccacagagacagagagagagacagcagagacagagagagcagaagagagaaggaggaggccagaggcaaggagaagcccgaggtgaccgacagagccggcggcaacaagaccgtggagccccccatcagccaggtgggcaacgtggacaccgccagcgagctggagaagggcgtgagcgaggccgccgtgctgaagcccagcgaggagctgcccgccgaggccaccagcagcgtggagcccgagaaggacagcggcagcgccgccgaggcccccagatag

SEQ ID NO: 58194 - protein, 1125 aa, Artificial Sequence
  derived and/or modified sequence
MDAVNAFNQELFSLMDMKPPISRAKMILITKAAIKAIKLYKHVVQIVEKFIKKCKPEYKVPGLYVIDSIVRQSRHQFGTDKDVFGPRFSKNITATFQYLYLCPSEDKSKIVRVLNLWQKNGVFKIEIIQPLLDMAAGTSNAAPVAENVTNNEGSPPPPVKVSSEPPTQATPNSVPAVPQLPSSDAFAAVAQLFQTTQGQQLQQILQTFQQPPKPQSPALDNAVMAQVQAITAQLKTTPTQPSEQKAAFPPPEQKTAFDKKLLDRFDYDDEPEAVEESKKEDTTAVTTTAPAAAVPPAPTATVPAAAAPAAASPPPPQAPFGFPGDGMQQPAYTQHQNMDQFQPRMMGIQQDPMHHQVPLPPNGQMPGFGLLPTPPFPPMAQPVIPPTPPVQQPFQASFQAQNEPLTQKPHQQEMEVEQPCIQEVKRHMSDNRKSRSRSASRSPKRRRSRSGSRSRRSRHRRSRSRSRDRRRHSPRSRSQERRDREKERERRQKGLPQVKPETASVCSTTLWVGQLDKRTTQQDVASLLEEFGPIESINMIPPRGCAYIVMVHRQDAYRALQKLSRGNYKVNQKSIKIAWALNKGIKADYKQYWDVELGVTYIPWDKVKPEELESFCEGGMLDSDTLNPDWKGIPKKPENEVAQNGGAETSHTEPVSPIPKPLPVPVPPIPVPAPITVPPPQVPPHQPGPPVVGALQPPAFTPPLGIPPPGFGPGVPPPPPPPPFLRPGFNPMHLPPGFLPPGPPPPITPPVSIPPPHTPPISIPNLVSGARGNAESGDSVKMYGSAVPPAAPTNLPTPPVTQPVSLLGTQGVAPGPVIGLQAPSTGLLGARPGLIPLQRPPGMPPPHLQRFPLMPPRPMPPHMMHRGPPPGPGGFAMPPPHGMKGPFPPHGPFVRPGGMPGLGGPGPGPGGPEDRDGRQQPPQQPQQQPQPQAPQQPQQQQQQQPPPSQQPPPTQQQPQQFRNDNRQQFNSGRDQERFGRRSFGNRVENDRERYGNRNDDRDNSNRDRREWGRRSPDRDRHRDLEERNRRSSGHRDRERDSRDRESRREKEEARGKEKPEVTDRAGGNKTVEPPISQVGNVDTASELEKGVSEAAVLKPSEELPAEATSSVEPEKDSGSAAEAPR

SEQ ID NO: 58195 - DNA, 3444 bp, Artificial Sequence
  derived and/or modified sequence
atggacgctgtgaacgcgttcaaccaggagttgttctctcttatggacatgaagccacctattagccgggctaagatgatcttgattacaaaggctgcaattaaggccattaaattgtataagcacgtcgtccagatcgtggagaagtttattaagaagtgcaagccggaatacaaggtccctggcctctatgttatcgattccatagtacggcagtcacgacaccaattcggcactgataaggacgtcttcggcccgaggtttagcaaaaacatcaccgccaccttccagtacctgtacctttgtcctagcgaggataagtcgaagatcgtccgggtgctgaacctgtggcagaagaacggggtgttcaaaattgagatcattcagcccctgctagatatggccgcaggaacttccaacgctgcccctgttgctgagaacgtcacaaacaatgaaggatcgcctccgccccctgtgaaggtaagctctgaaccaccaacccaggcaacccctaactctgttccagcggtcccccaactgccctcatcagacgcatttgctgctgtggcacagttgttccagactacccaggggcagcaactgcagcaaatcctacagacatttcagcagccgccaaaaccacagtccccagctctggacaatgcagttatggctcaagtccaggccatcaccgctcaattaaagaccactccgacgcagcccagcgaacagaaagcggcgttccccccacctgagcagaaaacggctttcgataaaaagctccttgaccgcttcgattacgacgacgaaccggaggccgttgaagaaagcaagaaggaagacactactgcagttactaccaccgcccccgccgccgctgtccctcctgctcccactgccacagtgcccgcagcagccgctccagctgcggcatctcccccaccgcctcaggcccctttcggattccccggcgacggaatgcagcagcctgcttacacacagcaccagaacatggaccagttccagcctcgcatgatgggcatccagcaggatcccatgcaccaccaggtgccattgccacctaatggacaaatgcccggctttgggctgctccccaccccaccatttcctcctatggctcaaccggtgatcccacccaccccgccagtacagcagcccttccaggccagcttccaggctcaaaatgagccattgacgcagaaaccccatcaacaggagatggaagtggagcaaccctgcattcaggaagtgaaaaggcacatgtctgacaacagaaaaagcagatctcgcagcgcctcccgcagtcccaagcggcgaagaagtcggagtggaagtagatccaggcgctctaggcaccgtagatcaagaagtcggtctagagaccggagacgacacagtccacgtagcaggtctcaggagagaagggacagagagaaggaacgcgagaggcggcagaaaggactgccccaagtaaagcccgagacagcaagcgtttgtagtaccacgctttgggtcggccaactggataaaagaactacacagcaggatgttgcttcattgctagaggagtttggacccattgagagcattaatatgatccctccccggggatgtgcgtacattgtgatggtgcacaggcaagatgcataccgggcgttgcagaagttgagcaggggaaactacaaagtgaatcaaaagagcattaagatcgcttgggcactcaataaaggtattaaggcagactataaacagtattgggacgtcgaacttggggtcacctatatcccctgggataaagtgaagcccgaagagctggaatctttctgcgagggcggaatgttagattccgacaccctcaatcccgattggaaagggattcctaagaagcctgaaaatgaagtggcccaaaatggaggggcagagacgtctcacactgaacctgtgtcacctatccctaagcccttacctgtcccagtcccccctattcccgtgcctgccccaattacggtgcctccgccccaggtccctccccatcaaccaggtccccctgtggtgggcgccctacagccacccgccttcactccgccattgggcatccctcctccaggctttggtcctggcgtccctccacctcccccccctccccccttccttcggcccggcttcaaccccatgcacctgccaccggggtttctgcctccgggcccaccgcccccgataaccccccctgtatccatacctcccccacataccccacctattagcatcccaaattcaacaatcgccgggatcaatgaggataccaccaaggacttgtccatcggaaaccccatcccgactgtcgttagcggtgcacggggaaacgcagaaagtggtgatagcgtcaagatgtacggttccgccgtgccccccgcagcccccaccaatctgcctacccctcctgtaacacagccagtgagtctactggggacccagggcgttgccccaggcccggttatcgggctgcaggcaccgtccactggactgcttggcgccaggccgggactcatacccctacagagacctcctggaatgccacctcctcacctgcagaggttcccactaatgccacctcgccctatgcccccacacatgatgcatcgggggccaccacccgggcccgggggcttcgcaatgcctcctccccacgggatgaagggcccttttcccccccacggacccttcgttagaccaggcggaatgcctggactgggcggccccggacctgggccgggcggtcccgaggaccgcgacggcaggcagcaaccaccacagcagccgcagcagcagcctcagccacaggccccgcagcagccccagcagcagcagcaacagcaacctccgcctagccagcagcctcctcccacacagcagcagccgcagcaattccgcaatgacaacagacagcagtttaactctgggagagaccaagagcgatttggtagacggagcttcggcaatagagtggagaatgacagagagcgctatgggaacagaaatgacgacagagataacagcaatagagaccgacgagagtgggggcggagatctcctgacagggaccgacatcgcgatctggaggaaaggaaccgcaggagctctgggcatcgggaccgggagagagacagccgtgaccgcgagagtaggcgtgagaaggaggaggctagaggcaaagagaaaccagaagttaccgaccgggcggggggaaacaagacagttgaacctcccattagtcaggtaggcaatgtcgataccgcttccgaattggaaaaaggggtgtctgaggcagcagttctgaaaccctcggaagagcttccagccgaagcgaccagctcagtggagccggagaaggactccgggagtgccgccgaagctccacgctag

SEQ ID NO: 58196 - DNA, 3378 bp, Artificial Sequence
  derived and/or modified sequence
atggacgccgtcaatgcgtttaaccaggagctctttagtctcatggacatgaaaccacctattagtcgggccaaaatgatcctgatcactaaagcagcaatcaaggcgattaagttgtataaacacgtggtgcagatagtagagaagttcattaaaaaatgtaaaccagaatacaaagtccctgggctgtacgtgatcgatagcatcgtccgccagtcccggcatcaattcggcactgataaggatgtttttgggcccaggttttcaaaaaacataactgcaacgttccagtatctgtacctgtgcccctctgaggacaaatctaaaatcgtaagggtcctaaacttgtggcaaaaaaatggtgtttttaagatcgagatcatccagcctctgctggacatggctgcaggcacatcgaatgcagccccagtcgccgagaacgtcaccaataatgagggtagccctcctcctcctgtgaaggtgagcagcgaaccgcccacccaggccacccctaactctgtgcctgccgtgccacaacttccctcttccgacgcgtttgctgctgttgcacagctgtttcagaccacacagggccagcagttgcagcagattttacagacgtttcagcagccacctaagcctcagtcaccagccctggacaacgccgtcatggcccaagttcaagctatcaccgcccagctgaaaacaaccccaacacagccgtctgaacagaaggcagccttccctccacccgaacagaaaactgcttttgataagaagctgctagatagattcgactatgatgatgagcccgaagctgtcgaggagtctaaaaaagaggatacaaccgctgtcacgacaacagctccggccgccgcagttcctcctgctccaacagccacagttcctgccgccgctgcgccagcagcagcttcccccccccccccacaggctccattcggcttcccaggcgatggcatgcagcaacctgcttatacccagcatcaaaatatggatcaatttcaacccagaatgatgggcatccagcaggacccaatgcatcatcaagtgcctctaccccctaacgggcagatgcctgggtttggactgctgcccactccaccattcccacccatggcccagcctgtcattccaccaacgcctccagtgcagcaaccatttcaggccagctttcaagcacagaatgagcctcttacgcagaagcctcaccagcaggagatggaagtggagcagccttgcatacaggaagtgaagagacacatgtccgataaccgaaagtcacggagccggtcagcttctaggtcccccaaaagaaggcgatcgcggagcggatccagaagccggcggtccagacaccgaaggagcaggagtcgctctcgtgaccgacgccgccactcaccgaggtcccggagtcaggaaaggcgagatcgcgaaaaagagagggagcgtcggcagaaaggtctccctcaggtgaaaccggaaacggcgtctgtgtgttcgaccactctttgggtcggacaacttgacaagcggaccactcagcaggacgttgcctcattgctggaagagtttgggcccattgaaagtattaacatgatccctccccgcggatgcgcttacatcgtcatggtccatcggcaggatgcctaccgcgcccttcagaagttatctcgtggtaattacaaagttaatcaaaaatctattaagattgcctgggccctgaacaaaggcatcaaggctgactacaagcagtattgggatgtcgagctcggagttacgtacatcccctgggataaagtgaagcccgaggagttggaatccttctgtgaaggcggaatgctagactcagacaccctgaatcctgattggaaaggcatcccaaaaaagcctgaaaatgaggtggcccaaaacgggggcgccgaaaccagtcacactgaaccagtgagccctatcccaaagccgctgccggtgcctgtgccacccatcccggtacccgcgcccattactgtcccccccccacaggtgcctccccatcaaccaggccccccggttgtgggtgccctgcaacctcctgcctttacgcctccactaggtattccgccccctggcttcggacctggcgttcctcccccaccccccccaccccccttcttgcggcctgggttcaaccccatgcacctccctcccggttttctaccacccgggccccccccacctataacgccccccgtctccatcccccctccccacaccccgccaatcagtataccaaatctcgtgagcggggcccgtggaaacgctgagtctggggattcagtaaaaatgtacggctcagccgtgccaccagccgctcctacgaacttgcctactccaccggtgacccagccggtgtctttgctgggcacccagggagtcgcaccaggccccgtgatagggctgcaggcaccaagtaccggcctgctgggcgcgcggcctgggttgatccctctgcaacggccacccgggatgcctcctccccacctccaaagattccccttgatgcccccgcgacccatgccccctcatatgatgcacagggggcctccccctggacccggcgggttcgcaatgcccccccctcacggtatgaagggtccatttccaccacacggtcccttcgtgcgacccgggggcatgcccggcctaggcgggccagggcctggtccaggcgggcctgaggatcgtgacggacgacaacagcccccccaacagcctcagcagcagccacaacctcaggcaccacaacagccacagcagcagcagcagcagcagccccccccctctcagcagcctcctcccacccagcaacagcctcagcaattccggaatgacaatagacaacagttcaattccggccgggatcaggaaaggttcggaaggcgctcctttggaaatcgtgtggagaacgatagagagcgatacgggaacaggaatgatgatagggataatagtaatagggatcggagagaatggggtcgccgcagccccgacagagatcgacatagggatttggaagagcgcaatcggcggtccagtggccatcgcgatcgcgagagggacagtagggaccgcgagtctcggcgtgagaaagaagaggctagagggaaagagaaacccgaagtgacagaccgggctggcggcaataaaactgttgaacctcctatctcacaggtgggaaatgtggacaccgcctctgaactcgagaaaggcgtctccgaggcagccgtcttgaaacctagcgaagaactgcccgcagaggcaactagtagcgtggagcccgagaaggactccggaagcgcggctgaagccccccgctag

SEQ ID NO: 58197 - DNA, 3444 bp, Artificial Sequence
  derived and/or modified sequence
atggatgctgtgaatgccttcaaccaggagctgttcagcctgatggacatgaagccacccatcagccgggccaagatgatcctgatcaccaaggccgccatcaaggccatcaagctgtacaagcacgtggtgcagatcgtggagaagttcatcaagaagtgcaagccagagtacaaggtgcccggcctgtatgtgattgacagcatcgtgcggcagagccgccaccagtttggaacagacaaggatgtgtttggcccccgcttcagcaagaacatcacagccaccttccagtacctgtacctgtgccccagcgaggacaagagcaagatcgtgcgggtgctgaacctgtggcagaagaatggagtcttcaagattgagatcatccagcccctgctggacatggccgccggcaccagcaatgctgcccctgtggccgagaatgtgaccaacaatgaaggcagccccccacctcctgtgaaggtgtcctctgagccccccacccaggccacccccaacagcgtgcctgctgtgccccagctgcccagcagtgatgcctttgctgctgtggcccagctgttccagaccacccagggccagcagctgcagcagatcctgcagaccttccagcagccccccaagccccagagccctgccctggacaatgctgtgatggcccaggtgcaggccatcacagcccagctgaagaccacccccacccagcccagcgagcagaaggccgccttccccccacctgagcagaagacagcctttgacaagaagctgctggacagatttgattatgatgatgagcctgaggccgtggaggagagcaagaaggaggacaccacagctgtgaccaccacagccccagctgctgctgtgcccccagcccccacagccaccgtgcctgctgctgctgccccagctgctgccagccccccaccaccccaggcccccttcggcttccctggagatggcatgcagcagcctgcctacacccagcaccagaacatggaccagttccagcccaggatgatgggcatccagcaggaccccatgcaccaccaggtgcccctgccccccaacggccagatgcctggcttcggcctgctgcccaccccacccttcccccccatggcccagcccgtcatcccccccaccccacctgtgcagcagcccttccaggccagcttccaggcccagaatgagcccctgacccagaagccccaccagcaggagatggaggtggagcagccctgcatccaggaggtgaagaggcacatgtctgacaacaggaagagccgcagccgcagcgccagccgcagccccaagagaagaagaagccgcagcggcagccgcagcagaagaagccgccaccggcgcagccgcagccgcagccgggacagaagaagacacagccccaggagccgcagccaggagcggcgggaccgggagaaggagcgggagcggcggcagaagggcctgccccaggtgaagccagagacagcctctgtgtgcagcaccaccctgtgggtgggccagctggacaagaggaccacccagcaggatgtggccagcctgctggaggagtttggccccatcgagagcatcaacatgatccccccccggggctgtgcctacatcgtgatggtgcaccggcaggatgcctaccgggccctgcagaagctgagccggggcaactacaaggtgaaccagaagagcatcaagatcgcctgggccctgaacaagggcatcaaggctgactacaagcagtactgggatgtggagctgggcgtgacctacatcccctgggacaaggtgaagccagaggagctggagagcttctgtgagggcggcatgctggacagcgacaccctgaacccagactggaagggcatccccaagaagccagaaaatgaggtggcccagaatggaggagctgagaccagccacacagagcctgtgagccccatccccaagcccctgcctgtgcctgtgccccccatccctgtgcctgcccccatcaccgtgcccccaccccaggtgcccccccaccagcccggcccccctgtggtgggcgccctgcagcccccagccttcaccccacccctgggcatccccccacctggctttggacctggggtgcccccacctcctcctcctccacccttcctgcggcccggcttcaaccccatgcacctgcccccaggcttcctgcccccaggccccccaccacccatcaccccacctgtgtccatccccccaccccacaccccacccatcagcatccccaacagcaccatcgccggcatcaatgaagacaccaccaaggacctgagcatcggcaaccccatccccaccgtggtgtctggggcccggggaaatgctgagagcggggacagcgtgaagatgtatggcagcgctgtgcccccagctgcccccaccaacctgcccaccccacctgtgacccagcctgtgtccctgctgggcacccagggcgtggcccctggccctgtgattggcctgcaggcccccagcacaggcctgctgggcgcccggcccggcctcatccccctgcagaggcctcctggcatgcccccaccccacctgcagcgcttccccctgatgccaccccggcccatgccaccccacatgatgcaccggggccccccacctggccctgggggctttgccatgcctcctcctcatggcatgaagggccccttccccccccacggcccctttgtgcggcctgggggcatgcctggcctgggcggccctggccctggccctgggggcccagaagatagagatggccggcagcagcccccccagcagccccagcagcagccccagccccaggccccccagcagccccagcagcagcagcagcagcagcccccacccagccagcagcccccacccacccagcagcagccccagcagttcagaaatgacaaccggcagcagttcaacagcggccgggaccaggagcgcttcggccgccgcagctttggaaacagagtggagaatgaccgggagagatatggcaacagaaatgatgaccgggacaacagcaacagagaccggcgggagtggggcagaagaagcccagaccgggacagacaccgggacctggaggagaggaacagaagaagcagcggccaccgggaccgggagcgggacagccgggaccgggagagcagaagagagaaggaggaggcccggggcaaggagaagccagaggtgacagacagagctgggggcaacaagacagtggagccccccatcagccaggtgggcaatgtggacacagccagcgagctggagaagggcgtgtctgaggccgctgtgctgaagcccagcgaggagctgcctgctgaggccaccagctctgtggagcctgagaaggacagcggcagcgctgctgaggcccccaggtag

SEQ ID NO: 58198 - DNA, 3378 bp, Artificial Sequence
  derived and/or modified sequence
atggatgctgtgaatgccttcaaccaggagctgttcagcctgatggacatgaagccacccatcagccgggccaagatgatcctgatcaccaaggccgccatcaaggccatcaagctgtacaagcacgtggtgcagatcgtggagaagttcatcaagaagtgcaagccagagtacaaggtgcccggcctgtatgtgattgacagcatcgtgcggcagagccgccaccagtttggaacagacaaggatgtgtttggcccccgcttcagcaagaacatcacagccaccttccagtacctgtacctgtgccccagcgaggacaagagcaagatcgtgcgggtgctgaacctgtggcagaagaatggagtcttcaagattgagatcatccagcccctgctggacatggccgccggcaccagcaatgctgcccctgtggccgagaatgtgaccaacaatgaaggcagccccccacctcctgtgaaggtgtcctctgagccccccacccaggccacccccaacagcgtgcctgctgtgccccagctgcccagcagtgatgcctttgctgctgtggcccagctgttccagaccacccagggccagcagctgcagcagatcctgcagaccttccagcagccccccaagccccagagccctgccctggacaatgctgtgatggcccaggtgcaggccatcacagcccagctgaagaccacccccacccagcccagcgagcagaaggccgccttccccccacctgagcagaagacagcctttgacaagaagctgctggacagatttgattatgatgatgagcctgaggccgtggaggagagcaagaaggaggacaccacagctgtgaccaccacagccccagctgctgctgtgcccccagcccccacagccaccgtgcctgctgctgctgccccagctgctgccagccccccaccaccccaggcccccttcggcttccctggagatggcatgcagcagcctgcctacacccagcaccagaacatggaccagttccagcccaggatgatgggcatccagcaggaccccatgcaccaccaggtgcccctgccccccaacggccagatgcctggcttcggcctgctgcccaccccacccttcccccccatggcccagcccgtcatcccccccaccccacctgtgcagcagcccttccaggccagcttccaggcccagaatgagcccctgacccagaagccccaccagcaggagatggaggtggagcagccctgcatccaggaggtgaagaggcacatgtctgacaacaggaagagccgcagccgcagcgccagccgcagccccaagagaagaagaagccgcagcggcagccgcagcagaagaagccgccaccggcgcagccgcagccgcagccgggacagaagaagacacagccccaggagccgcagccaggagcggcgggaccgggagaaggagcgggagcggcggcagaagggcctgccccaggtgaagccagagacagcctctgtgtgcagcaccaccctgtgggtgggccagctggacaagaggaccacccagcaggatgtggccagcctgctggaggagtttggccccatcgagagcatcaacatgatccccccccggggctgtgcctacatcgtgatggtgcaccggcaggatgcctaccgggccctgcagaagctgagccggggcaactacaaggtgaaccagaagagcatcaagatcgcctgggccctgaacaagggcatcaaggctgactacaagcagtactgggatgtggagctgggcgtgacctacatcccctgggacaaggtgaagccagaggagctggagagcttctgtgagggcggcatgctggacagcgacaccctgaacccagactggaagggcatccccaagaagccagaaaatgaggtggcccagaatggaggagctgagaccagccacacagagcctgtgagccccatccccaagcccctgcctgtgcctgtgccccccatccctgtgcctgcccccatcaccgtgcccccaccccaggtgcccccccaccagcccggcccccctgtggtgggcgccctgcagcccccagccttcaccccacccctgggcatccccccacctggctttggacctggggtgcccccacctcctcctcctccacccttcctgcggcccggcttcaaccccatgcacctgcccccaggcttcctgcccccaggccccccaccacccatcaccccacctgtgtccatccccccaccccacaccccacccatcagcatccccaacctggtgtctggggcccggggaaatgctgagagcggggacagcgtgaagatgtatggcagcgctgtgcccccagctgcccccaccaacctgcccaccccacctgtgacccagcctgtgtccctgctgggcacccagggcgtggcccctggccctgtgattggcctgcaggcccccagcacaggcctgctgggcgcccggcccggcctcatccccctgcagaggcctcctggcatgcccccaccccacctgcagcgcttccccctgatgccaccccggcccatgccaccccacatgatgcaccggggccccccacctggccctgggggctttgccatgcctcctcctcatggcatgaagggccccttccccccccacggcccctttgtgcggcctgggggcatgcctggcctgggcggccctggccctggccctgggggcccagaagatagagatggccggcagcagcccccccagcagccccagcagcagccccagccccaggccccccagcagccccagcagcagcagcagcagcagcccccacccagccagcagcccccacccacccagcagcagccccagcagttcagaaatgacaaccggcagcagttcaacagcggccgggaccaggagcgcttcggccgccgcagctttggaaacagagtggagaatgaccgggagagatatggcaacagaaatgatgaccgggacaacagcaacagagaccggcgggagtggggcagaagaagcccagaccgggacagacaccgggacctggaggagaggaacagaagaagcagcggccaccgggaccgggagcgggacagccgggaccgggagagcagaagagagaaggaggaggcccggggcaaggagaagccagaggtgacagacagagctgggggcaacaagacagtggagccccccatcagccaggtgggcaatgtggacacagccagcgagctggagaagggcgtgtctgaggccgctgtgctgaagcccagcgaggagctgcctgctgaggccaccagctctgtggagcctgagaaggacagcggcagcgctgctgaggcccccaggtag

SEQ ID NO: 58199 - DNA, 3444 bp, Artificial Sequence
  derived and/or modified sequence
atggacgccgtgaacgccttcaaccaggagctgttcagcctgatggatatgaaaccacccatttcccgggccaaaatgattttgataactaaggcagcaattaaagccatcaaactatacaaacacgtggtgcaaatcgtggaaaaattcattaaaaaatgcaaacccgaatacaaggtgcccggtctatacgtgattgattccattgtgcgccagagcaggcaccagttcggaacggacaaggatgtattcggtcctcgattttctaagaatatcactgccacctttcagtacttgtacctctgcccctccgaggacaagtctaaaattgtccgggtgctgaacctctggcaaaagaacggcgtattcaagattgagattattcagccgttactggacatggccgcaggcacctcaaatgctgctccagtagccgaaaatgtgaccaataacgaggggtcccccccgccacccgtgaaagtgagcagtgagcccccgacccaagcgactccgaattcagtccctgctgtcccacagctcccctcaagtgatgcttttgctgcagttgctcagttgtttcagaccactcagggtcaacagctgcagcagatcctccagacattccagcaaccccccaagccgcagtcccccgccctggacaacgctgtcatggctcaggtccaagccatcaccgcacaactcaaaactacaccgacacagccctccgaacagaaggcagcctttcccccgccagagcaaaagactgcattcgacaagaagctgttagaccgatttgattatgacgacgagcccgaagccgtggaggagagcaaaaaggaagatactacagctgttactactaccgctcccgctgccgctgtaccccctgcccctaccgccactgtgccggcagccgctgcacctgccgctgcatctcctccacccccacaggctccatttgggttccccggcgatggcatgcagcagccagcctatacccagcaccagaacatggatcagttccaacctagaatgatgggcattcagcaggacccaatgcaccatcaggttcctcttccccctaatggtcagatgccaggattcggactcctcccaacccctcctttccctcctatggcccaacctgtgattcctccaactccccccgtgcaacagcctttccaggcctcttttcaggctcaaaacgaaccgttgactcaaaaaccccatcaacaggaaatggaggtcgagcagccatgcatccaggaggtgaagaggcatatgtctgataatagaaagagccggagccgtagcgcctcaaggagtcctaaacggaggagaagtcgctctgggtcccggtctagaagatctcggcacagaagatctagatcccgttcacgggaccggcggagacactctccgcgatcaagatcgcaagagagacgcgatcgggagaaggaacgggaacgccggcagaaaggcctgccccaggtgaaacccgagaccgcatctgtttgttccactacactatgggtgggccagcttgacaagcgcacaactcagcaggacgtggccagccttttagaggaattcgggcctattgagtcaatcaatatgattcctcctagaggctgtgcatacattgtcatggtgcatcggcaggatgcatatagagctcttcaaaagctctctcgaggcaactacaaggtaaatcagaaatccataaaaatcgcctgggccctaaacaagggaataaaagctgactacaagcagtattgggacgtggagctgggtgtcacctatatcccatgggacaaagtgaagccggaagaactggaaagcttttgtgagggaggcatgctggattctgatactctgaatcctgactggaagggtatccctaagaaaccagagaacgaagtggcacagaacggcggggccgaaactagccacaccgagcccgtaagccccatccccaagcccttgcctgtgcccgtgcctccgatcccagtgcccgcgcctatcaccgtgccacccccccaagtcccccctcaccagccaggccccccagtggtgggcgccttgcagccaccagccttcacaccacctctgggaatccctccccccggcttcggtcccggtgtgccacccccccccccacctcctcccttccttcgcccgggcttcaaccctatgcatttgccaccaggctttctgccacccggccctccacctcctatcacgcccccagtcagtataccgcctccacatacaccaccaatcagcattcccaacagcactatagctggaatcaatgaggacacgactaaggatttaagtattgggaatccaatccctacagtcgttagtggagcacgggggaatgcagaaagcggtgatagcgtgaaaatgtacggcagcgcggtgccaccggccgcgccaaccaacctgcccactccgccggtcacacagcccgtgagtctcctgggtacccagggggtggcccctggacccgtcatcggcctgcaggctccatcgaccggcttgctaggcgcccggccaggccttataccacttcaacggccacctggcatgcccccacctcacctgcagcggtttccactcatgcctcctaggcccatgccgcctcacatgatgcatcgggggccccccccgggccccggagggttcgctatgcctccgccccacggcatgaaggggccgttccccccccacgggcctttcgtgagacccggagggatgcctggactgggcggacctggacctggcccaggtggaccagaggaccgggatgggagacagcagcccccacaacagccacagcaacagcctcagccgcaggcacctcagcagccccagcagcagcagcagcagcagccaccaccttcgcagcagcccccaccaacgcagcagcagcctcaacaatttagaaacgataatcgtcaacaatttaattcaggccgtgaccaggaaagattcgggcgcagatcctttggtaacagggtagagaacgaccgcgagaggtatggaaataggaacgacgatcgcgacaattctaaccgagacaggcgggagtggggacggcgctcaccagatagggacagacatcgggaccttgaagagcgtaatagaaggtctagcgggcatagagatagggaacgcgactcaagggaccgggagtcccgccgggaaaaggaagaggcacgcggaaaggaaaagccagaggtaaccgatagagccggggggaataaaacggtggagccacccattagtcaggtcgggaacgtagatacggctagtgagctcgagaaaggcgtgtctgaagctgcagtcctgaaaccttcggaggagctgcccgcagaggccacatcctctgttgaacctgagaaagatagcggaagcgctgcggaagccccccgctag

SEQ ID NO: 58200 - DNA, 3378 bp, Artificial Sequence
  derived and/or modified sequence
atggacgccgtgaacgccttcaaccaggagctgttcagcctgatggacatgaaaccaccaatctctagggccaaaatgatcctcattaccaaggcagcgattaaggcgataaagctctacaagcacgtcgtgcaaatcgtggagaaatttataaagaaatgcaaacctgaatacaaggtgcccgggctctacgtgatcgattctatcgtcaggcagtcaagacatcagtttggtacggataaagatgtcttcggcccacggttctctaagaacatcactgccacatttcagtatctgtacctttgcccctccgaggataagagcaagattgtgcgagtgctgaacctttggcagaagaacggtgtattcaagatcgagatcatccaaccactgctggatatggcagctggtaccagtaacgcagcccctgtggccgagaacgtaacaaacaatgagggcagtcccccccctcctgtgaaagtttcctcagagccccctactcaagccaccccaaactctgttccggccgtaccccaactccccagctccgacgcttttgccgctgtcgcacagcttttccagaccacccagggacagcagttgcaacaaattctgcagacatttcaacagcccccaaagccacagtccccagcacttgataacgccgtgatggctcaagtgcaggctatcaccgcccagctgaagacaacacccacacagcccagcgaacagaaggccgcctttccaccaccagaacagaaaacagcgttcgataaaaagctgctggatcgatttgattacgatgatgagcccgaggctgtagaggagtctaaaaaagaggatacgaccgccgtcacgacaacagctccagctgccgctgttccacctgcgccgacggccaccgttcccgccgccgcagcacccgctgcagcctctccccccccgccccaggcacccttcggctttcctggggatgggatgcaacaacctgcatacacgcagcaccagaatatggatcaatttcagcctaggatgatgggaatccagcaggatccaatgcaccatcaagtgccacttcctccgaacgggcagatgcccggcttcggccttctccctacacccccgttcccacccatggcccagccagtcatccctcccaccccaccagtacaacagcccttccaggctagcttccaagcgcaaaacgagccccttacccagaaaccccatcagcaggagatggaagtcgaacagccctgcatacaagaggtgaagcggcatatgagcgacaacaggaaaagtcggtcacgctctgcgagtagatctccaaagcgaaggagatcacggtcaggcagccgctcaaggcgtagccgtcatagaaggtccagaagtaggagccgcgatcgcaggaggcactctccaagaagtaggagccaggaacggcgtgacagggaaaaagaacgagaacgacgccagaaaggtttgccccaggtgaaaccagaaacagcctcagtgtgctccacaacgctctgggtaggtcaacttgacaaacgcactacccagcaggacgtggcctcacttctagaggagttcggtccgatcgagtctattaacatgattccaccccgtggctgtgcatacatcgttatggttcaccgccaggatgcttaccgtgccctgcagaagctgagccgcgggaactataaagtgaaccaaaaatcgatcaaaattgcttgggctctgaataaggggatcaaggcagattataaacagtactgggatgtagagctcggtgtgacctatatcccttgggataaagtaaagcctgaagagctcgagagcttctgtgaggggggtatgttagacagtgatactttgaacccagactggaagggcattccgaagaagcccgaaaacgaggttgcacagaatggtggtgccgaaacgtcgcataccgaacccgtctcccctatccctaagcccctgcccgttccagtgcccccaattcccgtcccagctcccatcaccgtaccccctccccaggtcccaccccatcagcctggtccacctgtcgttggagccctgcagcctcctgcatttaccccacctctcgggattccaccacccggcttcggtcccggagttccacctcctcctcctcccccaccttttctccgcccaggttttaatccaatgcacctgccaccggggttcctgccccctgggccacctccaccgattacaccaccagtgagcattcctccccctcacacacctccaatttcaatccctaaccttgtgtccggggcgaggggcaatgctgagtccggcgattccgtaaagatgtacggaagcgctgtcccacctgccgcccctacaaatctgcctactcctccggtgacccaacctgtgtctcttcttgggactcaaggcgttgcaccgggacctgtcattggactgcaggcaccttcgactggcttgttaggcgctcggccaggcttgatcccacttcagcgccccccggggatgcccccaccccacttgcaacgatttccgctgatgcctccccgtcccatgccacctcacatgatgcaccggggaccccctcctgggccggggggctttgccatgccacctccccatggaatgaaggggccctttcccccacacggaccctttgtgaggcctggcggaatgcctgggttaggagggccagggcccggccctggcggacccgaggacagggatggtaggcagcaaccaccacagcagccccagcagcagcctcaaccacaagccccgcagcagccccagcagcagcaacagcagcaacctccgccctctcagcagcctccaccgactcagcaacagccgcagcagtttagaaacgacaatcgacagcaattcaacagcggaagggaccaggagcgctttgggcgtcggtctttcggcaatcgggtggagaatgaccgagaacggtatgggaaccggaacgacgaccgagataactcgaacagagataggcgcgaatgggggaggagaagcccagacagggatcgccatcgagatcttgaggaacgaaaccgccggtcctcagggcaccgggacagggagcgagattcacgtgacagggaaagtaggagagagaaagaggaggccaggggtaaagagaagcctgaagttaccgatagggcaggaggtaacaaaactgtggagcctccaatctcccaggtgggcaacgtggacacggcttcggaacttgagaagggtgtctcggaggccgctgttcttaagccctcagaggaactgccggcagaggcaacttcttcagtggagccagaaaaggactccggctcagccgcagaggcaccacgatag

SEQ ID NO: 58201 - DNA, 4193 bp, Artificial Sequence
  derived and/or modified sequence
cgctggagagagggagagagaggcccgcccgctcgccggccgggccagtgtgagccagtgcgtgagggcgcggggggccgtgtcagcgagacgcagagcgcagccgccaccaccaaacggacatgttgaagaccagcgctgccgccgcctccttttcctcatcctgcgaacgggactgagagggggcccgccacctctccgcctctgcctcggccgcccgcctcgccgcttcgggcgcagcctcttcctgcccgggcctcggactccgccgctcgtcgcctccccccggccaccaggcccggctggtttcccagccccgctccgccgcggcgcgaggtctatgtgaccggcgggcccggagcagccgccgccgcagcgcgaacatggacgccgtcaacgccttcaaccaggagctcttttcgcttatggatatgaaacctcccatctctagagccaagatgattctcatcactaaagctgctattaaagctattaagctttataagcatgtagttcaaatagtagaaaagttcatcaaaaagtgtaaaccagaatacaaggttccgggattatatgtaattgactcaattgtgcgacagtctcgtcatcagtttggaactgataaagatgtttttgggccaagattctctaaaaacataactgccacattccaatatttatatctttgtccatctgaagataagagtaaaatagttcgtgtgctgaacctttggcaaaaaaatggagtgttcaaaattgaaattattcaacctcttttggacatggcagcgggaaccagtaatgcagccccagtagcagaaaatgttaccaataatgaaggctcacctccacctccagtaaaagtttcttctgaacctcccacacaagccactccaaactccgtcccagctgtaccacagttgcccagctctgatgcttttgctgctgtggctcagctgtttcagacaactcaaggccaacagcttcagcagatccttcagacttttcaacagcctccaaaaccacagtctcctgcccttgacaatgctgtgatggctcaggttcaggctatcacagctcagttaaagacaactcctacacaaccatctgaacaaaaagctgctttccccccacctgaacagaaaactgcatttgacaagaagttgcttgatagatttgactatgatgatgagccagaagctgtggaagaatcaaagaaagaggataccactgccgtcaccacgacagcacctgctgccgcagtaccccctgcacccaccgccaccgtgcctgctgctgctgcacccgctgctgcctctcctcctcctccacaggcaccatttggctttcctggagatggcatgcagcagccagcatacacacagcatcaaaatatggatcagtttcagccacgaatgatgggaatacaacaggatccaatgcaccatcaggttccacttcctcctaatggacaaatgccaggatttggacttcttcctacacctccatttcctcccatggctcagcctgtgattcctccaactccaccagtgcagcagcctttccaagcttcttttcaggcacaaaatgaaccacttacacagaagccgcatcagcaggaaatggaagtagaacaaccttgtattcaagaggttaagcgacatatgtctgataacagaaagtcaagatctaggtcagcatccaggtcaccaaaaaggaggcgatctagatctggttctagatctcgaaggtctcggcatcgacgttctcgatctcggtccagggatagacgccgacattctccccgatctcgatctcaagaaagacgggatcgagaaaaagagagagaacgtcgacaaaaaggcctccctcaagtgaaaccggaaactgcaagtgtttgcagtactaccctctgggtggggcagctggacaaaagaactactcagcaggatgttgccagtctcttggaagagtttggtccaattgaatcaattaatatgattcctcccaggggttgtgcctatattgttatggttcataggcaagatgcctatcgtgccctgcagaaactgagccgaggaaactataaagtgaaccagaaatccataaagattgcctgggccttaaacaaaggaataaaggcagattataagcagtattgggatgtagaacttggtgttacttatattccatgggacaaagtcaagcctgaggaactggagagtttttgtgaaggaggaatgttggacagtgacacacttaacccagattggaaaggaattcctaagaagcctgaaaatgaagttgctcaaaatggaggtgctgaaacctcacacacagaaccagtatcacccatacctaaaccattacctgtgcctgtccctcctattcctgttcctgcacctataacagtgccacctccacaggtcccaccacatcaaccgggtccacctgtagttggtgctctccagccgcctgctttcacgcctcctctgggaataccgcctccaggctttggtcctggtgttcctcctccccctcctcctccaccatttttgcgcccaggattcaacccaatgcatttaccaccaggttttctgcctcctggacccccacctcctataactccaccagtatccattcctcctcctcacactccaccaataagcatcccaaactctactatcgctggtataaatgaagacactacaaaagacttatctattggaaatcccattccaacagtggtgtctggggctagaggaaacgccgagtctggtgacagcgtgaaaatgtatggctctgccgtgccacctgctgcacccacgaatctgcccacccctcctgtaacccagcctgtttcacttcttggcactcaaggagttgcccctggtcctgtaattggacttcaggcaccatctactggtcttcttggcgcccggcccggtctcatcccactccagcgccctccaggaatgcccccacctcacttacagcggttccctttgatgccgccccgtcccatgccaccgcacatgatgcacagaggcccaccgccaggaccagggggctttgcgatgcctccacctcatggaatgaaaggtcccttcccaccgcatggcccctttgttaggcctggtggaatgccagggctcgggggcccagggccaggcccagggggtcctgaagacagagacggaaggcaacagccgccgcagcagccacagcagcagccacagccgcaggcgccccagcaaccacagcagcagcagcagcagcagccaccaccatcacaacagcctccaccaacacagcagcagccacagcagtttagaaatgataacaggcagcagttcaattcaggtagagaccaagaaaggtttggaagaagatcttttggaaatagggtggaaaatgaccgggaacggtatgggaaccgtaatgatgatagagataatagtaaccgtgacaggagagagtggggaaggaggagccctgaccgggacaggcacagagacttggaagagagaaatagacgctctagtgggcatcgagacagagagagagattctagagatagagagtctcgtagagagaaggaagaagcccgaggaaaggaaaagcctgaggtgacagacagggcaggtggtaacaaaaccgttgaacctcccattagccaagtgggaaatgtagacactgcttcagaacttgagaagggggtgtctgaggctgcagtcctaaagccttctgaagagttacctgctgaggctacctcatccgttgaacccgaaaaggattctggctcagcagcagaggctcctcgttagagactggaatttgtgaaaatgtgacagtgacacttcctggagtgtagagcttgaggtgtacagatgctgtattatatccgctcccgctgtactgcagccccgcgccagctggtggggaactgtaagcaatttgattgcttcccttctatttaaaaatagccacaaaataacaaaaaatactgaaaatatgaataaatattaccctttttgctgtaactttttaaaagttttgactttaaaaagtttacaaatcgtaattagaagtgctctctatttttttttttttttttaatttaagacaaggtaacggtgaaagctcctcaaaacaatagggatgtttttaataaactctattttcgtaacaaa

SEQ ID NO: 58202 - DNA, 4127 bp, Artificial Sequence
  derived and/or modified sequence
cgctggagagagggagagagaggcccgcccgctcgccggccgggccagtgtgagccagtgcgtgagggcgcggggggccgtgtcagcgagacgcagagcgcagccgccaccaccaaacggacatgttgaagaccagcgctgccgccgcctccttttcctcatcctgcgaacgggactgagagggggcccgccacctctccgcctctgcctcggccgcccgcctcgccgcttcgggcgcagcctcttcctgcccgggcctcggactccgccgctcgtcgcctccccccggccaccaggcccggctggtttcccagccccgctccgccgcggcgcgaggtctatgtgaccggcgggcccggagcagccgccgccgcagcgcgaacatggacgccgtcaacgccttcaaccaggagctcttttcgcttatggatatgaaacctcccatctctagagccaagatgattctcatcactaaagctgctattaaagctattaagctttataagcatgtagttcaaatagtagaaaagttcatcaaaaagtgtaaaccagaatacaaggttccgggattatatgtaattgactcaattgtgcgacagtctcgtcatcagtttggaactgataaagatgtttttgggccaagattctctaaaaacataactgccacattccaatatttatatctttgtccatctgaagataagagtaaaatagttcgtgtgctgaacctttggcaaaaaaatggagtgttcaaaattgaaattattcaacctcttttggacatggcagcgggaaccagtaatgcagccccagtagcagaaaatgttaccaataatgaaggctcacctccacctccagtaaaagtttcttctgaacctcccacacaagccactccaaactccgtcccagctgtaccacagttgcccagctctgatgcttttgctgctgtggctcagctgtttcagacaactcaaggccaacagcttcagcagatccttcagacttttcaacagcctccaaaaccacagtctcctgcccttgacaatgctgtgatggctcaggttcaggctatcacagctcagttaaagacaactcctacacaaccatctgaacaaaaagctgctttccccccacctgaacagaaaactgcatttgacaagaagttgcttgatagatttgactatgatgatgagccagaagctgtggaagaatcaaagaaagaggataccactgccgtcaccacgacagcacctgctgccgcagtaccccctgcacccaccgccaccgtgcctgctgctgctgcacccgctgctgcctctcctcctcctccacaggcaccatttggctttcctggagatggcatgcagcagccagcatacacacagcatcaaaatatggatcagtttcagccacgaatgatgggaatacaacaggatccaatgcaccatcaggttccacttcctcctaatggacaaatgccaggatttggacttcttcctacacctccatttcctcccatggctcagcctgtgattcctccaactccaccagtgcagcagcctttccaagcttcttttcaggcacaaaatgaaccacttacacagaagccgcatcagcaggaaatggaagtagaacaaccttgtattcaagaggttaagcgacatatgtctgataacagaaagtcaagatctaggtcagcatccaggtcaccaaaaaggaggcgatctagatctggttctagatctcgaaggtctcggcatcgacgttctcgatctcggtccagggatagacgccgacattctccccgatctcgatctcaagaaagacgggatcgagaaaaagagagagaacgtcgacaaaaaggcctccctcaagtgaaaccggaaactgcaagtgtttgcagtactaccctctgggtggggcagctggacaaaagaactactcagcaggatgttgccagtctcttggaagagtttggtccaattgaatcaattaatatgattcctcccaggggttgtgcctatattgttatggttcataggcaagatgcctatcgtgccctgcagaaactgagccgaggaaactataaagtgaaccagaaatccataaagattgcctgggccttaaacaaaggaataaaggcagattataagcagtattgggatgtagaacttggtgttacttatattccatgggacaaagtcaagcctgaggaactggagagtttttgtgaaggaggaatgttggacagtgacacacttaacccagattggaaaggaattcctaagaagcctgaaaatgaagttgctcaaaatggaggtgctgaaacctcacacacagaaccagtatcacccatacctaaaccattacctgtgcctgtccctcctattcctgttcctgcacctataacagtgccacctccacaggtcccaccacatcaaccgggtccacctgtagttggtgctctccagccgcctgctttcacgcctcctctgggaataccgcctccaggctttggtcctggtgttcctcctccccctcctcctccaccatttttgcgcccaggattcaacccaatgcatttaccaccaggttttctgcctcctggacccccacctcctataactccaccagtatccattcctcctcctcacactccaccaataagcatcccaaacttggtgtctggggctagaggaaacgccgagtctggtgacagcgtgaaaatgtatggctctgccgtgccacctgctgcacccacgaatctgcccacccctcctgtaacccagcctgtttcacttcttggcactcaaggagttgcccctggtcctgtaattggacttcaggcaccatctactggtcttcttggcgcccggcccggtctcatcccactccagcgccctccaggaatgcccccacctcacttacagcggttccctttgatgccgccccgtcccatgccaccgcacatgatgcacagaggcccaccgccaggaccagggggctttgcgatgcctccacctcatggaatgaaaggtcccttcccaccgcatggcccctttgttaggcctggtggaatgccagggctcgggggcccagggccaggcccagggggtcctgaagacagagacggaaggcaacagccgccgcagcagccacagcagcagccacagccgcaggcgccccagcaaccacagcagcagcagcagcagcagccaccaccatcacaacagcctccaccaacacagcagcagccacagcagtttagaaatgataacaggcagcagttcaattcaggtagagaccaagaaaggtttggaagaagatcttttggaaatagggtggaaaatgaccgggaacggtatgggaaccgtaatgatgatagagataatagtaaccgtgacaggagagagtggggaaggaggagccctgaccgggacaggcacagagacttggaagagagaaatagacgctctagtgggcatcgagacagagagagagattctagagatagagagtctcgtagagagaaggaagaagcccgaggaaaggaaaagcctgaggtgacagacagggcaggtggtaacaaaaccgttgaacctcccattagccaagtgggaaatgtagacactgcttcagaacttgagaagggggtgtctgaggctgcagtcctaaagccttctgaagagttacctgctgaggctacctcatccgttgaacccgaaaaggattctggctcagcagcagaggctcctcgttagagactggaatttgtgaaaatgtgacagtgacacttcctggagtgtagagcttgaggtgtacagatgctgtattatatccgctcccgctgtactgcagccccgcgccagctggtggggaactgtaagcaatttgattgcttcccttctatttaaaaatagccacaaaataacaaaaaatactgaaaatatgaataaatattaccctttttgctgtaactttttaaaagttttgactttaaaaagtttacaaatcgtaattagaagtgctctctatttttttttttttttttaatttaagacaaggtaacggtgaaagctcctcaaaacaatagggatgtttttaataaactctattttcgtaacaaa

SEQ ID NO: 58203 - DNA, 3444 bp, Artificial Sequence
  derived and/or modified sequence
atggacgccgttaatgctttcaaccaggagcttttctccctgatggatatgaagcctccaatctctcgggctaagatgatactgattaccaaggccgcaatcaaggccattaagctctataagcacgttgttcaaattgtggagaagttcattaagaagtgcaaacccgaatacaaagttccaggcctctacgtgatcgactcaatcgtgagacagtccagacatcaattcggcacggacaaagacgtcttcggccctcgtttcagcaaaaacatcaccgccacctttcagtacttgtacctctgcccctctgaggacaagtcaaagatagtgcgtgtcttaaacctctggcaaaaaaatggggtctttaaaattgaaattatacagcccttgcttgacatggcagctggaacctcaaacgccgcacctgttgcagagaacgttaccaacaatgagggctcaccacctccgccagtgaaagtctcctccgagccaccgactcaggccactcccaacagcgtccctgccgtgccccagctgccttccagtgacgccttcgcagcagtggcccagctttttcaaactacccagggccagcagttgcagcagatactccagaccttccagcaaccgccaaaacctcagtccccagctctggacaacgccgtcatggcccaggtgcaagcgatcacggcacagctcaagaccacccctacacagccctccgaacagaaagcagctttcccaccacctgagcagaaaacagccttcgataaaaaactcttggatagattcgactacgacgatgagcctgaggcagtcgaagaaagcaagaaggaggacacgactgctgtcacaaccacagccccagcagccgctgtaccccctgcaccaaccgctacagtgcctgctgcagctgcaccagcagctgccagcccacctccacctcaagcacctttcggcttccctggagatggtatgcaacagcccgcatatacgcagcaccaaaacatggaccagttccagcccaggatgatgggaatccagcaggacccaatgcaccatcaagtccccctcccacctaatggtcaaatgcctggcttcggcttactccccacacctccattcccccctatggcacagccagtaattccccctacgccccctgtgcagcagcctttccaggcatcttttcaggcacagaacgaacctctgactcagaaaccccaccaacaggagatggaagtggaacagccatgcattcaagaagttaaacgccatatgtcggacaatcgtaagagtcggtcacggagcgcttccaggtcgcctaagcgcagaagatcccggtccggatcccgcagccggaggagcagacatcgcaggtcacgctcacgtagtagggaccggaggaggcactcccctaggtcccgaagccaagagaggcgagatagggagaaagagcgtgagcgcaggcagaagggcctgccacaggttaagccggagaccgcctccgtgtgttctactactctttgggttggccaactggataagcgcacgacccagcaagacgtagcctctttactggaggaatttggccctatcgagagcatcaatatgataccgcctcgaggatgcgcttatattgtcatggtgcacaggcaagatgcttacagggctttacagaagctcagtaggggaaactacaaggtaaaccagaaatccatcaagatagcatgggctctgaataaaggcatcaaggccgactacaaacagtattgggacgtagagttaggtgtcacatatataccttgggataaggtaaagcccgaggaactcgaatctttctgcgaggggggtatgctggacagcgatacgcttaatcccgattggaaagggatccctaagaagcctgaaaacgaagtagcccagaacggcggtgcagagacatcccatacggagcctgtgagcccgattccaaagccacttccggtgcccgttccaccaattccagtacccgctccaattaccgtaccgcctccacaagtccccccacaccagccgggacctcctgtggtgggagctttgcagccacctgcattcacgcctcccctcggtataccccctccgggatttggcccaggggttccgccacctccgcctcccccacccttcctccgaccgggattcaatcctatgcaccttcctcccggattcctgccaccaggtcctcctccgcctatcacgcctccagtgagtatcccccctccccacaccccacctatcagcatccccaattccaccatagccggaatcaacgaggataccacgaaggatctcagcatcggcaatcccatacctacagttgtgtctggcgctcgtggtaatgccgaaagcggggactccgtgaagatgtacggctcggctgtgcctcctgcagcccctacaaatctgccgacacctcccgtgacacagcctgtgtcacttctagggacccaaggggtcgcaccgggacctgtgattggtctgcaggcacctagtaccggcctcctgggtgctcgacctggcctgataccactgcagcgcccacccggaatgccaccaccccatctgcagcgcttcccgttgatgccccctcgacctatgcctccccacatgatgcacagagggcctcccccaggccctgggggattcgcaatgccaccgcctcacggcatgaaggggccatttccaccacatgggccattcgtgcggcctggaggcatgcccggtttaggcggaccgggtccgggacccggaggtcctgaggacagagatggtcgccagcagccgccacaacaaccccagcaacagcctcagccccaggctccccagcagccgcagcagcagcaacagcagcaaccgccaccttcacaacagccacctcctactcaacagcaacctcagcagttccgtaacgataatcggcaacagtttaatagcggcagagatcaagaaaggtttgggagacgcagcttcggtaatcgcgtcgagaatgatcgcgaacgctacggcaacagaaatgatgatcgggacaatagcaatagagaccgcagagagtggggaagacgtagtcctgacagggatcggcacagggatcttgaagagagaaacagaagatcgtcaggacaccgtgaccgagaaagggactctagagatcgcgagtctcgcagagaaaaagaggaggctcggggaaaagagaagccagaggtcacggaccgcgctggcggaaataagaccgtggagcctcccatctcccaggtgggtaacgttgacacagcctctgaactggagaaaggcgtctccgaggcagcagttctgaagccctccgaggaactgcctgccgaggcgacttcctctgtggaaccagagaaggattccggatctgcggcagaagccccaagatag

SEQ ID NO: 58204 - DNA, 3378 bp, Artificial Sequence
  derived and/or modified sequence
atggacgctgtgaacgctttcaatcaggagctgtttagtctgatggatatgaaacccccaattagtagggctaaaatgatccttataaccaaagccgctatcaaagcaataaagctctataagcacgtagtgcagatcgtcgagaagtttatcaaaaagtgcaagcccgaatacaaagtgcccggtctgtacgtgatcgactccattgtccgtcaatcacgccatcagttcggaacagacaaggatgtgttcgggccaaggttcagtaaaaatatcactgctaccttccaatatctgtatctctgtccgagcgaggacaagtccaagattgtgagagtcctgaacctgtggcaaaaaaatggtgtcttcaagatagagattatccagcctctgctggacatggcagccggaacctccaacgccgcaccagtggctgagaacgtgacaaacaacgaaggtagccctcctccacctgttaaagtctcctccgagcccccaacgcaagctacacccaactccgtgccagcagtgccacaactgccttctagtgacgcattcgccgctgtggcccagcttttccagaccacccagggccagcaattgcagcagatcttgcagacctttcagcagccccctaaaccccaatcacctgctttggataatgctgtgatggctcaggtgcaggccattactgcccagctcaagacaaccccgacgcaacctagcgagcagaaagcagccttccccccacctgagcagaagaccgcttttgataaaaagctcctggacaggttcgactacgacgatgagcccgaagctgtggaagaaagcaaaaaggaagacacaacagcagtcacaaccactgcccctgcagcagccgtccccccagcgccaaccgccaccgtgcccgctgctgcagccccagccgcagcctcccctccaccacctcaggctcctttcggattccccggtgatggaatgcagcagcctgcttacacccagcatcaaaacatggaccagtttcagccacggatgatgggtatacagcaggatccaatgcatcatcaggtcccgttgccacccaatggtcaaatgcctggtttcggcctgttgcctactcctccatttccgccaatggctcagccagtgatcccacccaccccccctgtgcagcagcccttccaggcatctttccaggcacagaatgagcctcttacacaaaagccacaccagcaagagatggaagtggaacagccatgtatccaggaagtgaagaggcatatgagtgataacaggaagtctcgcagtcgatcagcttctcgttctccaaagagaaggagatcccggagcggtagccggtctcgccgaagccggcaccgcaggagccgcagcaggagccgcgaccggagacggcattctccccgatccaggagtcaagagcgaagggatcgagagaaagaaagggagaggaggcagaaaggcttaccgcaggttaaaccagagactgccagcgtttgtagcaccaccctgtgggtcgggcagctcgacaagcgaaccactcagcaggacgtggcgtctctgctcgaggagtttggacccatagagtctattaacatgatcccacctcggggatgcgcttatatcgtcatggttcacagacaagacgcttatcgggctttacagaagttgagccgagggaactacaaagtcaatcagaagagtattaagattgcctgggctttgaacaagggcattaaagctgactataagcagtattgggacgttgagttaggcgtcacctacattccgtgggataaggtaaaacctgaggaacttgagagtttctgtgagggagggatgttggattctgacactctcaaccccgactggaaaggaatccctaagaaacccgaaaatgaggttgctcagaacggcggagcagaaactagccacactgagcccgtctcacccattcccaaaccattgccggtacctgtgcccccaatccctgtgcccgcacctatcaccgtgcctccaccgcaggtgccccctcaccaacccggaccacctgttgttggcgcactccaaccaccagccttcaccccaccactgggtataccgccacccggattcggtccaggagtgccaccaccgcctccacctcccccttttctgcgccctggctttaaccccatgcatctgcccccagggtttctgccccctgggcctccaccaccaatcacgcctcccgtgtctattcctcccccacacaccccccctatcagcatccctaacctggtgtccggtgctcgcggaaacgccgagtcaggcgactccgttaaaatgtacgggtctgcggttccccctgcagccccaaccaacctacctactcctcccgtcacacagccagtctccctgctgggtacacagggggtggcacccggaccagtcatcgggctacaggcaccatcaacaggccttttgggtgctcggcctgggcttataccactgcagcggccaccaggcatgccccctccgcacctccagagatttccgctcatgcccccacggcctatgcctccccatatgatgcatagaggccctccacccggtcccggtggattcgccatgcctcccccacacgggatgaagggccctttcccgccacatggcccatttgtccgccctggtgggatgcccggattgggaggacccggacccggaccagggggaccggaagacagagatggtcggcagcagccaccgcagcaaccccagcagcagcctcaaccacaggctccacaacagccgcagcagcagcagcagcaacagccgccaccttcgcaacagcctccccctacacagcaacagcctcagcagttccggaacgataaccgtcaacaatttaattcaggacgcgaccaggagcggtttggcaggagatcattcggtaatcgggtcgagaacgacagggaaagatatggtaatcgtaacgatgatcgcgacaacagcaacagggaccggcgagagtggggacgcaggagtccggatagagaccgccaccgagatctggaagagcgcaatagaaggtcctctgggcatcgggaccgtgagcgggacagtagagaccgggaaagcaggcgcgagaaagaagaggcacgcggtaaggagaagcctgaggtgaccgatcgagcaggaggcaataaaaccgtcgaaccccctatcagccaagttgggaatgtcgacacagctagcgagctcgagaaaggggtgagcgaagccgctgtgctgaaacccagtgaggaactacctgccgaagctacttccagcgtagaacccgaaaaagactccgggtccgcagcagaagctcctcgttag

SEQ ID NO: 58205 - DNA, 3444 bp, Artificial Sequence
  derived and/or modified sequence
atggacgccgtgaacgccttcaaccaggagctgttcagcctgatggacatgaagccccccatcagcagagccaagatgatcctgatcaccaaggccgccatcaaggccatcaagctgtacaagcacgtggtgcagatcgtggagaagttcatcaagaagtgcaagcccgagtacaaggtgcccggcctgtacgtgatcgacagcatcgtgagacagagcagacaccagttcggcaccgacaaggacgtgttcggccccagattcagcaagaacatcaccgccaccttccagtacctgtacctgtgccccagcgaggacaagagcaagatcgtgagagtgctgaacctgtggcagaagaacggcgtgttcaagatcgagatcatccagcccctgctggacatggccgccggcaccagcaacgccgcccccgtggccgagaacgtgaccaacaacgagggcagcccccccccccccgtgaaggtgagcagcgagccccccacccaggccacccccaacagcgtgcccgccgtgccccagctgcccagcagcgacgccttcgccgccgtggcccagctgttccagaccacccagggccagcagctgcagcagatcctgcagaccttccagcagccccccaagccccagagccccgccctggacaacgccgtgatggcccaggtgcaggccatcaccgcccagctgaagaccacccccacccagcccagcgagcagaaggccgccttccccccccccgagcagaagaccgccttcgacaagaagctgctggacagattcgactacgacgacgagcccgaggccgtggaggagagcaagaaggaggacaccaccgccgtgaccaccaccgcccccgccgccgccgtgccccccgcccccaccgccaccgtgcccgccgccgccgcccccgccgccgccagccccccccccccccaggcccccttcggcttccccggcgacggcatgcagcagcccgcctacacccagcaccagaacatggaccagttccagcccagaatgatgggcatccagcaggaccccatgcaccaccaggtgcccctgccccccaacggccagatgcccggcttcggcctgctgcccaccccccccttcccccccatggcccagcccgtgatcccccccaccccccccgtgcagcagcccttccaggccagcttccaggcccagaacgagcccctgacccagaagccccaccagcaggagatggaggtggagcagccctgcatccaggaggtgaagagacacatgagcgacaacagaaagagcagaagcagaagcgccagcagaagccccaagagaagaagaagcagaagcggcagcagaagcagaagaagcagacacagaagaagcagaagcagaagcagagacagaagaagacacagccccagaagcagaagccaggagagaagagacagagagaaggagagagagagaagacagaagggcctgccccaggtgaagcccgagaccgccagcgtgtgcagcaccaccctgtgggtgggccagctggacaagagaaccacccagcaggacgtggccagcctgctggaggagttcggccccatcgagagcatcaacatgatcccccccagaggctgcgcctacatcgtgatggtgcacagacaggacgcctacagagccctgcagaagctgagcagaggcaactacaaggtgaaccagaagagcatcaagatcgcctgggccctgaacaagggcatcaaggccgactacaagcagtactgggacgtggagctgggcgtgacctacatcccctgggacaaggtgaagcccgaggagctggagagcttctgcgagggcggcatgctggacagcgacaccctgaaccccgactggaagggcatccccaagaagcccgagaacgaggtggcccagaacggcggcgccgagaccagccacaccgagcccgtgagccccatccccaagcccctgcccgtgcccgtgccccccatccccgtgcccgcccccatcaccgtgccccccccccaggtgcccccccaccagcccggcccccccgtggtgggcgccctgcagccccccgccttcaccccccccctgggcatccccccccccggcttcggccccggcgtgccccccccccccccccccccccccttcctgagacccggcttcaaccccatgcacctgccccccggcttcctgccccccggcccccccccccccatcaccccccccgtgagcatcccccccccccacaccccccccatcagcatccccaacagcaccatcgccggcatcaacgaggacaccaccaaggacctgagcatcggcaaccccatccccaccgtggtgagcggcgccagaggcaacgccgagagcggcgacagcgtgaagatgtacggcagcgccgtgccccccgccgcccccaccaacctgcccaccccccccgtgacccagcccgtgagcctgctgggcacccagggcgtggcccccggccccgtgatcggcctgcaggcccccagcaccggcctgctgggcgccagacccggcctgatccccctgcagagaccccccggcatgccccccccccacctgcagagattccccctgatgccccccagacccatgcccccccacatgatgcacagaggccccccccccggccccggcggcttcgccatgccccccccccacggcatgaagggccccttccccccccacggccccttcgtgagacccggcggcatgcccggcctgggcggccccggccccggccccggcggccccgaggacagagacggcagacagcagcccccccagcagccccagcagcagccccagccccaggccccccagcagccccagcagcagcagcagcagcagcccccccccagccagcagcccccccccacccagcagcagccccagcagttcagaaacgacaacagacagcagttcaacagcggcagagaccaggagagattcggcagaagaagcttcggcaacagagtggagaacgacagagagagatacggcaacagaaacgacgacagagacaacagcaacagagacagaagagagtggggcagaagaagccccgacagagacagacacagagacctggaggagagaaacagaagaagcagcggccacagagacagagagagagacagcagagacagagagagcagaagagagaaggaggaggccagaggcaaggagaagcccgaggtgaccgacagagccggcggcaacaagaccgtggagccccccatcagccaggtgggcaacgtggacaccgccagcgagctggagaagggcgtgagcgaggccgccgtgctgaagcccagcgaggagctgcccgccgaggccaccagcagcgtggagcccgagaaggacagcggcagcgccgccgaggcccccagatag

SEQ ID NO: 58206 - DNA, 3378 bp, Artificial Sequence
  derived and/or modified sequence
atggacgccgtgaacgccttcaaccaggagctgttcagcctgatggacatgaagccccccatcagcagagccaagatgatcctgatcaccaaggccgccatcaaggccatcaagctgtacaagcacgtggtgcagatcgtggagaagttcatcaagaagtgcaagcccgagtacaaggtgcccggcctgtacgtgatcgacagcatcgtgagacagagcagacaccagttcggcaccgacaaggacgtgttcggccccagattcagcaagaacatcaccgccaccttccagtacctgtacctgtgccccagcgaggacaagagcaagatcgtgagagtgctgaacctgtggcagaagaacggcgtgttcaagatcgagatcatccagcccctgctggacatggccgccggcaccagcaacgccgcccccgtggccgagaacgtgaccaacaacgagggcagcccccccccccccgtgaaggtgagcagcgagccccccacccaggccacccccaacagcgtgcccgccgtgccccagctgcccagcagcgacgccttcgccgccgtggcccagctgttccagaccacccagggccagcagctgcagcagatcctgcagaccttccagcagccccccaagccccagagccccgccctggacaacgccgtgatggcccaggtgcaggccatcaccgcccagctgaagaccacccccacccagcccagcgagcagaaggccgccttccccccccccgagcagaagaccgccttcgacaagaagctgctggacagattcgactacgacgacgagcccgaggccgtggaggagagcaagaaggaggacaccaccgccgtgaccaccaccgcccccgccgccgccgtgccccccgcccccaccgccaccgtgcccgccgccgccgcccccgccgccgccagccccccccccccccaggcccccttcggcttccccggcgacggcatgcagcagcccgcctacacccagcaccagaacatggaccagttccagcccagaatgatgggcatccagcaggaccccatgcaccaccaggtgcccctgccccccaacggccagatgcccggcttcggcctgctgcccaccccccccttcccccccatggcccagcccgtgatcccccccaccccccccgtgcagcagcccttccaggccagcttccaggcccagaacgagcccctgacccagaagccccaccagcaggagatggaggtggagcagccctgcatccaggaggtgaagagacacatgagcgacaacagaaagagcagaagcagaagcgccagcagaagccccaagagaagaagaagcagaagcggcagcagaagcagaagaagcagacacagaagaagcagaagcagaagcagagacagaagaagacacagccccagaagcagaagccaggagagaagagacagagagaaggagagagagagaagacagaagggcctgccccaggtgaagcccgagaccgccagcgtgtgcagcaccaccctgtgggtgggccagctggacaagagaaccacccagcaggacgtggccagcctgctggaggagttcggccccatcgagagcatcaacatgatcccccccagaggctgcgcctacatcgtgatggtgcacagacaggacgcctacagagccctgcagaagctgagcagaggcaactacaaggtgaaccagaagagcatcaagatcgcctgggccctgaacaagggcatcaaggccgactacaagcagtactgggacgtggagctgggcgtgacctacatcccctgggacaaggtgaagcccgaggagctggagagcttctgcgagggcggcatgctggacagcgacaccctgaaccccgactggaagggcatccccaagaagcccgagaacgaggtggcccagaacggcggcgccgagaccagccacaccgagcccgtgagccccatccccaagcccctgcccgtgcccgtgccccccatccccgtgcccgcccccatcaccgtgccccccccccaggtgcccccccaccagcccggcccccccgtggtgggcgccctgcagccccccgccttcaccccccccctgggcatccccccccccggcttcggccccggcgtgccccccccccccccccccccccccttcctgagacccggcttcaaccccatgcacctgccccccggcttcctgccccccggcccccccccccccatcaccccccccgtgagcatcccccccccccacaccccccccatcagcatccccaacctggtgagcggcgccagaggcaacgccgagagcggcgacagcgtgaagatgtacggcagcgccgtgccccccgccgcccccaccaacctgcccaccccccccgtgacccagcccgtgagcctgctgggcacccagggcgtggcccccggccccgtgatcggcctgcaggcccccagcaccggcctgctgggcgccagacccggcctgatccccctgcagagaccccccggcatgccccccccccacctgcagagattccccctgatgccccccagacccatgcccccccacatgatgcacagaggccccccccccggccccggcggcttcgccatgccccccccccacggcatgaagggccccttccccccccacggccccttcgtgagacccggcggcatgcccggcctgggcggccccggccccggccccggcggccccgaggacagagacggcagacagcagcccccccagcagccccagcagcagccccagccccaggccccccagcagccccagcagcagcagcagcagcagcccccccccagccagcagcccccccccacccagcagcagccccagcagttcagaaacgacaacagacagcagttcaacagcggcagagaccaggagagattcggcagaagaagcttcggcaacagagtggagaacgacagagagagatacggcaacagaaacgacgacagagacaacagcaacagagacagaagagagtggggcagaagaagccccgacagagacagacacagagacctggaggagagaaacagaagaagcagcggccacagagacagagagagagacagcagagacagagagagcagaagagagaaggaggaggccagaggcaaggagaagcccgaggtgaccgacagagccggcggcaacaagaccgtggagccccccatcagccaggtgggcaacgtggacaccgccagcgagctggagaagggcgtgagcgaggccgccgtgctgaagcccagcgaggagctgcccgccgaggccaccagcagcgtggagcccgagaaggacagcggcagcgccgccgaggcccccagatag

SEQ ID NO: 58207 - protein, 79 aa, Artificial Sequence
  derived and/or modified sequence
MNGFGRLEHFSGAVYEGQFKDNMFHGLGTYTFPNGAKYTGNFNENRVEGEGEYTDIQGLEWSGNFHFTAAPDLKLKLHM

SEQ ID NO: 58208 - DNA, 240 bp, Artificial Sequence
  derived and/or modified sequence
atgaacggcttcggcagactggagcacttcagcggcgccgtgtacgagggccagttcaaggacaacatgttccacggcctgggcacctacaccttccccaacggcgccaagtacaccggcaacttcaacgagaacagagtggagggcgagggcgagtacaccgacatccagggcctggagtggagcggcaacttccacttcaccgccgcccccgacctgaagctgaagctgcacatgtag

SEQ ID NO: 58209 - DNA, 240 bp, Artificial Sequence
  derived and/or modified sequence
atgaatggattcgggcgactagagcatttctctggagccgtgtacgaaggtcagtttaaggacaatatgtttcacggccttgggacatatacctttccaaacggtgccaagtatactggcaatttcaatgaaaaccgagtcgagggagaaggggagtacacagatattcaaggattagagtggagcgggaactttcattttaccgcggccccagacttaaaacttaagctgcatatgtag

SEQ ID NO: 58210 - DNA, 240 bp, Artificial Sequence
  derived and/or modified sequence
atgaatggtttcggcagactggagcatttttctggagccgtctatgagggtcaatttaaggataacatgttccatggcctcggcacctacacttttcccaatggtgccaaatacacagggaatttcaacgaaaacagagtggagggggaaggagagtataccgacattcagggtctggagtggagcggaaacttccactttactgccgcaccagatctgaaactgaagctccacatgtag

SEQ ID NO: 58211 - DNA, 240 bp, Artificial Sequence
  derived and/or modified sequence
atgaatggctttgggaggctcgaacacttcagtggtgcagtctacgaagggcagttcaaggacaacatgttccacggcctgggaacttacactttcccgaatggagccaagtacacgggaaatttcaatgaaaaccgggtggaaggcgaaggggaatacacagatatccaagggcttgagtggtcggggaatttccatttcacagccgccccagatctcaaattgaagctgcacatgtag

SEQ ID NO: 58212 - DNA, 240 bp, Artificial Sequence
  derived and/or modified sequence
atgaatggcttcggccgcctggagcacttctctggagctgtgtatgagggccagttcaaggacaacatgtttcatggcctgggcacctacaccttccccaacggggccaagtacacaggcaacttcaatgaaaatagagtggagggggagggggagtacacagacatccagggcctggagtggagcggcaacttccacttcaccgctgccccagacctgaagctgaagctgcacatgtag

SEQ ID NO: 58213 - DNA, 240 bp, Artificial Sequence
  derived and/or modified sequence
atgaacggcttcggccggctggagcacttcagcggcgccgtgtacgaagggcagttcaaggataatatgtttcacggtctcggaacgtacacctttccaaacggggccaagtatactgggaactttaatgagaatcgcgtggaaggggaaggggaatataccgacattcagggactggaatggagcggaaattttcacttcaccgcagctcctgatctgaaattgaagctgcatatgtag

SEQ ID NO: 58214 - DNA, 240 bp, Artificial Sequence
  derived and/or modified sequence
atgaacggcttcggccggctggagcacttcagcggcgccgtgtacgagggccagttcaaggacaacatgtttcatggtctgggtacatatacattccctaatggggccaagtatacgggcaacttcaacgagaacagggtggagggggagggcgagtacactgacattcaagggctcgagtggtctggaaattttcactttactgccgctcctgacctcaagcttaagctgcacatgtag

SEQ ID NO: 58215 - DNA, 240 bp, Artificial Sequence
  derived and/or modified sequence
atgaacggcttcggccggctggagcacttcagcggcgccgtgtacgaaggtcagtttaaagataacatgtttcacgggctcggaacttacacatttcctaatggtgcgaaatacactggcaattttaatgaaaaccgggtggagggcgaaggcgagtacacagatatccagggcctcgaatggagtggaaatttccacttcaccgctgctcccgacctgaaacttaagttacatatgtag

SEQ ID NO: 58216 - DNA, 741 bp, Artificial Sequence
  derived and/or modified sequence
attcgcttccgggtgagaggtgcccggtcgccccagcaaccaagtcgcacctggagctgtcctagcgcctagttctctcccggccgcagagctggccgcccagggggagtcgcagagtttggaagatctctctaacacctctcggccaacttcagaagtgtataagatcagctttatctttccaaatggagacaagtatgatggtgactgtacaagaacatcttctggaatctacgagagaaatggaataggtattcataccactcctaatgggattgtctacacaggaagctggaaagatgacaagatgaatggttttggaagacttgagcatttttcaggagcagtatatgaaggacaatttaaggataatatgtttcatggactggggacttacacattcccaaatggggcaaagtatactggaaatttcaatgaaaatagggtggaaggtgaaggggaatatactgatatccaaggactagaatggagtggtaactttcattttacagctgctccagacctgaaattaaagcttcacatgtagatgtgatgttaaattaaagttgaaatgtagtaattgaagcttttagttgtaaggaaagcaacttaatctgttatttgaaatgacttcatacactacccctataagtttgccaataaaaccatcacctgcttacacctttttgaactttatattcattgtcttacaattagtttaaaataaatgacatgattcaa

SEQ ID NO: 58217 - DNA, 648 bp, Artificial Sequence
  derived and/or modified sequence
cctggagctgtcctagcgcctagttctctcccggccgcagagctggccgcccagggggagtcgcagagtttggaagatctctctaacacctctcggccaacttcagaagtgtataagatcagctttatctttccaaatggagacaagtatgtttttctcctctgtttagatggtgactgtacaagaacatcttctggaatctacgagagaaatggaataggtattcataccactcctaatgggattgtctacacaggaagctggaaagatgacaagatgaatggttttggaagacttgagcatttttcaggagcagtatatgaaggacaatttaaggataatatgtttcatggactggggacttacacattcccaaatggggcaaagtatactggaaatttcaatgaaaatagggtggaaggtgaaggggaatatactgatatccaaggactagaatggagtggtaactttcattttacagctgctccagacctgaaattaaagcttcacatgtagatgtgatgttaaattaaagttgaaatgtagtaattgaagcttttagttgtaaggaaagcaacttaatctgttatttgaaatgacttcatacactacccctataagtttgccaataaaaccatcacctgctta

SEQ ID NO: 58218 - DNA, 750 bp, Artificial Sequence
  derived and/or modified sequence
gccccagcaaccaagtcgcacctggagctgtcctagcgcctagttctctcccggccgcagagctggccgcccagggggagtcgcagagtttggaagatctctctaacacctctcggccaagtgagtgtccctcctcctaacgacccgggcagagaagagctcctttaagtcgaactagcgtggagtcagaacctgcttggctcccggtaactcctgtggggcttcagaagtgtataagatcagctttatctttccaaatggagacaagtatgatggtgactgtacaagaacatcttctggaatctacgagagaaatggaataggtattcataccactcctaatgggattgtctacacaggaagctggaaagatgacaagatgaatggttttggaagacttgagcatttttcaggagcagtatatgaaggacaatttaaggataatatgtttcatggactggggacttacacattcccaaatggggcaaagtatactggaaatttcaatgaaaatagggtggaaggtgaaggggaatatactgatatccaaggactagaatggagtggtaactttcattttacagctgctccagacctgaaattaaagcttcacatgtagatgtgatgttaaattaaagttgaaatgtagtaattgaagcttttagttgtaaggaaagcaacttaatctgttatttgaaatgacttcatacactacccctataagtttgccaataaaaccatcacctgctt

SEQ ID NO: 58219 - DNA, 240 bp, Artificial Sequence
  derived and/or modified sequence
atgaatggcttcggtagactcgagcatttctctggagccgtatacgaaggccagtttaaggataatatgtttcatgggctcgggacgtacactttccctaatggcgctaagtacacaggcaacttcaatgagaaccgtgtggagggtgaaggagaatatacagatatccagggactagagtggtctggtaactttcacttcacggcggcacccgatctgaagctgaaactgcatatgtag

SEQ ID NO: 58220 - DNA, 240 bp, Artificial Sequence
  derived and/or modified sequence
atgaatggtttcggcaggcttgagcatttctccggcgcagtctatgaaggacaattcaaggacaacatgttccacggtctgggaacgtataccttccccaacggggctaagtacacagggaattttaacgaaaacagagtggagggggaaggggagtatactgatatccaaggactggaatggtcgggcaacttccatttcaccgccgcaccagatcttaaattaaaactacatatgtag

SEQ ID NO: 58221 - DNA, 240 bp, Artificial Sequence
  derived and/or modified sequence
atgaatggcttcggaagactggagcatttttcgggagcagtctacgaaggccagtttaaggataatatgtttcacggcctgggaacatacacgtttcccaacggcgcaaaatataccggaaatttcaacgagaatcgggtagagggggagggcgagtacacagacatccagggcctcgagtggagtggtaacttccacttcaccgcagccccagatcttaagttgaagctacacatgtag

SEQ ID NO: 58222 - protein, 460 aa, Artificial Sequence
  derived and/or modified sequence
MFLATLYFALPLLDLLLSAEVSGGDRLDCVKASDQCLKEQSCSTKYRTLRQCVAGKETNFSLASGLEAKDECRSAMEALKQKSLYNCRCKRGMKKEKNCLRIYWSMYQSLQGNDLLEDSPYEPVNSRLSDIFRVVPFISVEHIPKGNNCLDAAKACNLDDICKKYRSAYITPCTTSVSNDVCNRRKCHKALRQFFDKVPAKHSYGMLFCSCRDIACTERRRQTIVPVCSYEEREKPNCLNLQDSCKTNYICRSRLADFFTNCQPESRSVSSCLKENYADCLLAYSGLIGTVMTPNYIDSSSLSVAPWCDCSNSGNDLEECLKFLNFFKDNTCLKNAIQAFGNGSDVTVWQPAFPVQTTTATTTTALRVKNKPLGPAGSENEIPTHVLPPCANLQAQKLKSNVSGNTHLCISNGNYEKEGLGASSHITTKSMAAPPSCGLSPLLVLVVTALSTLLSLTETS

SEQ ID NO: 58223 - protein, 344 aa, Artificial Sequence
  derived and/or modified sequence
MQEGKFWKGMAETGMWGCGEWIPVEHIPKGNNCLDAAKACNLDDICKKYRSAYITPCTTSVSNDVCNRRKCHKALRQFFDKVPAKHSYGMLFCSCRDIACTERRRQTIVPVCSYEEREKPNCLNLQDSCKTNYICRSRLADFFTNCQPESRSVSSCLKENYADCLLAYSGLIGTVMTPNYIDSSSLSVAPWCDCSNSGNDLEECLKFLNFFKDNTCLKNAIQAFGNGSDVTVWQPAFPVQTTTATTTTALRVKNKPLGPAGSENEIPTHVLPPCANLQAQKLKSNVSGNTHLCISNGNYEKEGLGASSHITTKSMAAPPSCGLSPLLVLVVTALSTLLSLTETS

SEQ ID NO: 58224 - DNA, 1383 bp, Artificial Sequence
  derived and/or modified sequence
atgtttctcgcgaccttgtatttcgctctgcctctgctcgacttgcttctgtccgccgaggtgtctgggggcgaccggctcgactgcgtgaaagcaagtgaccagtgcctgaaggagcagagctgctccactaaatatcggacactgagacagtgtgtggccggaaaagagaccaatttctctcttgccagtggccttgaagctaaggacgagtgtcggtccgcaatggaggcgctgaaacagaagtcactgtacaattgcagatgcaaacggggcatgaagaaagagaagaactgcctgcgaatctactggagcatgtatcagagtttacagggtaatgaccttctggaggacagtccatacgagcctgtaaattctagattgtccgatattttccgggtggtgccctttatctcggtggaacatatacctaaaggcaacaattgcctggacgctgctaaagcgtgcaatttggatgacatatgcaaaaagtacagaagtgcatacatcacgccgtgcacgacctccgtttctaacgatgtgtgtaatcggagaaaatgccataaagccctgcgccaattttttgataaggtgccagccaagcactcatacggaatgttgttctgctcttgcagggacatcgcctgcactgagagaaggaggcaaacaatcgtccccgtgtgtagttacgaggaacgggaaaaacccaattgtcttaatctgcaggacagttgcaaaaccaactatatctgccgctcccgccttgccgatttttttactaattgccagccggaaagtcggagtgtgtcctcatgcctgaaggaaaattacgcagactgtctgctggcctactccggattaatcggcacagtgatgacgccaaattatatcgattcttcatcattgtccgtcgccccatggtgtgactgctctaactcaggtaacgatttagaggagtgccttaagtttttaaacttcttcaaggacaatacttgccttaaaaatgccatccaggcattcggtaacggatcagacgtgacggtctggcagcccgcttttccagtgcaaacaaccactgctacgacgaccaccgcactgcgggtaaagaacaaaccattgggccccgctggcagcgagaatgagatccctacccatgtgctgcccccctgtgccaatctgcaggcacagaagctgaagtccaatgtctccggcaatacccatttatgcatcagtaacggcaattacgaaaaggagggcctcggcgccagcagccacatcactacaaaatccatggctgcccctcccagctgcgggttgtcccctcttctggttctggtggtcaccgcactttcaactctcttatcgctgaccgaaacttcatag

SEQ ID NO: 58225 - DNA, 1383 bp, Artificial Sequence
  derived and/or modified sequence
atgtttctggccacactttacttcgctctcccgctgctagatctgctgttgtcagcggaagtgtccggcggcgacagattggattgcgtaaaggcatctgaccagtgcctgaaagagcaatcttgcagtacgaagtacagaacactgcgccagtgcgtggctgggaaggagaccaacttctcactcgccagtgggctagaggccaaggatgaatgtaggagcgccatggaggctttgaagcagaagagcctttacaattgtagatgcaaacgcggcatgaaaaaagagaagaactgtttgcgcatctactggagcatgtatcagtcactccagggtaacgacctgctcgaggactctccatatgaaccggtcaactcaaggctgtcagacattttccgtgtggtacccttcatttccgtggagcatattccaaagggcaacaactgcctggacgctgccaaggcatgcaacttggatgacatctgcaaaaaatatcgttcggcatacattacaccctgcaccacgtctgtgagcaacgatgtatgcaataggagaaaatgccataaggcacttcgccagtttttcgacaaagtgcctgctaagcattcctacggaatgttattctgcagctgccgggacattgcctgtaccgaacgaagacggcagaccattgtcccagtgtgcagctacgaagaacgggagaaaccgaactgccttaacctacaggactcatgcaagactaattatatctgtcggtcacggctagctgatttcttcacaaactgccaacctgagtccaggagcgtgtcctcgtgccttaaagagaactatgccgattgccttcttgcttatagcggcctcataggtaccgtgatgactccgaactatatagactcctcttccctgagtgtcgccccatggtgcgattgctctaacagcggcaatgacctggaagaatgcctcaaattcctgaacttcttcaaggataacacatgtttgaagaatgcgatccaggcatttggcaacgggtccgatgttacagtttggcaacctgcttttccagtgcagaccaccaccgctaccaccacaaccgcgctgagagtgaaaaacaaacccctcggacccgcaggctctgaaaatgaaatccccacgcacgttctccccccgtgtgctaatctccaagcacagaagctcaagtcgaatgtgagcggaaacacccacctgtgcatttccaatggcaattacgaaaaagaaggcttaggggcatcctcgcacattaccacaaagtccatggccgccccaccaagttgtggtctcagccccctgcttgtcctggtggttacagccctgagcacattattgtcgctcaccgaaactagctag

SEQ ID NO: 58226 - DNA, 1383 bp, Artificial Sequence
  derived and/or modified sequence
atgtttttagcaaccctgtacttcgccctgcctcttctggatcttctcctttccgctgaagtgtctggaggagatagactggattgcgtgaaggcctccgaccagtgtctcaaggagcagagttgctccacaaaatacagaaccctgaggcagtgtgtcgccgggaaggagaccaacttttctttggcctcaggcctggaggctaaggacgagtgccgcagcgcaatggaggcgttaaagcagaaaagtctgtataattgccgctgcaagcgcggcatgaaaaaagagaaaaattgtttgaggatttactggtccatgtaccagagtctgcagggcaatgatctgttggaggactctccttatgaacccgtcaacagtaggttgagtgacatattccgggtggtgccattcatcagcgtagagcacattcccaagggtaacaattgtctggatgctgccaaagcttgcaacctagacgacatctgcaagaaataccgatctgcatatatcacaccatgtactactagcgtctccaacgacgtatgcaatagaagaaaatgccacaaagctctgagacagttctttgataaggtacctgcaaagcattcatatggcatgctgttttgtagctgccgcgacatcgcttgtacagaaaggaggcgccagacgattgttccggtgtgctcatacgaagagagagaaaaacccaattgcctgaacctccaggactcctgtaaaacaaactatatctgtcgctccaggctggctgattttttcaccaactgtcagcccgagagccgtagtgtgtccagctgcctgaaggagaactatgctgactgcctcctcgcctacagcggactcatcggtactgtgatgacccctaattacattgacagtagcagtctgtccgtggctccctggtgtgattgctctaactctggcaacgatcttgaggaatgcctgaaattcctgaactttttcaaggacaacacatgcctcaagaacgcaatacaggctttcgggaatggctccgatgtcaccgtctggcagccagcttttccagtccagactacaaccgctaccacgaccactgctcttcgtgtcaaaaacaaacctcttggcccagcaggatccgagaacgagatccccacacatgtgctgcccccttgcgccaacctgcaggcacagaaactgaaatccaatgtgagcgggaatacccacctctgcatatctaacggaaattatgaaaaagaaggcttaggggccagtagccacattactaccaagagtatggcagctccgccatcctgtggcttgtcccccctgttggtcctcgtcgtcaccgcactgagtaccctgctcagtctcaccgagacctcctag

SEQ ID NO: 58227 - DNA, 1035 bp, Artificial Sequence
  derived and/or modified sequence
atgcaagagggtaaattctggaagggcatggccgagacaggcatgtggggatgtggcgaatggattcccgtggagcatatccccaagggcaataattgtctagatgccgccaaggcctgcaacctggatgacatctgcaagaaatataggagcgcttacattaccccttgcaccactagcgtgtctaacgacgtttgcaaccgaaggaaatgccataaggcgctacggcagtttttcgataaggttccggcaaagcatagctatggaatgctgttttgcagttgtcgggacattgcctgcactgaacgccggagacagacaatagttcctgtgtgtagctatgaagagagagaaaagccaaactgcctgaacctgcaggacagttgcaagacgaattatatttgcaggagcaggctagctgatttcttcacaaactgtcaacccgagagcaggtcagtctcctcatgtcttaaggaaaactatgcagattgtctgctcgcatattcgggccttattggcaccgtgatgacaccgaactacatcgacagcagcagcttgagcgttgcaccgtggtgcgactgcagcaattccgggaatgatctagaggagtgtctgaagttcctcaacttttttaaagacaacacatgtctgaagaacgctatccaggctttcggaaacggcagtgatgtcactgtgtggcagccagctttccctgtgcagacaacaacagctacgaccaccactgccctgagagtgaaaaataagccgctggggcccgcgggcagcgagaatgaaatcccaacacatgtgttgcctccatgcgccaatttacaggcacaaaaactgaagagcaacgtgtctggcaatacacacctgtgtatttcaaatggaaattacgaaaaggaaggccttggggccagcagccatataactacaaagtccatggcggcacccccatcttgtgggctgtcaccccttctcgtcctggtggttactgctctctccactctgctgagcctgactgagactagttag

SEQ ID NO: 58228 - DNA, 2568 bp, Artificial Sequence
  derived and/or modified sequence
tctggccagaagaaatctggcctcggaacacgccattctccgcgccgcttccaataaccactaacatccctaacgagcatccgagccgagggctctgctcggaaatcgtcctggcccaactcggcccttcgagctctcgaagattaccgcatctatttttttttcttttttttcttttcctagcgcagataaagtgagcccggaaagggaaggagggggcggggacaccattgccctgaaagaataaataagtaaataaacaaactggctcctcgccgcagctggacgcggtcggttgagtccaggttgggtcggacctgaacccctaaaagcggaaccgcctcccgccctcgccatcccggagctgagtcgccggcggcggtggctgctgccagacccggagtttcctctttcactggatggagctgaactttgggcggccagagcagcacagctgtccggggatcgctgcacgctgagctccctcggcaagacccagcggcggctcgggatttttttgggggggcggggaccagccccgcgccggcaccatgttcctggcgaccctgtacttcgcgctgccgctcttggacttgctcctgtcggccgaagtgagcggcggagaccgcctggattgcgtgaaagccagtgatcagtgcctgaaggagcagagctgcagcaccaagtaccgcacgctaaggcagtgcgtggcgggcaaggagaccaacttcagcctggcatccggcctggaggccaaggatgagtgccgcagcgccatggaggccctgaagcagaagtcgctctacaactgccgctgcaagcggggtatgaagaaggagaagaactgcctgcgcatttactggagcatgtaccagagcctgcagggaaatgatctgctggaggattccccatatgaaccagttaacagcagattgtcagatatattccgggtggtcccattcatatcagtggagcacattcccaaagggaacaactgcctggatgcagcgaaggcctgcaacctcgacgacatttgcaagaagtacaggtcggcgtacatcaccccgtgcaccaccagcgtgtccaacgatgtctgcaaccgccgcaagtgccacaaggccctccggcagttctttgacaaggtcccggccaagcacagctacggaatgctcttctgctcctgccgggacatcgcctgcacagagcggaggcgacagaccatcgtgcctgtgtgctcctatgaagagagggagaagcccaactgtttgaatttgcaggactcctgcaagacgaattacatctgcagatctcgccttgcggatttttttaccaactgccagccagagtcaaggtctgtcagcagctgtctaaaggaaaactacgctgactgcctcctcgcctactcggggcttattggcacagtcatgacccccaactacatagactccagtagcctcagtgtggccccatggtgtgactgcagcaacagtgggaacgacctagaagagtgcttgaaatttttgaatttcttcaaggacaatacatgtcttaaaaatgcaattcaagcctttggcaatggctccgatgtgaccgtgtggcagccagccttcccagtacagaccaccactgccactaccaccactgccctccgggttaagaacaagcccctggggccagcagggtctgagaatgaaattcccactcatgttttgccaccgtgtgcaaatttacaggcacagaagctgaaatccaatgtgtcgggcaatacacacctctgtatttccaatggtaattatgaaaaagaaggtctcggtgcttccagccacataaccacaaaatcaatggctgctcctccaagctgtggtctgagcccactgctggtcctggtggtaaccgctctgtccaccctattatctttaacagaaacatcatagctgcattaaaaaaatacaatatggacatgtaaaaagacaaaaaccaagttatctgtttcctgttctcttgtatagctgaaattccagtttaggagctcagttgagaaacagttccattcaactggaacattttttttttttccttttaagaaagcttcttgtgatcctttggggcttctgtgaaaaacctgatgcagtgctccatccaaactcagaaggctttgggatatgctgtattttaaagggacagtttgtaacttgggctgtaaagcaaactggggctgtgttttcgatgatgatgatgatcatgatgatgatcatcatgatcatgatgatgatcatcatgatcatgatgatgattttaacagttttacttctggcctttcctagctagagaaggagttaatatttctaaggtaactcccatatctcctttaatgacattgatttctaatgatataaatttcagcctacattgatgccaagcttttttgccacaaagaagattcttaccaagagtgggctttgtggaaacagctggtactgatgttcacctttatatatgtactagcattttccacgctgatgtttatgtactgtaaacagttctgcactcttgtacaaaagaaaaaac

SEQ ID NO: 58229 - DNA, 1748 bp, Artificial Sequence
  derived and/or modified sequence
cgccgggactgcgggccggcgcgctcgccctgggctggggtgcggaagcgcccgagtcctgggcaccgggcgagagtgtgagaggagcggacgcccaggagggagccgaggacgcgcggcgggttgggtcggacctgaacccctaaaagcggaaccgcctcccgccctcgccatcccggagctgagtcgccggcggcggtggctgctgccagacccggagtttcctctttcactggatggagctgaactttgggcggccagagcagcacagctgtccggggatcgctgcacgctgagctccctcggcaagacccagcggcggctcgggatttttttgggggggcggggaccagccccgcgccggcaccatgttcctggcgaccctgtacttcgcgctgccgctcttggacttgctcctgtcggccgaagtgagcggcggagaccgcctggattgcgtgaaagccagtgatcagtgcctgaaggagcagagctgcagcaccaagtaccgcacgctaaggcagtgcgtggcgggcaaggagaccaacttcagcctggcatccggcctggaggccaaggatgagtgccgcagcgccatggaggccctgaagcagaagtcgctctacaactgccgctgcaagcggggtatgaagaaggagaagaactgcctgcgcatttactggagcatgtaccagagcctgcagggaaatgatctgctggaggattccccatatgaaccagttaacagcagattgtcagatatattccgggtggtcccattcatatcagtggagcacattcccaaagggaacaactgcctggatgcagcgaaggcctgcaacctcgacgacatttgcaagaagtacaggtcggcgtacatcaccccgtgcaccaccagcgtgtccaacgatgtctgcaaccgccgcaagtgccacaaggccctccggcagttctttgacaaggtcccggccaagcacagctacggaatgctcttctgctcctgccgggacatcgcctgcacagagcggaggcgacagaccatcgtgcctgtgtgctcctatgaagagagggagaagcccaactgtttgaatttgcaggactcctgcaagacgaattacatctgcagatctcgccttgcggatttttttaccaactgccagccagagtcaaggtctgtcagcagctgtctaaaggaaaactacgctgactgcctcctcgcctactcggggcttattggcacagtcatgacccccaactacatagactccagtagcctcagtgtggccccatggtgtgactgcagcaacagtgggaacgacctagaagagtgcttgaaatttttgaatttcttcaaggacaatacatgtcttaaaaatgcaattcaagcctttggcaatggctccgatgtgaccgtgtggcagccagccttcccagtacagaccaccactgccactaccaccactgccctccgggttaagaacaagcccctggggccagcagggtctgagaatgaaattcccactcatgttttgccaccgtgtgcaaatttacaggcacagaagctgaaatccaatgtgtcgggcaatacacacctctgtatttccaatggtaattatgaaaaagaaggtctcggtgcttccagccacataaccacaaaatcaatggctgctcctccaagctgtggtctgagcccactgctggtcctggtggtaaccgctctgtccaccctattatctttaacagaaacatca

SEQ ID NO: 58230 - DNA, 2592 bp, Artificial Sequence
  derived and/or modified sequence
cttccaggttgggtcggacctgaacccctaaaagcggaaccgcctcccgccctcgccatcccggagctgagtcgccggcggcggtggctgctgccagacccggagtttcctctttcactggatggagctgaactttgggcggccagagcagcacagctgtccggggatcgctgcacgctgagctccctcggcaagacccagcggcggctcgggatttttttgggggggcggggaccagccccgcgccggcaccatgttcctggcgaccctgtacttcgcgctgccgctcttggacttgctcctgtcggccgaagtgagcggcggagaccgcctggattgcgtgaaagccagtgatcagtgcctgaaggagcagagctgcagcaccaagtaccgcacgctaaggcagtgcgtggcgggcaaggagaccaacttcagcctggcatccggcctggaggccaaggatgagtgccgcagcgccatggaggccctgaagcagaagtcgctctacaactgccgctgcaagcggggtatgaagaaggagaagaactgcctgcgcatttactggagcatgtaccagagcctgcagggaaatgatctgctggaggattccccatatgaaccagttaacagcagattgtcagatatattccgggtggtcccattcatatcagtggagcacattcccaaagggaacaactgcctggatgcagcgaaggcctgcaacctcgacgacatttgcaagaagtacaggtcggcgtacatcaccccgtgcaccaccagcgtgtccaacgatgtctgcaaccgccgcaagtgccacaaggccctccggcagttctttgacaaggtcccggccaagcacagctacggaatgctcttctgctcctgccgggacatcgcctgcacagagcggaggcgacagaccatcgtgcctgtgtgctcctatgaagagagggagaagcccaactgtttgaatttgcaggactcctgcaagacgaattacatctgcagatctcgccttgcggatttttttaccaactgccagccagagtcaaggtctgtcagcagctgtctaaaggaaaactacgctgactgcctcctcgcctactcggggcttattggcacagtcatgacccccaactacatagactccagtagcctcagtgtggccccatggtgtgactgcagcaacagtgggaacgacctagaagagtgcttgaaatttttgaatttcttcaaggacaatacatgtcttaaaaatgcaattcaagcctttggcaatggctccgatgtgaccgtgtggcagccagccttcccagtacagaccaccactgccactaccaccactgccctccgggttaagaacaagcccctggggccagcagggtctgagaatgaaattcccactcatgttttgccaccgtgtgcaaatttacaggcacagaagctgaaatccaatgtgtcgggcaatacacacctctgtatttccaatggtaattatgaaaaagaaggtctcggtgcttccagccacataaccacaaaatcaatggctgctcctccaagctgtggtctgagcccactgctggtcctggtggtaaccgctctgtccaccctattatctttaacagaaacatcatagctgcattaaaaaaatacaatatggacatgtaaaaagacaaaaaccaagttatctgtttcctgttctcttgtatagctgaaattccagtttaggagctcagttgagaaacagttccattcaactggaacattttttttttttccttttaagaaagcttcttgtgatcctttggggcttctgtgaaaaacctgatgcagtgctccatccaaactcagaaggctttgggatatgctgtattttaaagggacagtttgtaacttgggctgtaaagcaaactggggctgtgttttcgatgatgatgatgatcatgatgatgatcatcatgatcatgatgatgatcatcatgatcatgatgatgattttaacagttttacttctggcctttcctagctagagaaggagttaatatttctaaggtaactcccatatctcctttaatgacattgatttctaatgatataaatttcagcctacattgatgccaagcttttttgccacaaagaagattcttaccaagagtgggctttgtggaaacagctggtactgatgttcacctttatatatgtactagcattttccacgctgatgtttatgtactgtaaacagttctgcactcttgtacaaaagaaaaaacacctgtcacatccaaatatagtatctgtcttttcgtcaaaatagagagtggggaatgagtgtgccgattcaatacctcaatccctgaacgacactctcctaatcctaagccttacctgagtgagaagccctttacctaacaaaagtccaatatagctgaaatgtcgctctaatactctttacacatatgaggttatatgtagaaaaaaattttactactaaatgatttcaactattggctttctatattttgaaagtaatgatattgtctcatttttttactgatggtttaatacaaaatacacagagcttctttcccctca

SEQ ID NO: 58231 - DNA, 1309 bp, Artificial Sequence
  derived and/or modified sequence
gtgctagctgctggggagatggtggtgggccagaaagtgcagagtgcaatgccatgtaaagaaggggagaaggagagaggaagagaactaggatgcaggaaggaaagttctggaaggggatggcagagaccggaatgtggggatgtggggagtggattccagtggagcacattcccaaagggaacaactgcctggatgcagcgaaggcctgcaacctcgacgacatttgcaagaagtacaggtcggcgtacatcaccccgtgcaccaccagcgtgtccaacgatgtctgcaaccgccgcaagtgccacaaggccctccggcagttctttgacaaggtcccggccaagcacagctacggaatgctcttctgctcctgccgggacatcgcctgcacagagcggaggcgacagaccatcgtgcctgtgtgctcctatgaagagagggagaagcccaactgtttgaatttgcaggactcctgcaagacgaattacatctgcagatctcgccttgcggatttttttaccaactgccagccagagtcaaggtctgtcagcagctgtctaaaggaaaactacgctgactgcctcctcgcctactcggggcttattggcacagtcatgacccccaactacatagactccagtagcctcagtgtggccccatggtgtgactgcagcaacagtgggaacgacctagaagagtgcttgaaatttttgaatttcttcaaggacaatacatgtcttaaaaatgcaattcaagcctttggcaatggctccgatgtgaccgtgtggcagccagccttcccagtacagaccaccactgccactaccaccactgccctccgggttaagaacaagcccctggggccagcagggtctgagaatgaaattcccactcatgttttgccaccgtgtgcaaatttacaggcacagaagctgaaatccaatgtgtcgggcaatacacacctctgtatttccaatggtaattatgaaaaagaaggtctcggtgcttccagccacataaccacaaaatcaatggctgctcctccaagctgtggtctgagcccactgctggtcctggtggtaaccgctctgtccaccctattatctttaacagaaacatcatagctgcattaaaaaaatacaatatggacatgtaaaaagacaaaaaccaagttatctgtttcctgttctcttgtatagctgaaattccagtttaggagctcagttgagaaacagttccattcaactggaacattttttttttttccttttaagaaagcttcttgtgatcctttggggcttctgtg

SEQ ID NO: 58232 - DNA, 1383 bp, Artificial Sequence
  derived and/or modified sequence
atgttcctggccaccctgtactttgccctgcccctgctggacctgctgctgtctgctgaggtgtctggaggagaccggctggactgtgtgaaggccagtgaccagtgcctgaaggagcagagctgcagcaccaagtaccgcaccctgcggcagtgtgtggccggcaaggagaccaacttcagcctggccagcggcctggaggccaaggatgaatgtcgcagcgccatggaggccctgaagcagaagagcctgtacaactgccgctgcaagaggggcatgaagaaggagaagaactgcctgcgcatctactggagcatgtaccagagcctgcagggcaatgacctgctggaggacagcccctatgagcctgtgaacagccggctgagtgacatcttccgggtggtgcccttcatctctgtggagcacatccccaagggcaacaactgcctggatgctgccaaggcctgcaacctggatgacatctgcaagaagtacagaagtgcctacatcaccccctgcaccacctctgtgtccaatgatgtgtgcaacagaaggaagtgccacaaggccctgcggcagttctttgacaaggtgcctgccaagcacagctatggcatgctgttctgcagctgccgggacatcgcctgcacagaaagaagacggcagaccatcgtgcctgtgtgcagctatgaggagcgggagaagcccaactgcctgaacctgcaggacagctgcaagaccaactacatctgccgcagccggctggccgacttcttcaccaactgccagcctgagagccgctctgtgagcagctgcctgaaggaaaattatgctgactgcctgctggcctacagcggcctcatcggcaccgtgatgacccccaactacatcgacagcagcagcctgtctgtggccccctggtgtgactgcagcaacagcggaaatgacctggaggagtgcctgaagttcctgaacttcttcaaggacaacacctgcctgaagaatgccatccaggcctttggaaatggaagtgatgtgacagtgtggcagcctgccttccctgtgcagaccaccacagccaccaccaccacagccctgcgggtgaagaacaagcccctgggccctgctggctctgaaaatgagatccccacccacgtgctgcccccctgtgccaacctgcaggcccagaagctgaagagcaatgtgtctggcaacacccacctgtgcatcagcaatggaaattatgagaaggagggcctgggcgccagcagccacatcaccaccaagtccatggccgccccacccagctgtggcctgagccccctgctggtgctggtggtgacagccctgagcaccctgctgagcctgacagagaccagctag

SEQ ID NO: 58233 - DNA, 1035 bp, Artificial Sequence
  derived and/or modified sequence
atgcaggagggcaagttctggaagggcatggccgagaccggcatgtggggctgtggggagtggatccctgtggagcacatccccaagggcaacaactgcctggatgctgccaaggcctgcaacctggatgacatctgcaagaagtacagaagtgcctacatcaccccctgcaccacctctgtgtccaatgatgtgtgcaacagaaggaagtgccacaaggccctgcggcagttctttgacaaggtgcctgccaagcacagctatggcatgctgttctgcagctgccgggacatcgcctgcacagaaagaagacggcagaccatcgtgcctgtgtgcagctatgaggagcgggagaagcccaactgcctgaacctgcaggacagctgcaagaccaactacatctgccgcagccggctggccgacttcttcaccaactgccagcctgagagccgctctgtgagcagctgcctgaaggaaaattatgctgactgcctgctggcctacagcggcctcatcggcaccgtgatgacccccaactacatcgacagcagcagcctgtctgtggccccctggtgtgactgcagcaacagcggaaatgacctggaggagtgcctgaagttcctgaacttcttcaaggacaacacctgcctgaagaatgccatccaggcctttggaaatggaagtgatgtgacagtgtggcagcctgccttccctgtgcagaccaccacagccaccaccaccacagccctgcgggtgaagaacaagcccctgggccctgctggctctgaaaatgagatccccacccacgtgctgcccccctgtgccaacctgcaggcccagaagctgaagagcaatgtgtctggcaacacccacctgtgcatcagcaatggaaattatgagaaggagggcctgggcgccagcagccacatcaccaccaagtccatggccgccccacccagctgtggcctgagccccctgctggtgctggtggtgacagccctgagcaccctgctgagcctgacagagaccagctag

SEQ ID NO: 58234 - DNA, 1383 bp, Artificial Sequence
  derived and/or modified sequence
atgttcctggccaccctgtacttcgccctgcccctgctggacctgctcctgtcggctgaggtcagcggaggcgataggctggactgtgtcaaggcctctgaccagtgtttgaaggagcaaagttgctccacgaaataccgcaccctcaggcagtgcgttgcaggaaaagaaacaaatttctctttggcttctggtctggaagctaaggacgagtgccgatctgcaatggaagctctgaagcaaaagagtttgtacaattgtaggtgtaaaagggggatgaagaaagaaaaaaattgccttaggatctactggagcatgtaccagagcctgcaaggaaacgatctcctcgaagactctccctacgagcccgttaattctagactctctgatatctttcgcgttgtaccgtttatttctgtcgagcacattcccaaaggtaacaactgcttagatgccgctaaggcttgtaatctcgatgatatctgcaagaagtaccggagcgcctatatcacaccgtgcactacatctgtgagcaacgacgtatgcaatcggagaaaatgtcataaagctctccgtcagtttttcgacaaggttccagctaagcactcctatggcatgttattctgcagctgcagggatattgcctgtacggagagaagaaggcagacaattgttcccgtgtgcagctacgaggaaagggagaagcctaattgtttgaatctacaagactcatgcaaaaccaattatatctgtcgatctcgcctggcagacttttttacaaactgccagcctgaaagtaggagcgtgtcctcatgtctcaaggagaattatgcagactgcctattagcctattccggcctgatcgggaccgtgatgacccccaattacattgacagctcttctctttccgtggccccctggtgcgactgctctaacagtggtaatgatctggaggaatgcctgaagttcctcaacttcttcaaagacaatacatgcctaaaaaacgcgatacaggcctttggtaacggcagcgatgtgacggtgtggcagccagcattcccagtccagaccaccacagccacgaccacaaccgcactaagggtgaagaataaacctctgggtccagccggcagtgaaaatgagattcccactcatgtgctccctccttgcgcaaatttgcaagctcagaagctgaagagcaacgtgtctggcaacacgcacctctgcatctcaaatgggaactacgaaaaagaggggcttggtgcatcttctcacatcaccaccaaatccatggccgctccaccatcatgtggactgtcacccttgctggtgctcgttgtgacagccctgtccacacttctgtccctcacagagacatcgtag

SEQ ID NO: 58235 - DNA, 1383 bp, Artificial Sequence
  derived and/or modified sequence
atgttcctggccaccctgtacttcgccctgcccctgctggacctgctcctgtccgcggaagtgtccgggggggaccggcttgactgcgtaaaagcgagtgatcagtgcctgaaggagcagagctgttctacaaagtatagaaccttgcgccagtgcgttgcggggaaagagaccaactttagcctggcctcgggtctggaagctaaggatgagtgccggagtgccatggaagccttgaaacagaagagtctttacaattgcagatgcaagagaggcatgaagaaggaaaagaactgcctcaggatatactggtcaatgtatcagagccttcaaggcaacgacctgctggaagacagcccttacgaacccgtgaacagccgcttaagcgacatctttcgcgtcgttcctttcatttccgtggagcacattcctaaaggaaacaactgtttagatgccgcaaaggcttgcaacctggatgacatatgcaaaaaataccgctccgcttatattaccccatgcactactagtgtatctaatgacgtgtgtaacagaaggaagtgccacaaagcccttcgacaatttttcgacaaggtccccgcaaaacactcctacgggatgttgttttgctcttgtcgagatatagcgtgtaccgagaggagacgtcagaccattgtgccagtgtgctcctatgaagagcgtgaaaaaccaaactgtttgaacctgcaggattcttgcaaaacgaattacatttgtagaagccggttggctgattttttcactaactgccagccagagtctcgttccgttagcagttgcctcaaagagaattacgctgactgcctcctcgcctatagcggcctcatcggcacggttatgacgcccaactatattgactccagctccctgagcgtggccccctggtgcgactgtagcaactcagggaatgatttggaggaatgcttaaaattcttgaattttttcaaggataacacatgcctcaaaaacgccatccaggcattcgggaatggatcggacgttacggtatggcagccagcatttcctgtacagacaacaacagccactactaccacggccttacgggtgaagaataagccactggggcctgcaggctcggaaaacgaaattcccacacacgtcttgcctccatgcgccaacttacaggcccagaagctcaagtctaatgtgagtggaaatacccacctatgtatatccaatggcaactacgagaaagagggactgggagcctcttctcacattactacaaagtctatggctgcaccgccgtcgtgcgggcttagtccactgctggtcctggtagtgactgcactgtctacgctactgtccctgacagagaccagctag

SEQ ID NO: 58236 - DNA, 1383 bp, Artificial Sequence
  derived and/or modified sequence
atgttcctggccaccctgtacttcgccctgcccctgctggacctgttgctgtcagccgaggtttctggaggagatagactggactgtgttaaggcttcagaccagtgcctcaaggaacagagctgtagtaccaagtataggacactcaggcagtgcgtggctggcaaggaaaccaatttctcacttgcgagcggactcgaagccaaggatgaatgtcgaagtgccatggaggctcttaaacaaaaaagcctttacaactgtcgatgtaagcggggcatgaaaaaggagaaaaactgcttacgtatttactggtctatgtatcaaagcctgcaggggaacgatctccttgaagactctccatacgagcctgtgaactcacggctcagtgatattttccgggtcgtcccattcattagtgtggaacatattccaaagggcaataactgtttagatgccgctaaagcttgcaaccttgatgatatatgcaaaaagtaccggtctgcctacataaccccgtgcaccacctccgtgagcaacgacgtgtgtaatagacggaaatgccacaaagccttacgccaattcttcgacaaggtccccgccaagcattcatacggcatgctcttttgctcatgcagggacattgcttgtaccgagcgaagaaggcagacaatcgtcccagtctgcagctacgaagagcgggagaaacccaactgcctcaatttacaggattcttgcaaaactaactatatctgcaggagtcggcttgcagacttcttcacaaactgtcagcccgaatcgcggtcggtctccagttgcctgaaggaaaattatgccgactgcttactggcctacagtggtctaatcggtacagtgatgactcccaactacatagatagtagttctctgtcggtggcaccctggtgcgactgtagtaatagtggcaatgacttagaagagtgcctcaaattcctcaacttttttaaggataatacgtgtctcaagaacgcaatacaggcctttggtaatggctcagatgttacagtctggcagccagctttccccgtgcagaccacaacagccactactaccaccgccctgagggtaaaaaacaaaccgcttggtcccgctggcagcgagaatgagatccctactcacgtgttgcccccctgcgccaatttacaggcgcagaagctcaagtctaatgtttcaggaaacacccatctgtgtataagcaacgggaattacgaaaaggagggcctgggcgcttcatcacacattacgacaaagtccatggcagctcctccctcctgtggcctttcacccctgcttgttctagtggttaccgccctgtctaccttgttgtctctgacagagaccagctag

SEQ ID NO: 58237 - DNA, 1035 bp, Artificial Sequence
  derived and/or modified sequence
atgcaggagggcaagttctggaagggcatggccgagaccggcatgtggggttgtggcgaatggatccctgtagagcatatccccaaaggaaacaactgtctagacgcagccaaggcctgtaacttagatgacatatgtaagaagtaccgatccgcctatataaccccctgcactacatcggtgagtaacgatgtgtgtaacagacgaaagtgccataaggcactgaggcagttttttgataaagttccggcaaaacacagttacggtatgctcttctgctcctgtcgggacatagcttgcaccgaacgacggagacaaaccatagtcccagtgtgcagttatgaagagcgagagaagccaaactgcctgaacctccaagacagttgtaaaaccaattatatctgcagaagtcgactagccgacttctttacaaattgccagcctgagtcccgctctgtttcaagctgtctgaaagaaaactatgcagattgcctgctggcttattctgggcttatcggcacagttatgacacccaattacattgatagttcttctctgagcgtggcgccctggtgcgactgttcaaactcgggcaatgaccttgaagagtgcctgaagtttttgaacttctttaaagataatacttgcctcaagaatgcgattcaggcgtttggcaacgggtcagatgtaacagtctggcaacctgctttccctgtgcagaccaccactgccaccaccaccacagccctgcgggttaagaataagccgctgggccccgcggggtccgaaaacgagattcctacgcacgttttgcccccttgcgccaatcttcaggctcagaagctgaagtccaatgtgtccggcaatacacacttatgcatcagcaatggcaactacgagaaggaaggtctaggagccagttctcacataacgacaaagagcatggcagcaccgccctcctgcgggttatcgcctctgctggtcctcgtcgtaacagccctgtcgaccctcctgtcactcactgagactagctag

SEQ ID NO: 58238 - DNA, 1383 bp, Artificial Sequence
  derived and/or modified sequence
atgttcctggctaccctttatttcgcacttcctctgttggatctgctgctgagcgcggaggtttcagggggtgataggctcgactgcgtcaaggcttcggaccaatgcctgaaagaacagtcatgttcaaccaagtatcgtaccttaagacagtgcgtagctgggaaagaaactaatttctccctcgcttctgggttagaagccaaggacgagtgcaggtctgccatggaggccctgaagcaaaagtccctttacaattgtcgctgcaaacgagggatgaaaaaagagaagaattgcctacgtatttactggagcatgtaccagtccctccaaggcaacgatctgcttgaggattccccatatgaaccagtgaattccagactgtccgacatctttagagttgtgcccttcatctctgtggagcatatacctaagggcaataactgcttggacgccgctaaagcttgtaacctagacgatatctgcaagaagtaccgttctgcttacatcaccccctgcactacgagcgtttcgaacgacgtgtgtaatcggagaaagtgtcacaaagctcttagacagttcttcgacaaggtgccggctaagcacagctatgggatgttgttctgcagctgcagggacatcgcctgtactgagcgccgacgccagacaattgtaccagtttgctcatacgaagagcgggaaaagcctaattgcctgaatctgcaggactcctgcaaaacgaactatatttgtcgatcccgtctggcagatttcttcacaaattgtcagcccgaaagcaggagcgtgagtagttgtttaaaagagaactatgccgactgcctgctggcttactccggactcatcggcacagtgatgaccccaaattacattgactccagctctctctccgtggcgccttggtgcgactgttctaatagtggaaatgatcttgaggagtgcctgaaattccttaatttcttcaaagacaatacttgcttaaagaatgcgatccaggcctttggcaacggcagtgatgttaccgtgtggcagcccgctttccctgtacagacaacgaccgcaaccaccactaccgctctccgagttaagaacaagccgctgggcccagccggttcagaaaacgaaatcccaacgcatgtcttgcctccttgtgctaatcttcaggctcagaagctcaagtctaacgtctcaggtaacacccatctgtgtatatccaatgggaattatgaaaaggagggcttgggagcttcctcccacatcaccaccaagagtatggccgcacccccatcgtgtgggctgagccccctgttagtgctggtggttacagcactaagtacccttctctccctgacggaaacatcctag

SEQ ID NO: 58239 - DNA, 1383 bp, Artificial Sequence
  derived and/or modified sequence
atgttcctcgcgaccctatatttcgcgcttcccctgctagatcttctgttaagtgcagaggtcagtggaggagatcgcttagactgcgttaaagcctctgaccaatgcctcaaagaacaaagctgcagcaccaagtatcgtactctaaggcagtgcgtcgccggtaaagagaccaatttttccctggcgtccgggctggaggctaaggatgaatgcagatcggcgatggaggcactcaaacagaaatccctgtacaactgtagatgcaagcgtggcatgaagaaagaaaagaactgtctgcgcatttattggtctatgtatcaatcattgcaaggaaacgaccttctcgaagattccccttacgagcctgttaattcccgcctgtctgatatcttcagggtggtaccattcataagcgtggagcatatccctaagggcaataactgtctcgacgcagctaaggcctgcaatctggatgatatctgcaagaaatatcgctccgcctacatcaccccctgtacaactagcgtctcgaacgacgtctgcaatcgcaggaaatgccacaaggccctaagacagtttttcgacaaagttcccgctaaacacagttacgggatgctattctgctcatgtagggatattgcatgcaccgaaagaagacggcagacaatcgtgcctgtgtgcagttacgaggagcgtgagaaacccaactgcctgaacctgcaggattcctgcaaaactaactacatttgcagatcccgtctcgccgacttcttcacgaactgccaaccagagagtcgctctgtgagttcttgtttaaaggagaactatgctgattgcctgctggcgtattctggattgatcggtactgtgatgacaccaaattacatcgatagttcctctctgagtgttgctccatggtgcgattgttccaactcgggcaacgacttggaagagtgtctgaagtttctcaacttctttaaagacaacacctgcctaaagaacgctatccaggcctttggcaacggaagcgacgtgactgtgtggcagcccgcttttcccgtgcaaacaacaacagccaccaccacgacagcgctgcgcgtgaaaaataaacctcttggtccggctggcagtgaaaatgagataccgactcacgtccttcccccttgcgccaacctgcaggcccagaaactgaaaagtaacgtttccgggaacacccatctgtgtatcagcaatggaaattacgagaaggagggcctgggcgcaagctcacacatcaccacgaaatctatggccgcacctccaagctgcggcctgagccctttgctggtgctcgtcgtgaccgcgctctccacactcctgtccctgactgagacaagctag

SEQ ID NO: 58240 - DNA, 1383 bp, Artificial Sequence
  derived and/or modified sequence
atgttccttgccacactgtactttgccttgccgctgttggatctgctgttaagcgccgaggttagcggaggcgatcggctggactgcgtcaaggcttctgaccaatgtctgaaagaacagtcatgttctacgaaatacaggaccctgagacagtgcgtggcagggaaggagactaactttagtctggctagcggactggaagccaaagatgaatgcagatctgctatggaagccttgaaacagaaatcattgtataattgtcgatgtaagaggggcatgaaaaaagaaaaaaattgcctgaggatatactggtccatgtaccaatcacttcaaggaaatgacctgttagaggatagtccctacgagcccgtgaactccaggttgagcgacatatttagagtggtgccatttatctctgtggaacacattcctaagggaaataactgcttggacgccgcaaaggcttgcaatctcgacgacatttgcaagaagtaccgcagtgcttatataaccccctgtacaactagcgtctcaaacgatgtgtgtaatcggcgtaagtgccataaggctctgagacaattttttgacaaggtcccggcaaagcactcttatggcatgttattttgtagttgtcgagatatcgcgtgtactgaaaggcgccgtcagactatcgtccccgtttgttcatatgaagagagagagaagcctaattgtctgaacttacaggactcatgcaagaccaattatatctgcagatcacgattagcagacttcttcacaaattgccagcccgagtcccgttctgtcagcagctgcctcaaagaaaattatgcagattgtttactggcctattcaggcttgatcgggacagtgatgacacctaattacatagactcttcctccttatctgtggcaccttggtgcgattgtagtaactcaggcaatgacctggaagaatgcctaaaatttcttaacttctttaaagacaacacttgcttgaagaatgcaattcaggcctttggcaatggctcagacgtaacagtgtggcagcccgcttttcctgtacaaacaaccactgctaccacaacaaccgcgctgcgcgttaagaataagccactcggacctgccggatcggagaatgagatccccactcatgtccttccaccttgtgcgaatcttcaagctcagaagctgaaaagcaatgtgtccggaaatacacatctgtgtatcagtaacggcaattatgaaaaggaggggctaggggcaagttcacacatcacaactaagtcaatggcagcacccccaagttgcggactgagtccgctcctcgttcttgttgtgaccgcgttaagcactctgctgagcctgactgagaccagctag

SEQ ID NO: 58241 - DNA, 1035 bp, Artificial Sequence
  derived and/or modified sequence
atgcaggaggggaaattctggaaaggaatggctgaaacagggatgtggggatgcggggagtggatacccgtggagcatattcctaagggtaataactgcctggacgcggctaaggcttgtaatctcgatgatatttgtaagaaatacagaagcgcatatatcacaccatgcaccacatcggtgtctaacgacgtttgcaaccgccgaaaatgccacaaggccctcagacagttttttgacaaggttccagccaaacatagttacgggatgctgttttgtagctgcagagatatcgcttgcacagaacggaggcgccagactatagtccccgtgtgcagctatgaggaacgcgagaaaccgaattgcttgaacctccaggatagttgcaagacaaattatatatgcaggagcaggctggccgattttttcacaaactgtcagcctgagtcccggagtgtttccagctgcctcaaagagaactatgcagactgcttattggcctacagtgggctgatcgggaccgtaatgacccctaattatattgatagctcctcgttgtccgttgccccatggtgcgactgttccaatagcggcaacgacctggaggagtgtctgaaatttctgaacttttttaaggataatacttgcctaaagaacgccattcaagcctttggcaacggaagcgatgtaactgtctggcagcccgcatttcccgtgcaaaccactaccgctacaactacgaccgcactgagggtaaagaataaaccactcggcccagctggtagtgagaatgagatacctacgcacgtgctaccaccatgcgccaacctccaggcacagaaactcaaatctaacgtttcagggaatacgcacctgtgcatcagcaacggaaactatgagaaggagggactgggggcttcgtcacacattactactaagtcaatggccgcaccccctagctgtgggctctctcctctgctggtattagtggtgactgccctgtccacgctgctgtctttgaccgagacatcctag

SEQ ID NO: 58242 - DNA, 1383 bp, Artificial Sequence
  derived and/or modified sequence
atgttcctggccaccctgtacttcgccctgcccctgctggacctgctgctgagcgccgaggtgagcggcggcgacagactggactgcgtgaaggccagcgaccagtgcctgaaggagcagagctgcagcaccaagtacagaaccctgagacagtgcgtggccggcaaggagaccaacttcagcctggccagcggcctggaggccaaggacgagtgcagaagcgccatggaggccctgaagcagaagagcctgtacaactgcagatgcaagagaggcatgaagaaggagaagaactgcctgagaatctactggagcatgtaccagagcctgcagggcaacgacctgctggaggacagcccctacgagcccgtgaacagcagactgagcgacatcttcagagtggtgcccttcatcagcgtggagcacatccccaagggcaacaactgcctggacgccgccaaggcctgcaacctggacgacatctgcaagaagtacagaagcgcctacatcaccccctgcaccaccagcgtgagcaacgacgtgtgcaacagaagaaagtgccacaaggccctgagacagttcttcgacaaggtgcccgccaagcacagctacggcatgctgttctgcagctgcagagacatcgcctgcaccgagagaagaagacagaccatcgtgcccgtgtgcagctacgaggagagagagaagcccaactgcctgaacctgcaggacagctgcaagaccaactacatctgcagaagcagactggccgacttcttcaccaactgccagcccgagagcagaagcgtgagcagctgcctgaaggagaactacgccgactgcctgctggcctacagcggcctgatcggcaccgtgatgacccccaactacatcgacagcagcagcctgagcgtggccccctggtgcgactgcagcaacagcggcaacgacctggaggagtgcctgaagttcctgaacttcttcaaggacaacacctgcctgaagaacgccatccaggccttcggcaacggcagcgacgtgaccgtgtggcagcccgccttccccgtgcagaccaccaccgccaccaccaccaccgccctgagagtgaagaacaagcccctgggccccgccggcagcgagaacgagatccccacccacgtgctgcccccctgcgccaacctgcaggcccagaagctgaagagcaacgtgagcggcaacacccacctgtgcatcagcaacggcaactacgagaaggagggcctgggcgccagcagccacatcaccaccaagagcatggccgccccccccagctgcggcctgagccccctgctggtgctggtggtgaccgccctgagcaccctgctgagcctgaccgagaccagctag

SEQ ID NO: 58243 - DNA, 1035 bp, Artificial Sequence
  derived and/or modified sequence
atgcaggagggcaagttctggaagggcatggccgagaccggcatgtggggctgcggcgagtggatccccgtggagcacatccccaagggcaacaactgcctggacgccgccaaggcctgcaacctggacgacatctgcaagaagtacagaagcgcctacatcaccccctgcaccaccagcgtgagcaacgacgtgtgcaacagaagaaagtgccacaaggccctgagacagttcttcgacaaggtgcccgccaagcacagctacggcatgctgttctgcagctgcagagacatcgcctgcaccgagagaagaagacagaccatcgtgcccgtgtgcagctacgaggagagagagaagcccaactgcctgaacctgcaggacagctgcaagaccaactacatctgcagaagcagactggccgacttcttcaccaactgccagcccgagagcagaagcgtgagcagctgcctgaaggagaactacgccgactgcctgctggcctacagcggcctgatcggcaccgtgatgacccccaactacatcgacagcagcagcctgagcgtggccccctggtgcgactgcagcaacagcggcaacgacctggaggagtgcctgaagttcctgaacttcttcaaggacaacacctgcctgaagaacgccatccaggccttcggcaacggcagcgacgtgaccgtgtggcagcccgccttccccgtgcagaccaccaccgccaccaccaccaccgccctgagagtgaagaacaagcccctgggccccgccggcagcgagaacgagatccccacccacgtgctgcccccctgcgccaacctgcaggcccagaagctgaagagcaacgtgagcggcaacacccacctgtgcatcagcaacggcaactacgagaaggagggcctgggcgccagcagccacatcaccaccaagagcatggccgccccccccagctgcggcctgagccccctgctggtgctggtggtgaccgccctgagcaccctgctgagcctgaccgagaccagctag

SEQ ID NO: 58244 - protein, 303 aa, Artificial Sequence
  derived and/or modified sequence
MSSTLPALLCVGLCLSQRISAQQQTLPKPFIWAEPHFMVPKEKQVTICCQGNYGAVEYQLHFEGSLFAVDRPKPPERINKVKFYIPDMNSRMAGQYSCIYRVGELWSEPSNLLDLVVTEMYDTPTLSVHPGPEVISGEKVTFYCRLDTATSMFLLLKEGRSSHVQRGYGKVQAEFPLGPVTTAHRGTYRCFGSYNNHAWSFPSEPVKLLVTGDIENTSLAPEDPTFPDTWGTYLLTTETGLQKDHALWDHTAQNLLRMGLAFLVLVALVWFLVEDWLSRKRTRERASRASTWEGRRRLNTQTL

SEQ ID NO: 58245 - DNA, 912 bp, Artificial Sequence
  derived and/or modified sequence
atgagcagcaccctgcccgccctgctgtgcgtgggcctgtgcctgagccagagaatcagcgcccagcagcagaccctgcccaagcccttcatctgggccgagccccacttcatggtgcccaaggagaagcaggtgaccatctgctgccagggcaactacggcgccgtggagtaccagctgcacttcgagggcagcctgttcgccgtggacagacccaagccccccgagagaatcaacaaggtgaagttctacatccccgacatgaacagcagaatggccggccagtacagctgcatctacagagtgggcgagctgtggagcgagcccagcaacctgctggacctggtggtgaccgagatgtacgacacccccaccctgagcgtgcaccccggccccgaggtgatcagcggcgagaaggtgaccttctactgcagactggacaccgccaccagcatgttcctgctgctgaaggagggcagaagcagccacgtgcagagaggctacggcaaggtgcaggccgagttccccctgggccccgtgaccaccgcccacagaggcacctacagatgcttcggcagctacaacaaccacgcctggagcttccccagcgagcccgtgaagctgctggtgaccggcgacatcgagaacaccagcctggcccccgaggaccccaccttccccgacacctggggcacctacctgctgaccaccgagaccggcctgcagaaggaccacgccctgtgggaccacaccgcccagaacctgctgagaatgggcctggccttcctggtgctggtggccctggtgtggttcctggtggaggactggctgagcagaaagagaaccagagagagagccagcagagccagcacctgggagggcagaagaagactgaacacccagaccctgtag

SEQ ID NO: 58246 - DNA, 912 bp, Artificial Sequence
  derived and/or modified sequence
atgtccagtactctgcccgcactgttgtgcgttggcttgtgtctcagtcaaaggatttccgctcagcaacagactctccccaagccctttatctgggccgagcctcattttatggtgcccaaggagaagcaagtcactatctgctgccaaggcaattacggtgcggtggagtaccagttgcatttcgaggggagcctcttcgctgtggaccgccctaaacccccagagcgcattaacaaggtaaagttttacatccccgacatgaactcaagaatggccggtcagtacagctgtatatatcgcgtgggggaactttggagcgagccctccaatctgctggacctcgttgtgacagaaatgtatgatactcctacactttcggtgcaccccggacctgaggtgatttccggagagaaggtgacattttattgccggctggacaccgccacaagtatgtttcttctcctcaaggagggtagatcatctcacgtgcaacgcggctatggcaaagtacaagctgagtttccgctgggtcccgtaaccacagctcacaggggaacgtaccggtgctttggttcctacaataaccacgcctggagttttcctagcgagccagtgaagctcttggtgactggcgatattgagaacacaagtctggctcccgaagaccccacatttcccgacacctggggcacatatctgctgaccacagaaactggactccaaaaggaccacgctctgtgggatcacaccgcccagaatctgcttcgtatgggtctagcctttctcgtcctcgtcgctctcgtctggttcctggtagaagactggctctcccgaaaacgcacacgggagcgggcatcccgagcttctacttgggaaggccggcggcggttgaatacccagactctgtag

SEQ ID NO: 58247 - DNA, 912 bp, Artificial Sequence
  derived and/or modified sequence
atgtctagtacgctccccgccttgctgtgcgtgggcctgtgcctctcccaaagaatctcagctcaacagcaaaccctgcccaaaccttttatttgggcagagccccattttatggtgccgaaggaaaaacaagtgacaatttgttgccagggcaattatggcgcggtcgagtaccagcttcattttgagggaagtctctttgctgtcgaccgccccaaacctcccgagaggatcaacaaggtgaagttttatatcccagacatgaatagtaggatggccggacaatactcctgtatttacagagtgggggaactgtggtccgagcccagtaatctgcttgatttggtcgtgaccgaaatgtacgatacccccaccctcagtgtgcaccccggcccagaggtcattagtggcgagaaggtcacattctattgtaggctcgatacagccacgagtatgttcctgttgctaaaagaagggagatcgagccacgtgcagcgtgggtacggcaaggtccaagcagaatttcctttgggtcccgtgaccacggcccatcgtggaacctaccggtgttttggttcgtacaacaaccatgcctggagcttcccttccgagccggtgaagctgctcgtgacgggcgacatcgaaaacaccagcttggcgcctgaggatccaacttttcccgacacctggggaacctacctcctcacgacagagactgggctgcagaaagaccatgccctctgggaccatactgcacagaatttgctccgcatgggtctggcattcctcgtgttggtggcactcgtgtggttcctggtggaagattggctgagcaggaaacggacccgggagcgggcaagcagggccagcacctgggagggccgcagacggctcaatacccagaccctttag

SEQ ID NO: 58248 - DNA, 912 bp, Artificial Sequence
  derived and/or modified sequence
atgagctccacccttccggccctgctctgcgtgggcctgtgtctttcgcagcgcattagcgcacagcagcagaccctccctaagcccttcatctgggcggagccacacttcatggttccgaaagagaaacaggttaccatctgctgtcagggcaattacggagccgtagagtaccaacttcatttcgaaggaagcctattcgccgtggaccggcccaaaccgcccgaacgaatcaataaagtcaaattctatatcccagacatgaattcgaggatggctggacagtactcatgtatctaccgagtcggcgagctctggtcagaaccctccaatctgctggacttagtggttaccgagatgtacgatactcctacacttagcgtgcatcctggcccagaagtgatatccggtgagaaagtaaccttttattgccgccttgatacggctacgagcatgttcctcctccttaaagaaggcaggtcttcacacgtccagcgaggttatggtaaggtgcaggctgaattccctctcggacccgtaaccacagcacaccgcggtacctatcgctgctttggctcctataataatcacgcatggtctttcccctccgagccagttaagctcctggtgacaggtgacatcgagaatacatccctggctcccgaggatcccacttttccagacacctggggcacttacctgttgacaaccgagaccggactacagaaagatcacgccttatgggaccacacggcccagaaccttctgcgtatggggcttgcattcctggtgttggtggccctcgtgtggttcttggtggaagattggctgtcccgcaaacggactcgggaacgcgccagtcgggcatctacctgggagggacgccggcgattgaatacgcagactctgtag

SEQ ID NO: 58249 - DNA, 912 bp, Artificial Sequence
  derived and/or modified sequence
atgtctagtaccctcccggctctcctgtgcgtgggactgtgtctgagccagcgaattagcgctcagcagcagacactcccgaagcccttcatatgggctgaacctcacttcatggtccctaaagaaaagcaggtgactatttgctgtcaggggaattatggagccgttgaatatcagctacacttcgaggggtcactgttcgcggtcgatcgtccaaagccccccgagagaattaataaggtgaagttttatattccagacatgaattctcggatggccggccagtattcatgtatttatagggtgggggagctctggagcgagccttctaacctcctcgacctagtcgtcacagagatgtatgacactccaacactctccgtccacccgggcccagaagtgatttctggtgagaaggtgacattttattgccggttggatactgctacctccatgttcttgcttttgaaagaaggccggtcttcgcacgtccagcgtggctacggaaaggtgcaagccgagttccccctgggccctgtgactacggcacaccgcggaacttaccgttgcttcggcagctataataaccatgcatggagctttccttcggaaccagtgaaactgcttgtgacgggtgacattgagaacacatccttggcacccgaagatccaacattccccgatacatgggggacatatctcctgacaactgagacaggccttcagaaagatcacgccctatgggaccacacggcacagaatctgctgcgcatggggctggctttcttggtcctcgtcgctctcgtctggtttctcgtggaagattggctgtcacggaagcggacccgagagcgggcatctcgtgcctccacgtgggagggccggcggcgccttaatacacagaccctgtag

SEQ ID NO: 58250 - DNA, 912 bp, Artificial Sequence
  derived and/or modified sequence
atgtccagcaccctgccggcactgttatgtgtgggattgtgtctgagtcaacgcatctctgcccagcaacaaaccctgccaaagcctttcatctgggccgaaccacacttcatggtgccaaaggaaaagcaggttaccatctgctgtcagggcaactatggagcggtcgagtatcagcttcattttgagggatcactgttcgcagttgatcgcccaaaacctccagaaaggattaacaaagtgaagttctacatcccagatatgaattcccgcatggcaggacaatattcttgtatttatagagttggagaactgtggtctgaaccatctaatctgctggatctcgtggtgaccgagatgtacgacacacctaccctgtctgttcaccctgggccggaagtgatcagcggggagaaagttacgttttactgccgtttagacaccgctacgtccatgtttctactgctgaaggagggcaggagctctcacgtacagcgcggttacggcaaggtccaggccgagtttccactgggcccagtgacgactgctcatcggggcacgtaccgttgtttcggctcgtacaacaaccacgcttggtcgttcccgagtgaaccagtcaaactgctcgttacaggcgatatcgaaaatacaagtctggcccccgaagacccaaccttcccggatacttggggtacctatctgttaacaactgaaaccggattacagaaagaccacgccttgtgggaccacaccgcacaaaacctgttacggatgggtttggctttcctggtgcttgtcgcccttgtatggtttcttgtcgaagactggctttcccggaagcgtaccagggagagggcgagtagggcgagtacatgggagggcaggcggcggctcaatacccaaacactctag

SEQ ID NO: 58251 - DNA, 912 bp, Artificial Sequence
  derived and/or modified sequence
atgtccagcacactgccggcccttctatgcgtcggattgtgcctaagccaaagaattagcgcgcagcaacagacgctgcccaagccatttatatgggctgagcctcattttatggtccccaaagaaaagcaagtcaccatctgctgccaaggcaattacggggccgtggagtatcagctgcactttgaaggatctctgtttgccgtcgacaggcccaagcctccagaacgcattaacaaagtgaaattctacatcccagacatgaacagcaggatggcaggtcaatattcctgtatctacagggttggcgaactctggtctgaaccctccaacctactcgatctggtggtaacagaaatgtatgacacaccgaccctgtccgttcatcctggtccggaggtcatatcaggcgagaaggtcaccttctactgccggctcgataccgccacatctatgtttctactgctaaaggaaggtcggagcagtcacgtgcagcgagggtatggaaaggtgcaggctgagtttcccttgggcccagtgactaccgcccataggggtacttatcgttgctttgggagttacaacaaccatgcgtggagttttccttccgagcctgtcaagctgctggtgacaggcgatatcgagaacacgtctcttgccccagaagacccgactttcccggatacgtggggaacctacctccttactacagagacgggcctgcagaaggatcacgctttgtgggaccacacggcccagaatttactgaggatggggcttgcgtttctcgtgctggtggccctagtctggttcctggtggaggattggctttcacgtaaacggactcgcgaacgggcctccagggcgagcacatgggagggccggagacgtcttaatacacaaacgctgtag

SEQ ID NO: 58252 - DNA, 912 bp, Artificial Sequence
  derived and/or modified sequence
atgagttccacactgccagccttactttgcgtcggcttgtgcctgagtcaaagaatctccgctcagcaacagaccttgccaaagccatttatatgggctgaaccacatttcatggtgcctaaggaaaaacaggtcactatttgctgccagggcaactatggtgcagtcgaataccagctgcactttgagggttcgctgttcgccgttgaccggcctaagccacccgaaaggatcaacaaagttaagttttatattccagatatgaattctaggatggctgggcagtacagctgcatctacagggtgggagaactttggtccgaaccttctaatctcctggacttggtggtgactgaaatgtatgacacacctacacttagcgttcatcccggccctgaggtcatctctggggaaaaggtcacattttactgtcgtctcgacacagccacgtctatgttcttgctgttgaaagagggccgtagctctcacgtccagagagggtacggaaaagtgcaggccgagttcccgttaggccccgttaccaccgcccatagggggacttataggtgcttcgggagctacaataaccacgcttggtccttcccctccgagcctgtcaagcttcttgtgacgggggatatcgagaatacctctttggctcccgaggaccctacgttccccgatacatgggggacctatctgctcacaactgaaacgggccttcagaaggaccatgccctgtgggatcataccgcgcagaaccttctgagaatgggactggcctttctggtgctagtggctttggtgtggttcctcgtagaggattggcttagtcgaaagcgtacacgtgaacgtgcctcgcgcgctagtacctgggaagggagaaggcggctcaatacacagactctgtag

SEQ ID NO: 58253 - DNA, 912 bp, Artificial Sequence
  derived and/or modified sequence
atgtcatctacattacccgccctactctgtgtggggctgtgcctgtcccagagaatctcggcccagcaacagacgctcccaaagcctttcatctgggcagaacctcattttatggtgcccaaagaaaaacaggtgactatttgttgccagggtaattacggcgcagtggaataccagctccacttcgaggggtcacttttcgcagtggaccgaccaaaaccacctgagagaatcaacaaagtgaagttctacatacccgacatgaactctcgcatggcaggtcagtatagctgcatttaccgggttggagaattatggagtgagcccagtaacctgctggacctggtagtcaccgaaatgtacgatactccgaccctgtccgtgcaccccggccccgaggtgatttccggcgagaaagtgactttctattgtcgcctcgatacagctaccagcatgttcctgctcctcaaagagggacggagttcccacgtccaaagaggatacggcaaggtccaagccgaattccctctcggccctgtgacgactgcccatcggggtacctatagatgttttggttcctataataaccatgcttggtctttcccaagcgagcccgtgaaactactggtcacgggagatatcgaaaatacttcactcgcaccagaggaccccactttcccggatacctggggcacatatctgctgaccacggaaactggtctccagaaagaccatgccttgtgggatcatactgcccagaacctgctgcgcatggggttggcttttttagttctagtggccctagtgtggtttctcgtggaggactggttatcccggaagagaacgagagagcgggcctccagagcaagcacatgggaagggaggagaaggttgaatacacagacgctttag

SEQ ID NO: 58254 - DNA, 912 bp, Artificial Sequence
  derived and/or modified sequence
atgagcagcaccctgcctgccctgctgtgtgtgggcctgtgcctgagccagaggatcagcgcccagcagcagaccctgcccaagcccttcatctgggccgagccccacttcatggtgcccaaggagaagcaggtgaccatctgctgccagggcaactatggagctgtggagtaccagctgcactttgagggcagcctgtttgctgtggaccggcccaagcccccagagcgcatcaacaaggtgaagttctacatcccagacatgaacagcaggatggccggccagtacagctgcatctacagagtgggggagctgtggagcgagcccagcaacctgctggacctggtggtgacagagatgtatgacacccccaccctgtctgtgcaccctggccctgaggtgatcagcggggagaaggtgaccttctactgccgcctggacacagccacctccatgttcctgctgctgaaggagggccgcagcagccacgtgcagaggggctacggcaaggtgcaggccgagttccccctgggccctgtgaccacagcccaccggggcacctaccgctgcttcggcagctacaacaaccacgcctggagcttccccagcgagcctgtgaagctgctggtgactggagacatcgagaacaccagcctggcccctgaggaccccaccttcccagacacctggggcacctacctgctgaccacagaaacaggcctgcagaaggaccacgccctgtgggaccacacagcccagaacctgctgaggatgggcctggccttcctggtgctggtggccctggtgtggttcctggtggaggactggctgagcaggaagaggacccgggagcgggccagccgggccagcacctgggagggcagaagaaggctgaacacccagaccctgtag

SEQ ID NO: 58255 - DNA, 912 bp, Artificial Sequence
  derived and/or modified sequence
atgagcagcaccctgcccgccctgctgtgcgtgggcctgtgcctgtcacaacgcattagcgctcagcagcagacactgccgaagccatttatttgggctgaacctcatttcatggtgccgaaagaaaaacaggtgaccatctgctgccagggtaattatggggctgtcgaataccaattgcattttgagggatccctgtttgcagtcgatcgaccgaaacctcccgagcgcataaataaagtgaagttttatatccccgatatgaatagcagaatggccggacaatatagttgtatttatcgggtcggagaactgtggagtgagccaagcaatttactggaccttgtggtgacagaaatgtacgatacccctacactttcggtccaccccggaccggaagtgatcagcggggagaaggtgaccttttactgccggctagacacggctacatcaatgttcctgttactgaaagagggccggtccagtcacgttcaacgcggctatggcaaggttcaggctgaattccctctgggccctgtgacgactgcccaccgaggtacctatcgctgttttgggtcatacaacaatcacgcctggtcatttccctcagaacccgtaaagctgctagttaccggagatatagagaatacgtccctcgcgcccgaggaccccaccttcccagatacatggggtacttacctgcttactacggagaccggattgcagaaagaccacgccttgtgggatcacacagcacagaaccttctgagaatgggtctggctttcctggtcctggtggcattagtgtggtttctcgtggaagactggctatctcgtaaacggactcgagaacgagccagccgggcctcaacatgggaaggccgaagacgcctgaacacccagacactgtag

SEQ ID NO: 58256 - DNA, 912 bp, Artificial Sequence
  derived and/or modified sequence
atgagcagcaccctgcccgccctgctgtgcgtgggcctgtgcctgagtcagagaatcagcgctcagcagcaaacgctgcctaaaccttttatttgggccgaaccgcacttcatggtgccaaaagaaaaacaggttacaatatgttgtcagggaaattacggagctgtggagtatcagctccacttcgaaggttccctgtttgccgtggacagaccgaaaccaccggagcgaataaataaggtaaagttctacattcccgatatgaattcccggatggctggtcagtatagttgtatctacagagtgggggaactctggtctgaaccatcaaatctgctagatctagtcgtgacagagatgtatgacacacctaccttgtctgttcatcccgggcctgaagtcatatcaggggagaaggtgacattttattgccgcctagacaccgctactagcatgttccttctgcttaaagagggacgatcgtctcacgtgcaacggggctatgggaaggtccaggccgaatttcccttggggccagttaccacagcacatcgcggcacataccgctgctttggctcttataacaaccacgcttggagtttcccgtcggagcccgtgaaattgctggtgacaggggatatcgaaaacactagtctagcgcctgaggaccctaccttcccggacacctggggaacttaccttctcactactgagaccggccttcagaaggaccacgctttatgggaccatactgcccaaaatctcctgcggatgggtttagcatttttagtgttggtggctcttgtttggttcctggtcgaggattggctgtcacgaaagagaaccagagagagagctagcagggcgtcaacctgggagggaagaagaagactgaacacacagacactatag

SEQ ID NO: 58257 - DNA, 912 bp, Artificial Sequence
  derived and/or modified sequence
atgagcagcaccctgcccgccctgctgtgcgtgggcctgtgcctgtcccagcggatctccgctcagcagcagaccctgcctaaacctttcatatgggctgagcctcacttcatggttcctaaggaaaagcaagtgaccatctgttgccaggggaactacggcgctgtagaataccagttacactttgaaggatctctgtttgccgtcgacagacctaagccgcccgaacgcattaacaaggtaaagttttacatcccagacatgaattccagaatggcgggccaatattcttgcatttaccgggtgggtgagttatggtccgaaccttccaatttgttagacctggtagtaaccgagatgtatgatacccccacactgtccgtgcaccccggacctgaggtaatctccggagagaaggtaactttttattgccgcctcgacacagctacttctatgttcctgctcctcaaggaaggacggtcgagccacgtgcagcgtgggtatggaaaggtgcaggccgagttccctttgggccctgtcaccaccgcccaccgcggaacctacagatgtttcggctcgtacaataaccacgcttggtcgtttccgtctgaacctgtgaagctactcgtaactggcgatattgaaaacactagcctggcccccgaggacccgacctttccggatacatggggaacttacctgctgaccaccgaaaccgggctgcaaaaggatcacgctctgtgggaccataccgcacagaatttacttcgtatgggcctcgcctttctggtgttggtggcgctggtctggttccttgtggaagattggctctcccgaaagcgaacccgcgaacgggcctcccgggcctctacatgggagggacggcgcagactgaacacacagaccttatag

SEQ ID NO: 58258 - DNA, 912 bp, Artificial Sequence
  derived and/or modified sequence
atgagcagcaccctgcccgccctgctgtgcgtgggcctgtgcctgtctcaacgaatcagcgcccagcagcagactctccctaaaccctttatctgggcagagccgcatttcatggttcctaaagaaaaacaggtcaccatatgctgccagggaaactacggtgcagtcgaataccagttgcactttgaaggctcgctttttgccgtcgatcgacctaagccccccgagaggatcaataaagttaagttctatatccctgacatgaatagcagaatggccgggcagtactcatgcatctacagggtgggtgaattgtggagcgagccatctaatctccttgacctggtggtcactgagatgtacgatactcccaccctgagcgttcacccaggccccgaagttatttctggcgagaaggtaactttttattgccgactggacaccgccacaagcatgtttctgctgctcaaagaagggcgctcaagccacgtgcagcgagggtacggcaaagtgcaggccgagttcccactgggaccagttaccaccgcccacaggggcacttacaggtgcttcggaagttacaataaccacgcttggtccttcccgtccgagcccgtgaaactgcttgttactggggatatcgaaaatacgtctctggcacctgaagaccccacattccccgatacatggggaacttacctgttaactacagagacaggcctacagaaagatcatgccctgtgggatcacacggcccagaatctcctgcggatgggtctggcgttcctggtacttgtggcccttgtctggttcctcgtcgaagactggctgtcgagaaaacggacccgcgagcgagcctcgagggccagcacatgggagggacggcgtcgtctcaatacccagactctgtag

SEQ ID NO: 58259 - DNA, 912 bp, Artificial Sequence
  derived and/or modified sequence
atgagcagcaccctgcccgccctgctgtgcgtgggcctgtgcctgagtcagcgaatcagcgcccagcagcaaacactacccaagccctttatttgggcagagccacacttcatggtgcccaaggagaaacaggttaccatttgttgccagggcaattatggcgcggttgagtatcagctccatttcgaagggagtttatttgcggttgatagacccaagccaccggagagaattaacaaggtgaagttttatattccggacatgaattcccgcatggctggccagtactcatgcatctacagagttggcgaactttggagtgagccctcaaacctgctggacctggtggtcacggaaatgtacgatacccccacgttaagcgtgcaccccggtcccgaggtgatatccggcgagaaagtgaccttctattgccgattagacaccgccacgagcatgtttctcctgctcaaggagggccggtcctcgcacgtacaacggggctatgggaaggtacaagcagaattccctctcggtccagtgactaccgcacatagagggacctatagatgtttcggctcctacaataaccacgcttggtcttttccgagcgaacctgtcaagctcctagtgacaggagatattgagaatacctctctcgcccctgaggaccctaccttcccagatacatgggggacctacctgcttacaaccgaaacaggactgcaaaaggaccacgccctgtgggatcatactgcacagaatctgctccgtatgggcctggccttcctggtgctagtggcgttagtgtggttccttgttgaggactggctgagccgcaagagaaccagggagagagcatcacgcgcttccacctgggaaggccggcgacgactgaatacccagacgttatag

SEQ ID NO: 58260 - DNA, 912 bp, Artificial Sequence
  derived and/or modified sequence
atgagcagcaccctgcccgccctgctgtgcgtgggcctgtgcctgtcacaaagaatctcagcccagcagcagactcttcctaaaccgttcatctgggccgaaccccacttcatggtccccaaagagaaacaggtgacaatttgttgccagggtaattacggcgccgtcgagtatcagcttcacttcgagggctctttatttgctgttgatcgccccaagccccccgagcggattaacaaagttaagttctatattcctgacatgaattccagaatggcaggccagtatagttgtatttacagagttggcgaactgtggtccgagcctagcaatttgctggacctcgtggtcaccgagatgtacgacaccccaaccttgtccgtgcatccaggccccgaagtcatcagcggcgagaaggtgacgttttactgtcggctagataccgcaacatctatgttcctgctcctgaaagagggcaggagctcccacgtacaacgagggtacggcaaagtccaggccgagtttcctctcggccccgtcactacagcccaccgcgggacttaccgctgcttcggcagctataacaatcatgcctggtctttcccaagtgaaccggtgaagctcctggtgacgggcgatatcgagaacacctctctcgcaccagaagatcctacctttcctgacacatgggggacttacctgctcaccacggagaccgggttacaaaaggaccacgcactgtgggaccataccgcccagaacctcctgcgcatgggattagccttcctcgtcctggtggcgttggtgtggttcctagtcgaggattggctatcgaggaagcggactagggagagagcctctagggctagtacctgggagggccgtcgacgtcttaacacccagacattgtag

SEQ ID NO: 58261 - DNA, 912 bp, Artificial Sequence
  derived and/or modified sequence
atgagcagcaccctgcccgccctgctgtgcgtgggcctgtgcctgagtcagcggattagcgcccagcagcaaaccctcccgaaaccgttcatttgggcggagccacatttcatggtgcctaaggagaagcaggtgacaatctgctgccaaggaaattatggcgccgtagagtaccagcttcacttcgaggggtctctatttgccgtggaccgccccaagccaccagaaagaattaacaaggtaaagttctatatccctgatatgaacagtcggatggccggtcagtattcctgcatctaccgggtgggggaactgtggagcgaacctagcaacttgttggacttggtggtgaccgagatgtacgacactcccaccctgtcagtgcaccccggccccgaggtcatatctggcgaaaaggtgacattctattgtcgcctggataccgccactagcatgtttctactgctcaaggaaggcaggtcttcccacgtacagagaggctatggtaaagtccaggcggagtttcccttgggccctgtcactactgcccaccgaggcacttatcgatgtttcggttcctacaataaccacgcatggagtttccccagtgagcccgttaaactgcttgttacaggcgatatcgagaatactagtctggccccggaagaccccacgttccccgatacttgggggacttatctgctgacaacagagaccggcctgcaaaaggaccacgccctgtgggaccacactgcccagaacctcctcaggatgggcttggctttcttagtgctggtggctctggtgtggttcctggtggaggactggctgagccggaagagaactagggagagggcatctagagcttcaacctgggagggtagacgacggcttaacacccagactttgtag

SEQ ID NO: 58262 - DNA, 912 bp, Artificial Sequence
  derived and/or modified sequence
atgagcagcaccctgcccgccctgctgtgcgtgggcctgtgcctgtctcaacgtatcagtgcccagcaacagaccctgcctaagccattcatctgggccgagccccacttcatggtgccgaaagagaagcaggttacaatctgttgtcaagggaactatggagcagtggagtatcagctgcacttcgaggggtctctcttcgcagtggacaggcctaaaccccccgaaagaattaataaggtcaaattttacattcccgatatgaacagtaggatggccggccagtactcttgtatctatcgcgtcggcgagctgtggtctgagccgagcaacctgttggacttagttgtcactgagatgtacgacacgcctacactcagcgttcaccctggccctgaggtgatttcaggggagaaggttacattctattgtcggctggataccgccacatcaatgtttctgttgctgaaggaggggcggtcttcacacgtccagcgcggttacggcaaggtccaggctgagttcccactgggaccggtgacaacggcccatcggggtacttatcggtgtttcgggagttacaacaatcacgcctggtcctttccctctgagccagttaaattgctcgtgacaggcgatatagagaatacgtccctcgcccctgaggaccctacatttcccgacacctgggggacctacttgctcaccactgaaacgggcctgcagaaggatcacgcactgtgggatcacaccgcgcagaacttactaaggatgggccttgcctttctggtcctggtggcactcgtgtggtttcttgttgaggactggctgagccgaaagagaacgagagagagggcctctcgagctagtacatgggaggggcgaaggagactcaacactcagaccctgtag

SEQ ID NO: 58263 - DNA, 1150 bp, Artificial Sequence
  derived and/or modified sequence
tccccactgctcagcactaggccggcagaatctgagcgatgtcttccacactccctgccctgctctgcgtcgggctgtgtctgagtcagaggatcagcgcccagcagcagactctcccaaaaccgttcatctgggccgagccccatttcatggttccaaaggaaaagcaagtgaccatctgttgccagggaaattatggggctgttgaataccagctgcactttgaaggaagcctttttgccgtggacagaccaaaaccccctgagcggattaacaaagtcaaattctacatcccggacatgaactcccgcatggcagggcaatacagctgcatctatcgggttggggagctctggtcagagcccagcaacttgctggatctggtggtaacagaaatgtatgacacacccaccctctcggttcatcctggacccgaagtgatctcgggagagaaggtgaccttctactgccgtctagacactgcaacaagcatgttcttactgctcaaggagggaagatccagccacgtacagcgcggatacgggaaggtccaggcggagttccccctgggccctgtgaccacagcccaccgagggacataccgatgttttggctcctataacaaccatgcctggtctttccccagtgagccagtgaagctcctggtcacaggcgacattgagaacaccagccttgcacctgaagaccccacctttcctgacacttggggcacctaccttttaaccacagagacgggactccagaaagaccatgccctctgggatcacactgcccagaatctccttcggatgggcctggcctttctagtcctggtggctctagtgtggttcctggttgaagactggctcagcaggaagaggactagagagcgagccagcagagcttccacttgggaaggcaggagaaggctgaacacacagactctttgaagaatgaccatgagacacagtggccatgggtggatctgaaagctggtgttgagcctgggcggcgtgagctctgtgttggacccacggaggagggagtcactgcagggaaagagggacactggcattccatttgtcagagcatcccggacgatgcagagggtgggagaactacatgctaaatttctttttttttttttttg

SEQ ID NO: 58264 - DNA, 912 bp, Artificial Sequence
  derived and/or modified sequence
atgtcttcgacactgccagctctgctttgcgtggggctctgtctgtcacagaggatttccgcccagcaacagaccctgccgaagccatttatctgggcggagccccatttcatggtaccaaaggagaaacaggtcaccatctgctgccaaggcaattacggtgcagttgaatatcagctacatttcgaggggagcctttttgctgtggatcgacctaagccacctgagcgcattaacaaagtgaagttttatatcccggacatgaattcccgtatggccggacagtattcgtgtatctaccgtgtgggcgagttgtggtccgagccttctaatttgctggatttggtcgtaaccgagatgtacgatacacccactttgtctgtgcaccccggtccagaagtgatctctggcgaaaaggtgaccttttactgtcgactggacaccgccacttctatgtttctgcttcttaaagagggcaggtcctcacacgtgcagcggggttacggtaaagtgcaggcagaattccctttaggtccggtgacaaccgcccaccgcggtacatatcggtgctttgggtcatataacaatcatgcctggagttttcctagtgagcccgtgaaactcctggtgactggcgacatcgagaatacctctcttgcgcctgaagatccgacattccctgatacttggggaacctatctgctcactactgaaacgggcttgcaaaaggatcacgccctttgggaccataccgcccagaacttactgagaatgggcctagcatttttggtgctggtggctctcgtgtggtttcttgtggaggattggttgtcccggaagagaacaagagaacgagccagcagggcgagcacatgggaggggagacggcgacttaatacgcaaacgctgtag

SEQ ID NO: 58265 - DNA, 912 bp, Artificial Sequence
  derived and/or modified sequence
atgagcagcacgctgcccgcactactgtgtgttggcttatgcctgtcccagagaattagtgcacagcagcagacactgccaaagccctttatttgggctgaaccccattttatggtaccgaaagaaaaacaggtcaccatctgctgccagggaaactacggcgctgtggaataccagctgcatttcgaagggtctctattcgcagtggatcgacccaaaccgcctgagaggatcaacaaagtcaagttctatatcccagacatgaacagcaggatggccggtcagtactcatgtatatatagggtcggcgagctgtggtctgaaccttccaacctgttggatttggttgtcactgaaatgtacgacacaccaaccctgtctgtgcaccctggcccagaggtgatcagcggagagaaagttacattttactgccgattagataccgctacctcaatgtttctgcttctcaaggaaggcagatcatctcacgttcagcgtggttatggaaaagtacaagccgagttccccctgggcccagtcaccactgcccatcggggaacctatcgatgttttgggagttataacaatcacgcttggtcatttccatcagaacctgtgaagttgctggttaccggagatattgagaacacttccttggcacctgaggatcctacttttcctgacacctggggcacttatctgttaaccaccgaaaccggcttgcagaaggaccacgcactttgggaccatacagcccagaatctcctccgaatgggcctggcgtttttagtactcgtggctctggtgtggttcctcgttgaggattggctgtctaggaagaggacaagagagcgtgcttcacgagcaagtacctgggagggacgccgtcgcctgaatacacagacgctgtag

SEQ ID NO: 58266 - DNA, 912 bp, Artificial Sequence
  derived and/or modified sequence
atgtcgtctacccttccagctctgttgtgcgtcggattatgcctgagtcagcgcattagcgcccagcagcaaacccttcctaagccttttatatgggcagagccccactttatggtccctaaggaaaaacaagtgaccatttgctgtcaaggcaattatggggcagtggagtaccagctgcatttcgagggctcactttttgctgtagatagacctaagccccctgagcgtataaataaagtgaagttttacattccagatatgaattcgaggatggccggtcagtacagctgcatttaccgggtgggcgagttatggtcagagccaagcaacctgctcgacctcgtggtgacagagatgtatgacacacccacgctttccgtccaccccggacctgaggtgatcagtggagaaaaggtcaccttctactgccgactggatacggccactagcatgtttcttttgttaaaggagggacgctcctcgcatgtccagcggggatatggcaaggtgcaggctgaattccctcttggtcccgtgacaactgctcacagaggaacgtatcggtgcttcggaagctataacaatcatgcttggagctttccatctgaacccgtaaagttgttggtgacaggcgacattgagaatacctctcttgctcctgaagatcccacattcccggatacctgggggacatacctgctcactacagaaacggggctgcaaaaggatcacgcattatgggatcacacagcccagaatctgctacgtatgggactggcatttctggtactcgtcgctctggtatggttcctggtggaggactggctctccaggaaaaggaccagggagcgtgcctcacgagcgagcacttgggaaggacggcgtcggctgaacacacagacgctgtag

SEQ ID NO: 58267 - DNA, 912 bp, Artificial Sequence
  derived and/or modified sequence
atgtcttcgactcttccagcattgctgtgtgtggggctttgtctgtcccagcgcattagcgcacaacagcaaactcttcccaagcctttcatctgggccgagccacactttatggtgcctaaggagaaacaggtgacaatctgttgccagggaaactatggagctgtggaataccagctgcattttgagggtagcctgtttgctgttgacagacccaagccacctgagcggattaataaggtaaagttctacattcctgacatgaactccaggatggctggacagtattcatgtatctacagggtcggcgagctatggagcgagccatcaaacttgctggatctagttgtgacagagatgtatgatactccaacactgtcagtacatcctggacctgaggtgattagcggagaaaaggtgacgttctactgccgcttggacacagccacgagcatgttccttctgctgaaagagggtcggtctagccatgtacagcgaggatacggcaaggttcaggccgaattcccgctaggcccagtgaccactgcccaccgaggcacctacaggtgttttgggtcctacaataatcatgcctggtcttttccctcagagcccgtcaaactcctggtgacgggcgatattgagaacacctcacttgcaccagaagacccaacctttcctgatacttggggtacgtacctgctgaccacagaaaccggcctgcaaaaagatcatgccctttgggatcacacggcccaaaacttgttgcgcatgggcctggcttttctagtcctggtggccctcgtctggtttctcgtggaagactggctgtctcggaaaaggacaagagagcgcgcaagtagagcgtctacgtgggaaggaagaaggagattgaacacacagacgctctag

SEQ ID NO: 58268 - DNA, 912 bp, Artificial Sequence
  derived and/or modified sequence
atgtccagcacactgcccgctctcctgtgcgtgggtctgtgtctgtcacagagaatcagtgctcagcaacagacacttccgaagccttttatttgggcagaaccacattttatggtgcccaaggagaagcaggtaactatatgctgtcaaggaaactacggtgctgtggagtatcagctgcacttcgaaggtagtctctttgctgtcgaccggcctaagccacccgaacggataaacaaagtcaagttttatattccagatatgaactcacgcatggcaggtcagtactcatgcatttatagggttggtgaactgtggtccgaaccgtctaatcttctcgaccttgtggtcaccgaaatgtatgacacccccaccctaagcgtccatcctggtcctgaagtgatttctggcgagaaagtcaccttttattgcaggctggacactgccacgtctatgtttctcctgctcaaagaaggcaggagctcacacgtccaaagagggtacggcaaggtgcaggcggagtttcctctgggacccgttacaacagcccatcggggaacttacagatgcttcggaagctacaataaccatgcatggtcctttccctccgagccagtgaagctccttgtgacgggagacattgagaacacctccctggcaccagaagacccaacgtttccggacacatggggcacatatttgttgaccaccgagactggacttcagaaggaccatgccctgtgggaccacactgcccagaatttactgaggatgggactggccttcttggtgctggtcgctcttgtgtggttccttgtagaggactggttgagtcggaaaagaacccgggagagggcgtctcgtgcttctacctgggaaggtagaaggcggctcaacacacagaccctgtag

SEQ ID NO: 58269 - DNA, 912 bp, Artificial Sequence
  derived and/or modified sequence
atgtcttcaaccctgcccgctcttctgtgtgtgggcctttgtttatctcagcggatcagcgcacagcaacaaaccctcccgaaaccgttcatttgggctgaaccccactttatggtaccaaaagagaaacaggtgaccatctgctgtcagggcaactatggagcggtcgagtaccagctgcactttgagggcagtctgttcgccgtggaccgccctaagccaccggagcgcataaacaaggtgaaattctacatcccagacatgaacagtcgtatggcgggacagtattcatgtatatatagggttggcgagttgtggtcagagccatccaatttactagacctggtcgtgacagagatgtatgacactcctaccttgagcgttcatccaggacctgaagtgatcagcggcgagaaagtaaccttttactgtagactagataccgccacctctatgtttctactgctcaaggaaggacgatctagccacgtccagcgcggatacggcaaagtgcaggctgagtttccattgggccctgtcaccaccgctcatagggggacttaccgatgcttcgggtcatacaataatcatgcgtggagcttcccttccgagccggtgaaactccttgtcacgggagacattgagaatacatctctcgctccagaggatcctacttttccggatacatggggcacttacctcctcaccaccgaaacaggactgcagaaggaccacgcattgtgggaccataccgcccagaacctgctccgtatgggcctggcttttctggtcctcgttgctctcgtgtggttcctcgtcgaggactggctgagccgaaagagaacaagagagcgcgcttcccgagcaagtacgtgggaggggaggcgacggttgaacacccagacactgtag

SEQ ID NO: 58270 - DNA, 912 bp, Artificial Sequence
  derived and/or modified sequence
atgtccagtacgcttcctgcccttttatgcgtgggcctgtgcctctctcagcggattagtgcccagcaacagactttgccgaaaccatttatttgggctgaaccccacttcatggtccctaaggagaaacaggtgacgatttgttgtcaaggcaactatggcgcagtcgagtaccagctccactttgaagggtcactgtttgctgtggatcggccaaagcccccagagcgcattaacaaggttaaattctatatacctgatatgaattctaggatggcaggacagtactcatgtatctatcgcgtcggcgaactctggagtgagccctctaacttgctggatttggtggtcacagagatgtatgacaccccaaccctgtctgttcatccgggacccgaggtgatttctggcgaaaaggttacattttactgcagactggacacggccacatccatgtttctcctgttgaaggagggccgatcatcgcatgtgcagcgtggctacggtaaggtacaagcagagtttccgcttgggccagtcactacagcccataggggcacttatagatgctttggaagctacaacaaccatgcatggagctttcccagcgagcccgtgaagcttctggtgacaggagatatcgagaacacttctttggctcccgaggatccaacgttcccagatacatggggtacatatctccttactactgaaacaggacttcagaaggaccacgccttgtgggaccataccgctcagaacctcctccgcatggggctggcctttctggtgcttgttgccttggtttggtttttggtggaggattggctcagccgtaagcgaacccgggagagagcctcccgggctagcacatgggaaggtaggcgacggctgaatacacagactttatag

SEQ ID NO: 58271 - DNA, 912 bp, Artificial Sequence
  derived and/or modified sequence
atgtcatccactttgccggctctcctgtgcgtgggcctctgtctgagccaacgtatttccgctcagcagcaaacattgcccaaaccctttatatgggcggaaccacacttcatggtgccgaaggagaaacaggttactatctgctgccaggggaactacggggctgtcgagtatcagcttcattttgaaggatctttgttcgctgtagaccggccaaaaccccctgagaggatcaataaagtcaaattctatattccagacatgaactccagaatggctggccagtacagctgcatctacagagtcggagagctttggtcagaaccaagtaatctgctggacttggtcgtcaccgagatgtatgatacacccaccctgtccgtacaccccggaccagaggtgatttctggcgagaaagtgacattttactgcaggctggatacagctactagcatgtttctcttgctcaaagagggtcggtccagtcatgtgcagaggggctacggtaaggtgcaggccgagttccctcttggtccagtaaccactgctcatagaggtacctatagatgcttcggtagctataataatcatgcatggtccttcccctcagagcccgtgaagttgcttgtcactggggacattgagaacacttctttggcccctgaagatccaaccttccccgatacctggggtacctaccttctgaccacagaaaccggtctgcagaaagaccacgcactgtgggatcatacagctcagaatctgctaagaatgggactggcatttctcgtgctcgtggccctggtgtggtttctggtggaagactggctgagccgaaagcgaactcgcgagagagcctccagagccagcacatgggaaggacgaagaaggctgaacacgcagaccttgtag

SEQ ID NO: 58272 - DNA, 912 bp, Artificial Sequence
  derived and/or modified sequence
atgagcagcacattgccagccctgctgtgcgtagggttgtgtctttcccaaaggatctctgcacaacagcagactctgcccaagccctttatctgggcagaacctcactttatggtgcccaaagaaaagcaggtgacaatatgctgccagggcaactatggagccgtggagtatcaacttcacttcgaaggaagtctgtttgccgtggacagaccaaaaccccccgagagaatcaacaaggtgaagttctacatccctgacatgaacagtagaatggcaggccaatacagctgcatctatcgggtgggcgaattgtggtctgaaccaagtaatctgttggatctggtggttacagaaatgtacgacacaccgacactgtcggtgcaccctggacccgaggttataagcggagagaaggttaccttctattgccgactggacaccgctacgagtatgtttctgctgctgaaagagggccgctcatcgcacgtccagcggggctatggaaaggtgcaagcagagttcccactaggcccggtgacaaccgcccacagggggacttacagatgttttggcagctacaacaatcacgcttggtcttttccttctgaaccggtaaagctgctcgtgactggcgacatcgagaacacgagtttagcgccagaggatccgacatttccggacacttggggcacctacctgttgacgaccgagactggacttcaaaaggatcatgcactctgggaccataccgcccagaaccttctgcgcatgggcctggctttcctggttctggtggcacttgtgtggtttctagtagaagattggctttcacgtaagcgcacacgtgaaagggctagtagagcatcaacctgggagggcagaaggcggcttaacacgcagacactctag

SEQ ID NO: 58273 - DNA, 912 bp, Artificial Sequence
  derived and/or modified sequence
atgagcagcaccctgcccgccctgctgtgcgtgggcctgtgcctgtctcagcggatttcagctcagcaacagacgctgccaaaaccatttatctgggccgagccacacttcatggttcccaaagagaaacaggtgacaatctgctgccagggcaattacggggccgttgaataccagctccacttcgaagggagcctgttcgccgtggatcgcccgaaaccgcccgagcggattaacaaggtaaaattttacattcctgatatgaacagcaggatggcgggacagtacagttgtatatatcgggtaggcgagctctggagtgaaccaagcaatctgctcgatcttgtcgttaccgagatgtatgacactcccaccttgtctgtccacccaggacccgaagtcatatctggggagaaagtgactttctactgtcgactagataccgccacatccatgtttcttctgctgaaagagggacggagctctcacgtgcagcgcggctacggtaaagttcaggctgagtttccccttggccctgtaaccaccgcgcacaggggaacgtataggtgctttggttcctacaataaccacgcctggtcattcccatccgagcctgtgaagttactcgttactggcgatattgagaatacttcacttgcccctgaagaccccacctttccagacacttggggaacctacttgttgaccacggagaccgggctgcagaaggaccacgctctgtgggatcatacggcccaaaacttactacggatgggtctcgcgtttctggtgcttgtggccttggtgtggttcttggtcgaagattggctcagtcgcaagcgcacccgggaacgggccagtcgagctagtacatgggaagggcgtagacggctaaacactcagacactctag

SEQ ID NO: 58274 - DNA, 912 bp, Artificial Sequence
  derived and/or modified sequence
atgtcatcgaccctgcccgctttgctgtgtgtgggtttatgcttatcacaaagaattagcgcccagcagcagacactgccaaagccctttatttgggccgagccacacttcatggtgccaaaggagaagcaggtgactatatgttgtcagggcaattacggcgcagttgaataccagttgcacttcgaagggagcttgttcgccgtcgacagacctaaaccaccagagagaatcaataaggtaaagttttacatccctgacatgaactctaggatggctgggcaatacagctgcatctaccgcgtgggtgagctttggagcgagccatctaacctcctggacctggtggtaactgagatgtacgataccccaacactgtcagtgcatcctggcccagaagtgattagcggcgagaaggttaccttctactgccgtctagatactgcaaccagtatgtttctgctgcttaaagaagggcgatcctcccacgtccagcggggttatgggaaagttcaggccgaattcccactcggtccagtgactaccgcgcacagaggcacctatagatgttttggtagttataacaaccacgcttggagctttccttcagagccggtcaaactcctcgtgacaggggacattgaaaacacctccctcgccccagaagatccaacattcccagacacatggggtacatatctgcttacaacagaaaccggtctccagaaggaccacgccttgtgggatcatacagcccagaacctgctgagaatgggccttgctttcctggttcttgtggccttggtttggtttttagttgaagactggctttcaagaaagcgtacaagggaacgcgcaagccgcgcttcaacctgggagggcaggcgcaggctaaacacccagaccctttag

SEQ ID NO: 58275 - protein, 287 aa, Artificial Sequence
  derived and/or modified sequence
MSSTLPALLCVGLCLSQRISAQQQTLPKPFIWAEPHFMVPKEKQVTICCQGNYGAVEYQLHFEGSLFAVDRPKPPERINKVKFYIPDMNSRMAGQYSCIYRVGELWSEPSNLLDLVVTEMYDTPTLSVHPGPEVISGEKVTFYCRLDTATSMFLLLKEGRSSHVQRGYGKVQAEFPLGPVTTAHRGTYRCFGSYNNHAWSFPSEPVKLLVTGDIENTSLAPEDPTFPDHALWDHTAQNLLRMGLAFLVLVALVWFLVEDWLSRKRTRERASRASTWEGRRRLNTQTL

SEQ ID NO: 58276 - DNA, 864 bp, Artificial Sequence
  derived and/or modified sequence
atgtcatcaaccctccccgccttactgtgtgtcggtctgtgtctgtcccagcgaatttccgcacagcagcagaccttgcctaaaccattcatttgggccgagcctcattttatggttcccaaagagaagcaggtcacaatttgctgccagggcaattacggggcagtcgagtaccagctgcatttcgaaggttccttgttcgcagtcgacagacccaagcctccggagcgcatcaacaaggtaaaattctacatcccagacatgaacagtaggatggcagggcagtacagctgcatctatagagttggggagttgtggtcggagccgtctaacttgttggacttagtggtcactgaaatgtacgacactcccactctctctgtccatcctggccccgaggtgatttctggtgagaaggttactttctactgccgcctggatactgccacttccatgttcctgcttctaaaagagggacgctcaagtcatgtgcaacggggctatggcaaggtgcaggctgaatttcccctgggtccagtgacgaccgcccaccggggaacctaccgctgcttcggctcctataacaatcacgcatggagcttcccttctgagccagttaaactgctggtgactggtgacatcgaaaacacatcactggccccggaagatccgaccttccctgaccacgccctgtgggatcacaccgctcaaaacttgctgaggatgggcctggcattcctggtgctagtagcactggtgtggttcttggtagaagactggctctccaggaagcggacgcgcgaaagagccagtagagcttccacttgggaaggacggcggagattgaatacacagacactctag

SEQ ID NO: 58277 - DNA, 864 bp, Artificial Sequence
  derived and/or modified sequence
atgagcagcaccctgcctgccctgctgtgtgtgggcctgtgcctgagccagaggatcagcgcccagcagcagaccctgcccaagcccttcatctgggccgagccccacttcatggtgcccaaggagaagcaggtgaccatctgctgccagggcaactatggagctgtggagtaccagctgcactttgagggcagcctgtttgctgtggaccggcccaagcccccagagcgcatcaacaaggtgaagttctacatcccagacatgaacagcaggatggccggccagtacagctgcatctacagagtgggggagctgtggagcgagcccagcaacctgctggacctggtggtgacagagatgtatgacacccccaccctgtctgtgcaccctggccctgaggtgatcagcggggagaaggtgaccttctactgccgcctggacacagccacctccatgttcctgctgctgaaggagggccgcagcagccacgtgcagaggggctacggcaaggtgcaggccgagttccccctgggccctgtgaccacagcccaccggggcacctaccgctgcttcggcagctacaacaaccacgcctggagcttccccagcgagcctgtgaagctgctggtgactggagacatcgagaacaccagcctggcccctgaggaccccaccttcccagaccacgccctgtgggaccacacagcccagaacctgctgaggatgggcctggccttcctggtgctggtggccctggtgtggttcctggtggaggactggctgagcaggaagaggacccgggagcgggccagccgggccagcacctgggagggcagaagaaggctgaacacccagaccctgtag

SEQ ID NO: 58278 - DNA, 1102 bp, Artificial Sequence
  derived and/or modified sequence
tccccactgctcagcactaggccggcagaatctgagcgatgtcttccacactccctgccctgctctgcgtcgggctgtgtctgagtcagaggatcagcgcccagcagcagactctcccaaaaccgttcatctgggccgagccccatttcatggttccaaaggaaaagcaagtgaccatctgttgccagggaaattatggggctgttgaataccagctgcactttgaaggaagcctttttgccgtggacagaccaaaaccccctgagcggattaacaaagtcaaattctacatcccggacatgaactcccgcatggcagggcaatacagctgcatctatcgggttggggagctctggtcagagcccagcaacttgctggatctggtggtaacagaaatgtatgacacacccaccctctcggttcatcctggacccgaagtgatctcgggagagaaggtgaccttctactgccgtctagacactgcaacaagcatgttcttactgctcaaggagggaagatccagccacgtacagcgcggatacgggaaggtccaggcggagttccccctgggccctgtgaccacagcccaccgagggacataccgatgttttggctcctataacaaccatgcctggtctttccccagtgagccagtgaagctcctggtcacaggcgacattgagaacaccagccttgcacctgaagaccccacctttcctgaccatgccctctgggatcacactgcccagaatctccttcggatgggcctggcctttctagtcctggtggctctagtgtggttcctggttgaagactggctcagcaggaagaggactagagagcgagccagcagagcttccacttgggaaggcaggagaaggctgaacacacagactctttgaagaatgaccatgagacacagtggccatgggtggatctgaaagctggtgttgagcctgggcggcgtgagctctgtgttggacccacggaggagggagtcactgcagggaaagagggacactggcattccatttgtcagagcatcccggacgatgcagagggtgggagaactacatgctaaatttctttttttttttttttg

SEQ ID NO: 58279 - DNA, 864 bp, Artificial Sequence
  derived and/or modified sequence
atgagcagcaccctgcccgccctgctgtgcgtgggcctgtgcctgtcccaacgcatcagtgcccagcagcagacattacctaagccatttatttgggccgagccacattttatggtacccaaagagaagcaagttacaatctgctgtcaggggaactatggcgctgttgaataccagctgcactttgagggctcactattcgccgtcgacagaccaaagcctcccgaacgcattaataaagtgaagttctatatcccggacatgaattcacgcatggccggtcagtacagctgcatttacagggtcggagagctttggagcgaaccttccaatctgttggacctggtggtcaccgagatgtatgacacgccgaccctgtccgtgcatcccggccccgaagtcatttctggggaaaaagtgaccttttattgtcggctggatactgcgacttctatgttcctgctgttgaaggagggtcggtctagtcatgtgcagcgtggatatgggaaggtgcaggcggagttcccgctgggcccggttacaacagctcatcgaggaacctatcggtgttttggctcctataacaaccacgcttggtcctttcctagtgagccagtgaagctcctcgtaacaggggacatagagaatacctcccttgctccagaagaccccacattccctgaccacgccctgtgggaccacacagcccagaatctgctcagaatggggctggctttcctcgtactggtagccctggtttggttcctggtggaggattggctgtcccggaagcgcacccgtgagagggcttcgcgcgcttcgacttgggaaggacggcgaaggctgaatacccaaaccctctag

SEQ ID NO: 58280 - DNA, 864 bp, Artificial Sequence
  derived and/or modified sequence
atgtctagtacactgccagccctcctttgcgtcgggctttgtctttcgcagagaatctccgcacaacagcagaccctgccgaaaccattcatttgggcagaacctcattttatggtccctaaggagaagcaggtgactatctgttgtcaggggaattacggagcggttgaatatcagctccattttgagggctctctgttcgcagtggacaggcccaaaccaccagaacgtatcaataaagttaagttctacatacccgacatgaatagccgaatggctggccaatactcttgcatctatcgtgtgggcgaactgtggtccgagccgtccaacctgctcgatctggtggtgacagaaatgtatgacaccccaacgttgagtgtacatccagggccagaggtgatttctggtgaaaaggtaaccttttactgtagactggatactgccacatccatgtttttattgctgaaagaaggccgtagcagccacgtgcaaagaggctacggaaaagtccaggcagagttccccttaggacccgtgaccacagcccaccgaggaacctacaggtgcttcggaagctacaataatcatgcttggtcattcccaagtgagccggttaaattgctggtcacaggggacatcgagaataccagcctggcccctgaggaccccaccttcccagaccacgcgctgtgggaccatacagcccagaacctacttagaatgggcctggcttttttagtgctagttgccctggtgtggtttttggtcgaagactggctgagcagaaagaggacccgtgagcgagcaagccgcgcttccacctgggagggacgaaggagattgaacacccagacgctgtag

SEQ ID NO: 58281 - DNA, 864 bp, Artificial Sequence
  derived and/or modified sequence
atgagcagcaccctgcccgccctgctgtgcgtgggcctgtgcctgagccagagaatcagcgcccagcagcagaccctgcccaagcccttcatctgggccgagccccacttcatggtgcccaaggagaagcaggtgaccatctgctgccagggcaactacggcgccgtggagtaccagctgcacttcgagggcagcctgttcgccgtggacagacccaagccccccgagagaatcaacaaggtgaagttctacatccccgacatgaacagcagaatggccggccagtacagctgcatctacagagtgggcgagctgtggagcgagcccagcaacctgctggacctggtggtgaccgagatgtacgacacccccaccctgagcgtgcaccccggccccgaggtgatcagcggcgagaaggtgaccttctactgcagactggacaccgccaccagcatgttcctgctgctgaaggagggcagaagcagccacgtgcagagaggctacggcaaggtgcaggccgagttccccctgggccccgtgaccaccgcccacagaggcacctacagatgcttcggcagctacaacaaccacgcctggagcttccccagcgagcccgtgaagctgctggtgaccggcgacatcgagaacaccagcctggcccccgaggaccccaccttccccgaccacgccctgtgggaccacaccgcccagaacctgctgagaatgggcctggccttcctggtgctggtggccctggtgtggttcctggtggaggactggctgagcagaaagagaaccagagagagagccagcagagccagcacctgggagggcagaagaagactgaacacccagaccctgtag

SEQ ID NO: 58282 - protein, 73 aa, Artificial Sequence
  derived and/or modified sequence
MSAETASGPTEDQVEILEYNFNKVDKHPDSTTLCLIAAEAGLSEEETQKWFKQRLAKWRRSEGLPSECRSVTD

SEQ ID NO: 58283 - DNA, 222 bp, Artificial Sequence
  derived and/or modified sequence
atgtccgctgagactgctagtggccctaccgaagatcaggtggaaatacttgaatacaatttcaacaaggtagataagcaccccgacagcaccaccctgtgcctgattgccgcagaagctggtctatccgaggaagagactcagaagtggtttaaacagcgtctggcgaagtggcggagaagcgagggccttccttctgagtgtaggtccgtgacagactag

SEQ ID NO: 58284 - DNA, 222 bp, Artificial Sequence
  derived and/or modified sequence
atgagcgctgagactgcttcgggtccaacagaggatcaggtcgagatcctggaatacaacttcaataaggttgataaacatccagattccactaccttatgcctcatagcagctgaagccggactgtctgaagaagagactcagaagtggtttaagcaacggttggcaaagtggaggaggtccgaaggtctgccatctgagtgcagatcagttaccgattag

SEQ ID NO: 58285 - DNA, 222 bp, Artificial Sequence
  derived and/or modified sequence
atgagcgccgaaactgcaagcggaccaacagaagaccaagttgagatattggagtataatttcaataaggtggacaaacatcctgacagcacaaccctatgcttgatcgctgctgaagcaggtttgtcggaggaggaaacgcaaaagtggttcaagcagcgcttggctaaatggcgtagaagcgagggcctgccatccgagtgcagaagcgtcaccgactag

SEQ ID NO: 58286 - DNA, 222 bp, Artificial Sequence
  derived and/or modified sequence
atgtctgccgaaacggcatccggtcctacagaagatcaagtggaaatacttgagtataactttaacaaggtggataaacacccggactccacaactctatgtctaattgctgcagaagccgggctttccgaggaggagacccagaaatggttcaagcagcggttggcaaagtggcggcggagcgaggggttgccgtcagaatgtaggtccgtgaccgactag

SEQ ID NO: 58287 - DNA, 222 bp, Artificial Sequence
  derived and/or modified sequence
atgtctgcagagactgcatctggtcctactgaggaccaagtcgagattctcgagtacaactttaataaggtagataagcatccagattcgaccacactctgcctaatcgccgctgaggcagggctgagtgaggaagaaactcagaaatggttcaaacagcgcttggccaagtggcggagaagcgagggcctcccttcagagtgccgatcggttacagattag

SEQ ID NO: 58288 - DNA, 222 bp, Artificial Sequence
  derived and/or modified sequence
atgtcggccgagacggcatctggtcctacagaagatcaggtggagatactggagtacaactttaacaaggtggataagcatcctgattctaccaccttgtgcctgattgctgcagaggcaggtttaagcgaggaggaaacacagaagtggttcaagcagagacttgccaagtggcgtaggtccgaaggactcccgagtgaatgtaggagcgtgaccgattag

SEQ ID NO: 58289 - DNA, 222 bp, Artificial Sequence
  derived and/or modified sequence
atgagcgctgagactgcaagcgggcctacagaggaccaggtggagattctggaatacaacttcaacaaggtggataagcatcctgactccactaccctgtgtctgatcgctgccgaagctgggctatccgaagaggaaacccagaagtggtttaagcagaggttggcgaagtggagaagatctgagggcctgcccagtgagtgccgctcagtcacagactag

SEQ ID NO: 58290 - DNA, 222 bp, Artificial Sequence
  derived and/or modified sequence
atgtccgccgaaactgcctccggacccacagaagatcaggtcgagattctggagtacaactttaataaggtggacaagcaccccgattcgacaactctgtgcctgatagctgccgaggcaggcctctcggaggaggagacccagaagtggtttaaacaacgtctagcaaaatggcggagaagcgagggcctaccatctgagtgcaggtccgtcactgactag

SEQ ID NO: 58291 - DNA, 222 bp, Artificial Sequence
  derived and/or modified sequence
atgtctgcggagactgcgagtgggccaacagaggaccaagttgaaattctcgagtacaacttcaataaagtagacaaacatcccgactctactaccctgtgcctcattgccgctgaggccggcctgagcgaagaagagacgcagaagtggtttaaacagagactggccaaatggcggaggtctgaaggactacccagcgagtgtcggagcgtgaccgactag

SEQ ID NO: 58292 - DNA, 222 bp, Artificial Sequence
  derived and/or modified sequence
atgtccgctgaaaccgcaagcggacctaccgaagaccaagtcgaaattcttgagtacaacttcaacaaggtggacaaacatcctgactcaactacactgtgccttatcgcagcagaggcagggctgtccgaggaagagacacagaagtggtttaagcagcggcttgctaaatggcggcgttccgagggcttgccctcagaatgtcgtagcgtaaccgattag

SEQ ID NO: 58293 - DNA, 144 bp, Artificial Sequence
  derived and/or modified sequence
atgtcggccgaaacagcatccggtccaacagaggatcaagtcgaaatcctggagtacaacttcaacaaagtcgataagcatcccgacagtacaacactttgtctgattgccgctgaggctggtctgtcagaggaggagacctag

SEQ ID NO: 58294 - DNA, 222 bp, Artificial Sequence
  derived and/or modified sequence
atgtctgctgagacagccagcggccccacagaggaccaggtggagatcctggagtacaacttcaacaaggtggacaagcacccagacagcaccaccctgtgcctgattgctgctgaggccggcctgtctgaggaggagacccagaagtggttcaagcagaggctggccaagtggaggagaagtgagggcctgcccagtgaatgtagatctgtgacagactag

SEQ ID NO: 58295 - DNA, 144 bp, Artificial Sequence
  derived and/or modified sequence
atgtctgctgagacagccagcggccccacagaggaccaggtggagatcctggagtacaacttcaacaaggtggacaagcacccagacagcaccaccctgtgcctgattgctgctgaggccggcctgtctgaggaggagacctag

SEQ ID NO: 58296 - DNA, 222 bp, Artificial Sequence
  derived and/or modified sequence
atgagcgccgagaccgccagcggccccaccgaggaccaggtggagattctggagtacaatttcaataaggtcgataaacacccagatagcaccacactctgcttaatcgctgccgaagccgggttatctgaagaagagactcagaaatggtttaaacaacggctggcgaagtggcgccggagtgaggggttgccatccgagtgtaggtcggttaccgactag

SEQ ID NO: 58297 - DNA, 222 bp, Artificial Sequence
  derived and/or modified sequence
atgagcgccgagaccgccagcggccccaccgaggaccaggtggagatactggagtacaacttcaataaagtggacaaacaccccgatagcaccactttgtgtctcatagcagctgaggcagggctgtcagaagaggagacacagaaatggttcaaacagcgcctcgccaaatggcgacgctcagaaggtctccccagtgagtgtcgctctgtgacggactag

SEQ ID NO: 58298 - DNA, 222 bp, Artificial Sequence
  derived and/or modified sequence
atgagcgccgagaccgccagcggccccaccgaggaccaggtggagatcctggaatacaacttcaataaagtagacaaacatccggattcaacaaccctctgcttgattgccgccgaagccggactctcagaggaagagacccagaaatggtttaaacagcgattagccaaatggaggaggagtgagggtctgccgtcggaatgtaggtctgttacagactag

SEQ ID NO: 58299 - DNA, 222 bp, Artificial Sequence
  derived and/or modified sequence
atgagcgccgagaccgccagcggccccaccgaggaccaggtggagattctggagtacaattttaacaaggtggacaaacatccagacagtactacactctgccttatcgcagctgaggccggactgagcgaggaagagactcaaaagtggtttaaacaaagactcgctaaatggcggcgatctgaaggactgccctccgagtgtcgctccgttaccgattag

SEQ ID NO: 58300 - DNA, 222 bp, Artificial Sequence
  derived and/or modified sequence
atgagcgccgagaccgccagcggccccaccgaggaccaggtggagattctcgaatataactttaacaaggtagacaaacaccctgactctacaaccttgtgccttatagccgccgaagcgggattatccgaggaggaaacacagaagtggttcaaacaaagattggctaaatggaggcgctccgaaggtttacccagcgagtgcaggtccgtcaccgattag

SEQ ID NO: 58301 - DNA, 222 bp, Artificial Sequence
  derived and/or modified sequence
atgagcgccgagaccgccagcggccccaccgaggaccaggtggagattctggaatacaatttcaataaggtggacaaacaccctgatagcaccacgctgtgcctgatcgctgctgaggctggcctctcagaggaagagacacagaaatggtttaagcagaggctcgcgaaatggaggcggtccgagggcctgcccagcgaatgccggtctgtgacagactag

SEQ ID NO: 58302 - DNA, 222 bp, Artificial Sequence
  derived and/or modified sequence
atgagcgccgagaccgccagcggccccaccgaggaccaggtggagatacttgagtacaacttcaataaagttgataaacaccctgactctaccactctgtgtctgatcgccgcggaggctggcttgtcagaggaagagacccagaaatggttcaagcagcgcctcgccaagtggagacgctcggaggggttgcccagcgaatgtaggagcgtgacagattag

SEQ ID NO: 58303 - DNA, 222 bp, Artificial Sequence
  derived and/or modified sequence
atgagcgccgagaccgccagcggccccaccgaggaccaggtggagatactcgaatataatttcaataaagtcgacaagcacccagatagcaccacactttgtcttattgccgccgaagccggcctgtcagaagaagagactcagaaatggttcaagcagaggctggccaagtggcgccgatctgaggggctgccgtccgagtgtcgctcagtcacggactag

SEQ ID NO: 58304 - DNA, 222 bp, Artificial Sequence
  derived and/or modified sequence
atgagcgccgagaccgccagcggccccaccgaggaccaggtggagattcttgagtataactttaataaagtggataaacaccctgacagcacaactttgtgccttatagcagcggaggcgggcctctccgaggaggaaactcagaagtggttcaagcagcggctggccaagtggcggcgtagcgagggtcttccgagtgagtgcaggtccgttaccgactag

SEQ ID NO: 58305 - DNA, 222 bp, Artificial Sequence
  derived and/or modified sequence
atgagcgccgagaccgccagcggccccaccgaggaccaggtggagattctcgagtataattttaacaaggtcgataagcaccctgactcaacaaccctctgcctcatcgctgctgaggccggactgtctgaggaggagacacagaaatggttcaagcagagactggcaaagtggcgacggtcagaaggcttgccctcagagtgtaggtccgttacggactag

SEQ ID NO: 58306 - DNA, 144 bp, Artificial Sequence
  derived and/or modified sequence
atgagcgccgagaccgccagcggccccaccgaggaccaggtggagattctggaatataatttcaataaagtggataaacaccccgacagcaccaccctctgcctgatcgccgccgaagcgggcctctcagaagaggaaacttag

SEQ ID NO: 58307 - DNA, 222 bp, Artificial Sequence
  derived and/or modified sequence
atgtccgccgaaactgcctccgggcctacagaagaccaggtagagatcctggaatataatttcaacaaggttgacaaacacccggatagcacaaccctgtgcctgatcgcagctgaagcgggtctgtcagaggaagagacccagaagtggtttaaacagaggctggccaagtggcgacggtcagaagggttgccctctgaatgcagaagtgtcaccgattag

SEQ ID NO: 58308 - DNA, 222 bp, Artificial Sequence
  derived and/or modified sequence
atgagcgcagagacagcctctggaccgaccgaggaccaggtggagatccttgagtataacttcaataaggtggacaaacacccagatagcacaacgctgtgtctgatcgccgctgaagccggacttagcgaggaggagacacagaagtggtttaagcagcgattggccaagtggcgtcggagcgagggcctcccaagcgagtgcaggtccgtgaccgactag

SEQ ID NO: 58309 - DNA, 222 bp, Artificial Sequence
  derived and/or modified sequence
atgagtgcggagacggcttcaggacctaccgaagaccaggttgaaattctggagtacaacttcaacaaagtggacaagcatcccgacagcaccactttgtgtttgattgcagccgaggcgggactctctgaggaagagactcagaaatggttcaaacaaaggctggccaagtggcgcagatcagaaggactgccctcagaatgtcggtctgtgactgactag

SEQ ID NO: 58310 - DNA, 222 bp, Artificial Sequence
  derived and/or modified sequence
atgtctgctgagactgcctctggaccaaccgaggaccaagtggaaattctggagtacaacttcaacaaagtcgataaacatccagactctacaaccctgtgtcttatcgctgcggaagcgggactttccgaggaggagacccaaaagtggttcaaacagcgcctggcaaagtggcgccgttctgagggactacctagcgaatgtcgttctgttactgattag

SEQ ID NO: 58311 - DNA, 222 bp, Artificial Sequence
  derived and/or modified sequence
atgagcgcggagacagccagcggcccaaccgaggaccaggttgaaatcctggagtacaatttcaacaaggtcgacaagcaccccgatagtacaacgctgtgcctgatcgccgctgaagccggtctgtctgaggaagagacgcagaaatggttcaagcaacgtctagccaagtggcggagatccgagggcctgccttcagaatgcagatccgtcactgattag

SEQ ID NO: 58312 - DNA, 222 bp, Artificial Sequence
  derived and/or modified sequence
atgagtgctgaaactgcttccgggcctacagaggatcaggtggagattttggaatataatttcaataaagtcgacaagcatccagactccacaacactgtgcctgattgcagcagaagccggattaagtgaggaggaaacacagaagtggttcaaacagaggctggctaagtggcgtcgctcagagggattaccatccgaatgtagatccgtgacggactag

SEQ ID NO: 58313 - DNA, 222 bp, Artificial Sequence
  derived and/or modified sequence
atgagcgcagagacagctagtgggccaaccgaagatcaagtcgaaatactcgaatacaatttcaacaaggtggataagcaccctgattctaccaccctgtgtttgatcgccgctgaggccggactgagtgaggaagaaactcagaaatggttcaagcaacgactggctaaatggcggaggagtgagggactgccgtccgaatgtagatccgtaaccgactag

SEQ ID NO: 58314 - DNA, 222 bp, Artificial Sequence
  derived and/or modified sequence
atgtctgctgaaactgcaagtggtcccaccgaagaccaggtggaaatcctagagtacaattttaacaaagtggataagcacccagatagtacaaccctatgccttatcgccgctgaggccggtttatcggaggaagagactcagaagtggtttaagcagagactggcaaaatggaggcggagcgagggcttaccgtcagaatgccgcagtgtgaccgactag

SEQ ID NO: 58315 - DNA, 222 bp, Artificial Sequence
  derived and/or modified sequence
atgagtgccgagactgctagcgggcctacagaagaccaagttgagatacttgagtacaacttcaataaagtggataaacaccctgacagtacgactctatgtctgattgcagcagaggcaggcttgtccgaggaggagacgcagaaatggttcaaacagcggttggccaagtggaggaggtcagagggactgccgtccgaatgtaggtccgttaccgattag

SEQ ID NO: 58316 - DNA, 222 bp, Artificial Sequence
  derived and/or modified sequence
atgagtgcagagacggcctctgggcctacagaggatcaggtggagatactggagtacaatttcaataaggtggataagcacccagatagcaccactctttgtctgatcgctgccgaggccggtctgtctgaagaggagacacagaagtggttcaaacagcgcctagccaaatggaggcgttcagaagggctgccttctgaatgccggagtgttaccgattag

SEQ ID NO: 58317 - DNA, 144 bp, Artificial Sequence
  derived and/or modified sequence
atgtctgccgagactgcttcaggacctacagaagatcaggtcgaaattctggagtataacttcaataaagtcgacaaacaccccgacagtaccacactgtgtctgatcgccgcagaggccggtctgtcagaggaagagacctag

SEQ ID NO: 58318 - DNA, 222 bp, Artificial Sequence
  derived and/or modified sequence
atgagcgccgagaccgccagcggccccaccgaggaccaggtggagatcctggagtacaacttcaacaaggtggacaagcaccccgacagcaccaccctgtgcctgatcgccgccgaggccggcctgagcgaggaggagacccagaagtggttcaagcagagactggccaagtggagaagaagcgagggcctgcccagcgagtgcagaagcgtgaccgactag

SEQ ID NO: 58319 - DNA, 144 bp, Artificial Sequence
  derived and/or modified sequence
atgagcgccgagaccgccagcggccccaccgaggaccaggtggagatcctggagtacaacttcaacaaggtggacaagcaccccgacagcaccaccctgtgcctgatcgccgccgaggccggcctgagcgaggaggagacctag

SEQ ID NO: 58320 - protein, 94 aa, Artificial Sequence
  derived and/or modified sequence
MSAETASGPTEDQVEILEYNFNKVDKHPDSTTLCLIAAEAGLSEEETQGSDLISRSKIWHPESSPQREGYPHDSLPCLAFDYFSLLPPQCKEMV

SEQ ID NO: 58321 - protein, 112 aa, Artificial Sequence
  derived and/or modified sequence
MLIFLGCYRRRLEERAGTMSAETASGPTEDQVEILEYNFNKVDKHPDSTTLCLIAAEAGLSEEETQGSDLISRSKIWHPESSPQREGYPHDSLPCLAFDYFSLLPPQCKEMV

SEQ ID NO: 58322 - DNA, 285 bp, Artificial Sequence
  derived and/or modified sequence
atgagcgcagagacagcttcgggcccgacggaagaccaggttgagattctggagtacaacttcaataaggtggataagcacccagactctaccaccctgtgtctcatcgcggccgaggctggcctttctgaagaggagacacaaggatccgacttgatcagtagatctaagatctggcaccctgagtcatcacctcagagggaaggctacccgcacgattctctgccatgcctggccttcgactatttcagtctcctcccaccacaatgcaaggagatggtgtag

SEQ ID NO: 58323 - DNA, 285 bp, Artificial Sequence
  derived and/or modified sequence
atgtcagccgagacagctagcggcccgactgaggatcaggtggagatcctcgaatataatttcaacaaggtggacaagcacccggattcaactacgctgtgtctgattgctgctgaggccggactgagcgaggaggagacgcaaggtagcgaccttatcagccggtccaagatctggcaccccgagtccagtccacagcgggagggctacccgcacgacagcttgccctgcctcgctttcgactatttctccctcctgccacctcagtgcaaagaaatggtctag

SEQ ID NO: 58324 - DNA, 285 bp, Artificial Sequence
  derived and/or modified sequence
atgagcgcagaaaccgctagcggtccaacagaggaccaggttgagatcctggagtacaacttcaataaagtggacaaacatcctgacagcactacgctttgtctaatcgccgctgaagcgggactttccgaggaagaaacgcagggaagtgacctgatcagcaggagcaagatctggcacccagaatccagcccacagcgcgaaggatatcctcatgatagtctcccgtgtctcgcatttgactattttagtctgctcccgccacagtgtaaagagatggtgtag

SEQ ID NO: 58325 - DNA, 339 bp, Artificial Sequence
  derived and/or modified sequence
atgctgatctttttgggatgttaccggcgcaggctcgaggagcgtgccgggaccatgagcgctgagactgccagcggtccaaccgaggaccaggtcgaaattttggagtataacttcaacaaagtggataagcaccctgattcgacgactctgtgtctgatcgcggcagaggcaggtctgtccgaggaagagactcagggttccgacctgatatccaggagcaaaatatggcaccccgaatcatctccacagcgtgagggatatcctcacgatagcctgccctgtctggctttcgactatttctcgctgctgcctcctcagtgtaaagaaatggtgtag

SEQ ID NO: 58326 - DNA, 1247 bp, Artificial Sequence
  derived and/or modified sequence
acccagggcttgcgcttgcctttgcctcttccacactaatgacagactgccccactgagaagggtctagcggagcacaggtcaccagctgggcaacattcagaaagttagtcttcctatgctcattttcctgggctgttacagaagaagactggaagagcgcgcagggaccatgtcggcggagaccgcgagcggccccacagaggaccaggtggaaatcctggagtacaacttcaacaaggtcgacaagcacccggattccaccacgctgtgcctcatcgcggccgaggcaggcctttccgaggaggagacccagggtagtgatttgatctccaggagcaaaatatggcacccagaaagtagcccccaaagagaaggctacccccatgatagtctgccgtgcttggctttcgattacttttctctactgccgccccagtgtaaagaaatggtttaagcagcgcctggcaaagtggcggcgctcagaaggcctgccctcagagtgcagatccgtcacagactaaggagatggcaggcattgacagcttcactccatgaaggccatctctgtttctctcctccgcttaaccaagctgttgtggtttttcagcatagtgttgtatgttccattgctagctgtcctgctgtttaacacagtgttgtattttttttctaaatgtacataattagaaaagaaaataacaataggaagctatgtgtatcttctgtgtaaagcagtggcttcactggaaaaatggtgtggctagcatttccctttgagtcatgatgacagatggtgtgaaaaccatctaagtttgcttttgaccatcacctcccagtagcaatttgctttcataatccatttagcaatccaggcctctgttgaaaagataatatgagggagaagggaacacatttccttctgaacttacttccctaagtcactttccttatgtatcatctaatacaatgatggttgagtgaaaatacagaaggggtgtttgagtattcagatttcataaaacacttccttggaatatagctgcattaacttggaaagaagcctgttgggccagaagacagaaactccaactggcaaaaaagcaagcatctaagaaaaaaaaccaccaaagttcttgaatttactatatttaaatgcattggttaagtttattttgctaaataaagtgaactgctttttgtctctaaaatgatattctaaataaaaccttaactttttgttgaaga

SEQ ID NO: 58327 - DNA, 1289 bp, Artificial Sequence
  derived and/or modified sequence
acccagggcttgcgcttgcctttgcctcttccacactaatgacagactgccccactgagaagggtctagcggagcacaggtcaccagctgggcaacattcagaaagttagtcttcctatgctcattttcctgggctgttacagaagaagactggaagaggtaatttccaaggttcttcccagctctgaagttgtgtgtcaaagcgcgcagggaccatgtcggcggagaccgcgagcggccccacagaggaccaggtggaaatcctggagtacaacttcaacaaggtcgacaagcacccggattccaccacgctgtgcctcatcgcggccgaggcaggcctttccgaggaggagacccagggtagtgatttgatctccaggagcaaaatatggcacccagaaagtagcccccaaagagaaggctacccccatgatagtctgccgtgcttggctttcgattacttttctctactgccgccccagtgtaaagaaatggtttaagcagcgcctggcaaagtggcggcgctcagaaggcctgccctcagagtgcagatccgtcacagactaaggagatggcaggcattgacagcttcactccatgaaggccatctctgtttctctcctccgcttaaccaagctgttgtggtttttcagcatagtgttgtatgttccattgctagctgtcctgctgtttaacacagtgttgtattttttttctaaatgtacataattagaaaagaaaataacaataggaagctatgtgtatcttctgtgtaaagcagtggcttcactggaaaaatggtgtggctagcatttccctttgagtcatgatgacagatggtgtgaaaaccatctaagtttgcttttgaccatcacctcccagtagcaatttgctttcataatccatttagcaatccaggcctctgttgaaaagataatatgagggagaagggaacacatttccttctgaacttacttccctaagtcactttccttatgtatcatctaatacaatgatggttgagtgaaaatacagaaggggtgtttgagtattcagatttcataaaacacttccttggaatatagctgcattaacttggaaagaagcctgttgggccagaagacagaaactccaactggcaaaaaagcaagcatctaagaaaaaaaaccaccaaagttcttgaatttactatatttaaatgcattggttaagtttattttgctaaataaagtgaactgctttttgtctctaaaatgatattctaaataaaaccttaactttttgttgaa

SEQ ID NO: 58328 - DNA, 635 bp, Artificial Sequence
  derived and/or modified sequence
accagatctacgctttgaaatgaggcaacatctaactggaaactcgctcaaacgcgcagggaccatgtcggcggagaccgcgagcggccccacagaggaccaggtggaaatcctggagtacaacttcaacaaggtcgacaagcacccggattccaccacgctgtgcctcatcgcggccgaggcaggcctttccgaggaggagacccagggtagtgatttgatctccaggagcaaaatatggcacccagaaagtagcccccaaagagaaggctacccccatgatagtctgccgtgcttggctttcgattacttttctctactgccgccccagtgtaaagaaatggtttaagcagcgcctggcaaagtggcggcgctcagaaggcctgccctcagagtgcagatccgtcacagactaaggagatggcaggcattgacagcttcactccatgaaggccatctctgtttctctcctccgcttaaccaagctgttgtggtttttcagcatagtgttgtatgttccattgctagctgtcctgctgtttaacacagtgttgtattttttttctaaatgtacataattagaaaagaaaataacaataggaagctatgtgtatcttctgtgtaaagcagtggct

SEQ ID NO: 58329 - DNA, 1672 bp, Artificial Sequence
  derived and/or modified sequence
gcaccagatctacgctttgaaatgaggcaacatctaactggaaactcgctcaaagtaaggaagtggatgagaagactcagggtcccttttctcttccccgtcttctctcagccacatctctcttatcctatcttggtgaagaagcttgcttggctaggagagaggtcagggacgagaagatagtgacgagaaagttccatgagactctcagaagtcccagcctgaacatcaaacctgaataaccaggagagacgtaacctcggcatactttcagtggtttacctcctgcccacgctgcaggtttttcaggtccttgctcgagtgtgtgctcataggcgtaaataaacgtgctatcagcagcctgcgtcagccagcccagctatttaagcaggctggcatcagcaaacacagcttccaaacccagggcttgcgcttgcctttgcctcttccacactaatgacagactgccccactgagaagggtctagcggagcacaggtcaccagctgggcaacattcagaaagttagtcttcctatgctcattttcctgggctgttacagaagaagactggaagagcgcgcagggaccatgtcggcggagaccgcgagcggccccacagaggaccaggtggaaatcctggagtacaacttcaacaaggtcgacaagcacccggattccaccacgctgtgcctcatcgcggccgaggcaggcctttccgaggaggagacccagggtagtgatttgatctccaggagcaaaatatggcacccagaaagtagcccccaaagagaaggctacccccatgatagtctgccgtgcttggctttcgattacttttctctactgccgccccagtgtaaagaaatggtttaagcagcgcctggcaaagtggcggcgctcagaaggcctgccctcagagtgcagatccgtcacagactaaggagatggcaggcattgacagcttcactccatgaaggccatctctgtttctctcctccgcttaaccaagctgttgtggtttttcagcatagtgttgtatgttccattgctagctgtcctgctgtttaacacagtgttgtattttttttctaaatgtacataattagaaaagaaaataacaataggaagctatgtgtatcttctgtgtaaagcagtggcttcactggaaaaatggtgtggctagcatttccctttgagtcatgatgacagatggtgtgaaaaccatctaagtttgcttttgaccatcacctcccagtagcaatttgctttcataatccatttagcaatccaggcctctgttgaaaagataatatgagggagaagggaacacatttccttctgaacttacttccctaagtcactttccttatgtatcatctaatacaatgatggttgagtgaaaatacagaaggggtgtttgagtattcagatttcataaaacacttccttggaatatagctgcattaacttggaaagaagcctgttgggccagaagacagaaactccaactggcaaaaaagcaagcatctaagaaaaaaaaccaccaaagttcttgaatttactatatttaaatgcattggttaagtttattttgctaaataaagtgaactgctttttgtctctaaaatgatattctaaataaaaccttaactttttgttgaagatgcactg

SEQ ID NO: 58330 - DNA, 285 bp, Artificial Sequence
  derived and/or modified sequence
atgtctgctgagacagccagcggccccacagaggaccaggtggagatcctggagtacaacttcaacaaggtggacaagcacccagacagcaccaccctgtgcctgattgctgctgaggccggcctgtctgaggaggagacccagggcagtgacctgatcagccgcagcaagatctggcaccctgagagcagcccccagcgggagggctacccccatgacagcctgccctgcctggcctttgactacttcagcctgctgcccccccagtgcaaggagatggtgtag

SEQ ID NO: 58331 - DNA, 339 bp, Artificial Sequence
  derived and/or modified sequence
atgctgatcttcctgggctgctacagaagaaggctggaggagcgggccggcaccatgtctgctgagacagccagcggccccacagaggaccaggtggagatcctggagtacaacttcaacaaggtggacaagcacccagacagcaccaccctgtgcctgattgctgctgaggccggcctgtctgaggaggagacccagggcagtgacctgatcagccgcagcaagatctggcaccctgagagcagcccccagcgggagggctacccccatgacagcctgccctgcctggcctttgactacttcagcctgctgcccccccagtgcaaggagatggtgtag

SEQ ID NO: 58332 - DNA, 285 bp, Artificial Sequence
  derived and/or modified sequence
atgagcgccgagaccgccagcggccccaccgaggaccaggtggagatcctcgagtataacttcaacaaagtggacaagcatcccgattctaccacactgtgcctgattgccgcagaggcgggtctgtccgaagaggaaacccagggctcagatcttatatcaaggtccaaaatatggcatcccgagtcgtctccacaaagggagggatatccacacgatagtttgccctgccttgccttcgactatttcagcctcctccctccccaatgtaaggagatggtgtag

SEQ ID NO: 58333 - DNA, 285 bp, Artificial Sequence
  derived and/or modified sequence
atgagcgccgagaccgccagcggccccaccgaggaccaggtggagattctggagtacaactttaacaaagtcgacaagcatcccgactcaactacgttatgtctgatcgctgccgaagccggcctgagtgaggaagagactcagggctcagatttgatatcgcggagcaagatctggcaccctgaaagctcgcctcaacgggaggggtaccctcatgactctctgccatgcctagcatttgactatttctccctcttaccccctcaatgcaaagaaatggtttag

SEQ ID NO: 58334 - DNA, 285 bp, Artificial Sequence
  derived and/or modified sequence
atgagcgccgagaccgccagcggccccaccgaggaccaggtggagattctggagtataacttcaacaaggtagataagcaccctgactccacaaccctgtgtctgattgctgccgaggccggtcttagtgaagaagaaacacaggggtcagatctgatttcgcggtccaagatatggcatcctgagtcctccccccagcgggaagggtatccccacgattccctgccttgccttgcctttgactatttcagccttctcccaccccagtgcaaggaaatggtctag

SEQ ID NO: 58335 - DNA, 339 bp, Artificial Sequence
  derived and/or modified sequence
atgctgatcttcctgggctgctaccggcggcggctggaggagcgggccggaaccatgagtgcggagacggcctccggcccaactgaggaccaggtcgagatactcgagtataacttcaataaggtggataaacatccggattcaaccacactgtgtctgattgctgccgaggccggcctgtcggaggaggagacgcaggggtcagatctgatctccagatctaagatctggcatccagagtccagccctcaacgcgaaggatatcctcacgatagtctcccatgcctggcatttgattatttttctctgctaccgcctcagtgtaaagagatggtgtag

SEQ ID NO: 58336 - DNA, 285 bp, Artificial Sequence
  derived and/or modified sequence
atgtctgcggagacagcgagtgggccaaccgaggatcaggtagagatacttgaatacaattttaacaaggttgacaaacacccagattcaaccactctctgtttgatcgctgcagaggccggtctttcagaggaggaaacacaaggatccgacctaatttcacgaagcaaaatctggcatcccgagtcaagccctcaaagagaaggatacccccatgactccttgccctgcctggccttcgactacttctctctcttgcctcctcaatgcaaagaaatggtgtag

SEQ ID NO: 58337 - DNA, 285 bp, Artificial Sequence
  derived and/or modified sequence
atgtccgccgaaacggcgagcggtcctacggaggaccaggtggaaattctcgagtacaactttaataaggtggacaaacaccctgattctaccactctgtgtctcattgctgcagaagccggactctctgaggaggaaacacaaggatcagacctcatctcacggtcgaagatttggcacccagaatcttctccacaacgggagggttacccgcatgattccctcccctgcctggctttcgattatttttcccttctccccccacagtgcaaagagatggtgtag

SEQ ID NO: 58338 - DNA, 285 bp, Artificial Sequence
  derived and/or modified sequence
atgtccgcagaaactgcttcagggcctacagaagaccaagtggaaatcttggaatataacttcaataaagtcgacaagcatccagatagtaccacgctgtgcttaattgctgctgaagctggactgtctgaggaggagacgcagggtagcgacctgatttcgcgatcaaaaatctggcacccagagagctcaccccagcgagaggggtatccacatgatagcctcccttgtctggccttcgattatttcagtctgcttcctcctcaatgtaaggaaatggtgtag

SEQ ID NO: 58339 - DNA, 339 bp, Artificial Sequence
  derived and/or modified sequence
atgctcatctttctaggttgctatagacgaaggctggaagaacgggctggcacaatgagtgcagaaacagcctcaggcccaaccgaggatcaggttgagatcctggagtacaattttaacaaggtagataagcatccggattcaaccacactgtgcctgatagctgcagaggctgggctgtcggaagaagagacccaaggctcagatcttatttcacgcagcaagatttggcatccagagagctcgcctcagcgagagggctacccccacgacagcctaccctgtctcgcttttgattacttttcacttcttccccctcagtgcaaagagatggtttag

SEQ ID NO: 58340 - DNA, 285 bp, Artificial Sequence
  derived and/or modified sequence
atgagcgccgagaccgccagcggccccaccgaggaccaggtggagatcctggagtacaacttcaacaaggtggacaagcaccccgacagcaccaccctgtgcctgatcgccgccgaggccggcctgagcgaggaggagacccagggcagcgacctgatcagcagaagcaagatctggcaccccgagagcagcccccagagagagggctacccccacgacagcctgccctgcctggccttcgactacttcagcctgctgcccccccagtgcaaggagatggtgtag

SEQ ID NO: 58341 - DNA, 339 bp, Artificial Sequence
  derived and/or modified sequence
atgctgatcttcctgggctgctacagaagaagactggaggagagagccggcaccatgagcgccgagaccgccagcggccccaccgaggaccaggtggagatcctggagtacaacttcaacaaggtggacaagcaccccgacagcaccaccctgtgcctgatcgccgccgaggccggcctgagcgaggaggagacccagggcagcgacctgatcagcagaagcaagatctggcaccccgagagcagcccccagagagagggctacccccacgacagcctgccctgcctggccttcgactacttcagcctgctgcccccccagtgcaaggagatggtgtag

SEQ ID NO: 58342 - protein, 318 aa, Artificial Sequence
  derived and/or modified sequence
MAIKSIASRLRGSRRFLSGFVAGAVVGAAGAGLAALQFFRSQGAEGALTGKQPDGDADRKHCKFKPDPNIPPTFSAFNEDYVGSGWSRGHMAPAGNNKFSSKAMAETFYLSNIVPQDFDNNSGYWNRIEMYCRELTERFEDVWVVSGPLTLPQTRGDGKKIVSYQVIGEDNVAVPSHLYKVILARRSSVSTEPLALGAFVVPNEAIGFQPQLTEFQVSLQDLEKLSGLVFFPHLDRTSDIRNICSVDTCKLLDFQEFTLYLSTRKIEGARSVLRLEKIMENLKNAEIEPDDYFMSRYEKKLEELKAKEQSGTQIRKPS

SEQ ID NO: 58343 - DNA, 957 bp, Artificial Sequence
  derived and/or modified sequence
atggcaatcaagtcaatcgcatctaggctgagaggttccagacggttcctttctggatttgtagctggcgccgtcgtgggagcagcaggggccggccttgccgctctgcaattcttcagaagccagggcgctgaaggagccctaaccgggaagcaacccgacggtgatgccgatcgaaaacattgcaaatttaagcccgacccgaacataccacccacctttagtgcttttaacgaggactacgtaggctccggatggagtcggggacacatggcgcccgccggcaacaataagttttcatccaaggccatggctgagacattctacttgagtaatattgttccacaggacttcgacaataatagtggttattggaatcgaatcgagatgtactgtcgggagctgaccgagagatttgaagatgtctgggtggtgtccggaccactcaccctcccccagacgagaggagacggcaagaagatagtgtcgtaccaagttattggagaagataatgttgctgtccccagtcacctgtacaaggtgatcctggcaagacgatcctcagtctcaacagaaccccttgctctgggggcttttgtggtccccaatgaggctattggtttccagccccagctaactgagtttcaggtgtcactgcaggatctcgagaaactgtcaggccttgtgttcttcccacatttagatcgaacaagcgacatccgtaatatttgctccgtcgacacttgtaaactcctggactttcaagaattcaccctctatctttccacccggaagattgaaggggccagatctgtccttcgactagagaagatcatggagaacctgaaaaatgccgagatcgagcctgatgactatttcatgagtcgatacgagaagaagcttgaggaactcaaggccaaagagcagtccggcacgcagattcggaagcccagctag

SEQ ID NO: 58344 - DNA, 957 bp, Artificial Sequence
  derived and/or modified sequence
atggccatcaagagcatcgccagccggctgcggggcagccgccgcttcctgagcggctttgtggccggggctgtggtgggcgctgctggagctggcctggccgccctgcagttcttccgcagccagggcgctgagggcgccctgaccgggaagcagccagatggagatgctgacaggaagcactgcaagttcaagccagaccccaacatcccccccaccttcagcgccttcaatgaagattatgtgggcagcggctggagccggggccacatggccccagctggcaacaacaagttcagcagcaaggccatggccgagaccttctacctgagcaacatcgtgccccaggactttgacaacaacagcggctactggaaccgcatcgagatgtactgccgggagctgacagaaagatttgaagatgtgtgggtggtgtctggccccctgaccctgccccagaccagaggagatggcaagaagatcgtgtcctaccaggtgattggagaagataatgtggccgtgcccagccacctgtacaaggtgatcctggcccggcgcagctctgtgtccacagagcccctggccctgggcgcctttgtggtgcccaatgaggccatcggcttccagccccagctgacagagttccaggtgtccctgcaggacctggagaagctgagcggcctggtgttcttcccccacctggacaggaccagtgacatccggaacatctgcagcgtggacacctgcaagctgctggacttccaggagttcaccctgtacctgagcaccaggaagattgagggcgcccggtctgtgctgcggctggagaagatcatggagaacctgaagaatgctgagattgaaccagatgactacttcatgagccgctatgagaagaagctggaggagctgaaggccaaggagcagagcggcacccagatcaggaagcccagctag

SEQ ID NO: 58345 - DNA, 957 bp, Artificial Sequence
  derived and/or modified sequence
atggccatcaagagcatcgccagccggctgcggggcagccggcggttcctatctgggttcgtagctggcgccgtggtgggcgcagccggcgccggcctcgcggctcttcaattctttagatctcagggcgcagagggcgcgttgaccggtaagcagcccgatggcgacgctgacaggaaacactgcaagtttaagcccgatccgaacatcccacccaccttctccgccttcaacgaggactatgtagggtctggctggtctcggggccatatggccccggcaggtaataacaagtttagcagcaaagcaatggccgagacattctacctgtccaatattgttccacaggattttgacaataattccgggtactggaaccggatcgaaatgtactgtcgggaacttaccgagcgtttcgaggacgtttgggtggtgagtggtcctctcacactgcctcaaactcggggcgatgggaagaagatcgtttcctaccaagtgataggagaggataacgtcgcagtgccaagccacctatataaagttattctggcccgacgctccagcgtaagcaccgagccccttgctctaggagcgtttgtcgtgcccaacgaggccattggatttcagccccagcttactgagtttcaggtctccttgcaggatctggaaaagctgtccggcctggtcttctttccacacctggatcgcacgtctgacatcaggaatatctgctctgtagacacttgtaagttgttagacttccaggagtttacattatatttatctacacggaagatcgaaggggctcgatctgtcttacgcctcgagaaaatcatggagaacctgaagaacgctgagatagaaccggatgattatttcatgtctcggtatgaaaaaaaactggaagagttaaaggctaaggaacagtccggaactcagattcggaaaccatcctag

SEQ ID NO: 58346 - DNA, 957 bp, Artificial Sequence
  derived and/or modified sequence
atggcgattaagtctattgcctctagactgcgcggttcacgccgatttctgtccggcttcgtcgccggtgctgtggtcggggctgctggagctgggttggccgcactgcaattcttcaggtcacagggagccgagggcgctcttacagggaagcagcccgatggagatgccgatcgtaaacattgtaaatttaagcctgacccgaacataccgcctacgttctctgcctttaatgaggactacgtggggagcggttggtcacgcggacatatggcccctgcagggaacaataagttctcatccaaggcaatggccgaaacattttatctaagtaacatcgtgccccaggacttcgacaacaactctggatactggaacagaatcgaaatgtactgccgcgaactgacggaacggttcgaagatgtatgggtcgtatccggacccctgaccctcccccagacccgtggagacggaaaaaaaattgtcagttaccaggtcattggtgaagacaacgttgctgtgccctctcatctgtataaagttatcctggcccgacggtctagcgtgagtactgagccattggccctcggcgcattcgtggtgcccaatgaggcgattggattccaaccccagttgacggagtttcaggtgagtctgcaggatttggagaaactgtccgggctcgtcttttttcctcacctggacagaacaagcgatatccggaatatttgctctgttgacacctgcaagctcctggactttcaggagttcactctatatttatccacccggaaaatcgaaggggcaagatccgtcctaaggctggaaaaaatcatggagaatttgaaaaacgccgaaatagagcccgacgattatttcatgagccggtacgaaaaaaagctggaggaattaaaggccaaagagcagtctggaacacaaatccggaaaccaagctag

SEQ ID NO: 58347 - DNA, 957 bp, Artificial Sequence
  derived and/or modified sequence
atggccatcaagagcatcgccagcagactgagaggcagcagaagattcctgagcggcttcgtggccggcgccgtggtgggcgccgccggcgccggcctggccgccctgcagttcttcagaagccagggcgccgagggcgccctgaccggcaagcagcccgacggcgacgccgacagaaagcactgcaagttcaagcccgaccccaacatcccccccaccttcagcgccttcaacgaggactacgtgggcagcggctggagcagaggccacatggcccccgccggcaacaacaagttcagcagcaaggccatggccgagaccttctacctgagcaacatcgtgccccaggacttcgacaacaacagcggctactggaacagaatcgagatgtactgcagagagctgaccgagagattcgaggacgtgtgggtggtgagcggccccctgaccctgccccagaccagaggcgacggcaagaagatcgtgagctaccaggtgatcggcgaggacaacgtggccgtgcccagccacctgtacaaggtgatcctggccagaagaagcagcgtgagcaccgagcccctggccctgggcgccttcgtggtgcccaacgaggccatcggcttccagccccagctgaccgagttccaggtgagcctgcaggacctggagaagctgagcggcctggtgttcttcccccacctggacagaaccagcgacatcagaaacatctgcagcgtggacacctgcaagctgctggacttccaggagttcaccctgtacctgagcaccagaaagatcgagggcgccagaagcgtgctgagactggagaagatcatggagaacctgaagaacgccgagatcgagcccgacgactacttcatgagcagatacgagaagaagctggaggagctgaaggccaaggagcagagcggcacccagatcagaaagcccagctag

SEQ ID NO: 58348 - DNA, 1317 bp, Artificial Sequence
  derived and/or modified sequence
aaaaggccggtacctcgggcaagatggctatcaagagtatcgcttcccgcctccggggttcccgtcgttttctgagcggcttcgtggctggggctgtagtgggcgctgcgggagctgggctcgcggccctgcagttcttccggagtcagggcgctgagggagcgttgacagggaagcagccggatggtgatgcagacagaaagcattgtaaatttaagcctgatcccaatatccctccaaccttcagtgccttcaatgaagattatgttggaagtgggtggtcacgaggacacatggctccagcaggaaataacaaattttcaagtaaagccatggctgaaaccttttacctttctaacattgtgcctcaggattttgataataattctggatattggaacagaatagaaatgtactgtcgagagctgacagaaaggtttgaagatgtttgggtggtatctgggcctttgaccttacctcagactagaggcgatggaaagaaaatagttagttaccaggtgattggcgaggacaacgtggcagtcccctcacacctttataaggtaatcctggcccgcagaagctcagtatctaccgaaccactggcgctaggggcctttgtggtacccaatgaagccatcggcttccagccccagttaactgaattccaagtgagcctccaggacctagagaagttgtcaggactggtgttttttcctcatttggatagaactagtgatatccggaatatctgctctgtggacacctgtaagctcctggatttccaggagttcaccttgtacttgagtacaagaaagattgaaggagcccgatcagtgctcagactggaaaagatcatggaaaacttgaagaatgcagagattgaaccagatgattactttatgagtcgctatgagaagaagctagaagaactcaaagctaaggagcagtcaggaacccagataagaaagccatcctagtttttatctcaagatgtgtcataccgtctgtaatgaagcaggcatgccctctttaggctaacatattttagtggctttgctttttgctttttaaaaagtttttctctttaagagatgtggtctcgccgtgtcatccaggctggagtgcagtggtggaatcatagctcactatagcctcaaacttctgggcttaagcaatcctcctgcctctgccccctgagcagctgggactacaggcacacaccatcaccctcagctactagtggctttgctttaaagaaacagtggaatcctaaatttatgactaaaaattcccccaaaagatgaaagatctaca

SEQ ID NO: 58349 - protein, 177 aa, Artificial Sequence
  derived and/or modified sequence
MAWMLLLILIMVHPGSCALWVSQPPEIRTLEGSSAFLPCSFNASQGRLAIGSVTWFRDEVVPGKEVRNGTPEFRGRLAPLASSRFLHDHQAELHIRDVRGHDASIYVCRVEVLGLGVGTGNGTRLVVEKEHPQLGAGTVLLLRAGFYAVSFLSVAVGSTVYYQGKYAKSTLSGFPQL

SEQ ID NO: 58350 - DNA, 534 bp, Artificial Sequence
  derived and/or modified sequence
atggcctggatgctgctcctgatccttataatggtccaccctgggagttgtgccctgtgggttagtcagcccccagaaatacgcactctggaaggcagtagcgcgtttctgccctgttcttttaatgcttcccaggggagattagctatcgggagtgtaacttggtttagggatgaagtggttcctgggaaagaggtgcggaatggcactcccgagttccgagggcgccttgccccgctggcttcttctagatttctgcatgatcaccaggctgaactacatattcgtgacgtgaggggccatgatgccagtatctatgtgtgtagggtcgaagtgttgggcctgggagtgggtacaggcaacgggacgcgccttgtcgttgagaaggaacatccgcagcttggggcaggtactgtcctgcttctccgggcaggtttctacgcggtgtcttttttgagtgtcgcagtcgggtccacagtctattatcagggaaagtatgctaaaagtactctttctggcttccctcaactctag

SEQ ID NO: 58351 - DNA, 534 bp, Artificial Sequence
  derived and/or modified sequence
atggcgtggatgctactgctcatcctgattatggtgcaccccgggtcttgtgccctgtgggtatctcagccacccgagatcaggactctggaaggctcctctgcttttcttccatgcagtttcaacgcctcccaagggcgactagcaattggctccgttacctggttccgcgacgaagtggtgccggggaaagaagtgcggaacggaactcctgagttcagaggacggctggcacccctggcctcaagccgatttctgcatgatcaccaggccgaactgcacatcagagatgtacgggggcacgatgcatcaatttacgtgtgccgtgtggaagtgctcggattgggggtcggaactggaaacggtactaggttggtggtggaaaaagaacacccccagctcggcgccggaaccgtcctgctgcttagagcagggttctacgcggtttcctttttgagtgtggctgtaggatctaccgtctactaccagggcaaatatgctaagtccaccctgtctggctttccccaattatag

SEQ ID NO: 58352 - DNA, 534 bp, Artificial Sequence
  derived and/or modified sequence
atggcgtggatgctcctcctgatacttatcatggttcatcctggcagttgcgcactgtgggttagtcagccacctgagatccggaccctcgagggctcttccgcctttctgccttgttcgtttaatgctagccaagggcgattagccatcggttcagtcacgtggtttagagatgaggtggtacccggaaaagaagtgcggaatgggacaccagagtttcgcggcaggttggcccccctggcgtcttccaggtttttgcatgatcaccaggcagagctgcacattagggacgtacgaggtcacgacgcatctatatatgtctgtagggtggaggtcctgggtttaggggtgggcaccggtaatggcaccagactcgtggtggagaaggagcaccctcagcttggagcagggaccgtgctactgctccgcgcaggcttttacgccgtgtcgttcctatccgtggctgtgggctctaccgtatattatcaaggcaagtacgctaagtccacactctcaggcttcccccagctctag

SEQ ID NO: 58353 - DNA, 534 bp, Artificial Sequence
  derived and/or modified sequence
atggcctggatgctcctgctgatactcatcatggtgcatcctggttcttgcgccctatgggtgagccagcccccagagatcagaaccctggagggctcctccgccttcctgccttgttcgtttaatgcctctcaagggcgtcttgctatcggatctgtgacctggttccgggacgaagttgtgccgggtaaagaggtgagaaacggcacccctgagttcagggggagactagctcccctcgcctcctctagatttcttcacgaccatcaggcagagctccacattagggacgtgcgaggacacgacgcttctatctacgtgtgccgagtggaggtcctgggactcggcgttggtacaggaaacggtaccaggctcgtggtcgaaaaagagcaccctcagctcggagccggcacagtcctcttgctgagggccggcttctacgcagtcagctttttaagcgtggccgtgggatctactgtgtactaccaggggaagtatgccaagtctaccttatctggattcccccagctctag

SEQ ID NO: 58354 - DNA, 534 bp, Artificial Sequence
  derived and/or modified sequence
atggcttggatgcttcttctgattcttattatggtgcatccgggaagttgcgccttgtgggtatctcagccacctgaaattaggaccctggagggaagctctgcatttcttccttgttctttcaatgcctcccagggccggctggcaattggtagcgtgacttggtttagagatgaggtcgtaccaggcaaggaagtgaggaatgggacccctgagttccgcggtcgcctggcccccctagccagttctcgttttctccatgatcatcaggccgagctgcatataagagatgtgcgcggacatgacgcctccatctatgtatgtcgggtcgaagtccttgggctaggagtcggtacggggaatgggactcgattagtggtggaaaaagaacacccccagttgggcgccggcaccgttctgctgttacgggccggattttatgctgtctcttttctgagcgtggcagtgggaagtactgtgtactatcaaggcaagtacgccaaaagcacactgtccgggttccctcagctgtag

SEQ ID NO: 58355 - DNA, 534 bp, Artificial Sequence
  derived and/or modified sequence
atggcctggatgttattattgatcctgattatggtccaccccgggtcttgcgctctctgggtgtcccagccaccggagattaggaccctggaaggatcctccgccttcctgccctgcagcttcaatgccagtcagggacggctcgccataggctcagtaacttggttcagggacgaagtggtaccgggcaaagaggtgcgtaacggcacccctgaatttcgggggcggcttgcacctctcgccagctccagattccttcatgaccatcaggcggagctgcatattagagacgtcaggggtcacgatgcttcgatctacgtgtgtcgggtggaagtcttgggcttgggcgtaggaacgggcaacggtacccggttggtcgtcgagaaagagcaccctcagctcggcgccggtacagtcctgctgctgcgcgcgggcttttatgcagtgtcattcctttccgtggcagttgggagcacagtttactatcagggcaagtacgccaaatccacactgagcggatttccgcagctgtag

SEQ ID NO: 58356 - DNA, 534 bp, Artificial Sequence
  derived and/or modified sequence
atggcgtggatgctcctgctgatactcatcatggtccatccaggtagttgcgccctgtgggtatcacaacccccagagattagaaccctcgagggatcctctgcctttctcccttgctccttcaatgcttctcaaggcagactcgccatcggaagtgttacttggtttcgcgatgaggtggtacccggcaaggaagtgaggaacggcacgccagaatttagaggacgacttgctccacttgcaagctctcggtttttgcacgaccatcaggccgagttacacatcagggacgtccggggacacgacgcttcaatctacgtgtgcagggtggaggtgctgggccttggcgtgggtaccgggaacggcacgcgactggtggtcgaaaaggagcacccccagctcggggccggcacagtcctcctgctgcgcgcagggttttacgcagtctctttcctctccgttgccgtggggtccactgtatactaccaagggaaatacgcaaaaagcacgctgtcgggtttcccgcagctatag

SEQ ID NO: 58357 - DNA, 534 bp, Artificial Sequence
  derived and/or modified sequence
atggcatggatgctgctcctcatcctcataatggtgcatccgggctcttgtgcattgtgggtcagccagccccccgaaatccgaactctggaaggcagttctgccttcctgccctgctcctttaatgcctcccagggccgcctggcaataggtagcgtaacatggtttcgagatgaagtggtgcctgggaaggaggtgcgtaacgggacccctgagttccgcggcagattggcaccattggctagctctagattcctacacgatcatcaggccgaactgcacatacgggacgttagaggacacgacgctagtatctatgtgtgtagggtggaagtgcttgggttgggagtggggacaggaaacgggacaaggttggtggtcgagaaggagcatccacagttgggcgccggaactgtcctcctcctccgcgctggtttctatgcggtcagttttttaagcgtggccgtcggctcaaccgtgtactatcagggcaaatatgcaaaatctacattgtccgggtttccacaactgtag

SEQ ID NO: 58358 - DNA, 534 bp, Artificial Sequence
  derived and/or modified sequence
atggcctggatgctgctgctgatcctgatcatggtgcaccctggcagctgtgccctgtgggtgtcccagcccccagagatccgcaccctggagggcagcagcgccttcctgccctgcagcttcaatgccagccagggccgcctggccatcggctctgtgacctggttcagagatgaggtggtgcctgggaaggaggtgagaaatggcaccccagagttccggggccgcctggcccccctggccagcagccgcttcctgcatgaccaccaggccgagctgcacatcagagatgtgcggggccatgatgccagcatctacgtgtgccgggtggaggtgctgggcctgggcgtgggcactggaaatggcacccggctggtggtggagaaggagcacccccagctgggcgccggcaccgtgctgctgctgcgggccggcttctatgctgtgtccttcctgtctgtggccgtgggcagcacagtgtactaccagggcaagtatgccaagagcaccctgagcggcttcccccagctgtag

SEQ ID NO: 58359 - DNA, 1097 bp, Artificial Sequence
  derived and/or modified sequence
ccacaagctggccccttggcctcctagagaccctgacatctcctccagcagcatctgtcctctctcctcagggaggcaagcatttgatgctcgaggtccctggcagttgtggtccttggcaagtgatgtgtgagtcccgtgtgtcataggaagctccccatccccatctggtgaccaaaggcctggctacaagtagtgagtccttcctcctccacccagacctcactgctcagatccccttcgccaactgggacatcttccgacatggcctggatgctgttgctcatcttgatcatggtccatccaggatcctgtgctctctgggtgtcccagccccctgagattcgtaccctggaaggatcctctgccttcctgccctgctccttcaatgccagccaagggagactggccattggctccgtcacgtggttccgagatgaggtggttccagggaaggaggtgaggaatggaaccccagagttcaggggccgcctggccccacttgcttcttcccgtttcctccatgaccaccaggctgagctgcacatccgggacgtgcgaggccatgacgccagcatctacgtgtgcagagtggaggtgctgggccttggtgtcgggacagggaatgggactcggctggtggtggagaaagaacatcctcagctaggggctggtacagtcctcctccttcgggctggattctatgctgtcagctttctctctgtggccgtgggcagcaccgtctattaccagggcaaatatgccaaatctactctctccggattcccccaactctgaactttcccttccaccaggtctgacctggaaaggtccaagaaggcagctgccggctgtggtcccagcgcccctcccaccaccatgtgggagctcagcacatctgcttcccccagtcccaggaggctgagcctgattgtcctgagaaatgggaaggatcagatatgactcctccttggcaactgccctttcctgccaggcccacacataccctcttctggctgttaggggagcttgggtccctgaacactgtcattcacccaataaattactatttgaccccagagtgggtggaagggtga

SEQ ID NO: 58360 - DNA, 1097 bp, Artificial Sequence
  derived and/or modified sequence
ccacaagctggccccttggcctcctagagaccctgacatctcctccagcagcatctgtcccctctcctcagggaggcaagcatttgatgctcgaggtccctggcagttgtggtccttggcaagtgatgtgtgagtcccgtgtgtcataggaagctccccatccccatctggtgaccaaaggcctggctacaagtagtgagtccttcctcctccacccagacctcactgctcagatccccttcgccaactgggacatcttccgacatggcctggatgctgttgctcatcttgatcatggtccatccaggatcctgtgctctctgggtgtcccagccccctgagattcgtaccctggaaggatcctctgccttcctgccctgctccttcaatgccagccaagggagactggccattggctccgtcacgtggttccgagatgaggtggttccagggaaggaggtgaggaatggaaccccagagttcaggggccgcctggccccacttgcttcttcccgtttcctccatgaccaccaggctgagctgcacatccgggacgtgcgaggccatgacgccagcatctacgtgtgcagagtggaggtgctgggccttggtgtcgggacagggaatgggactcggctggtggtggagaaagaacatcctcagctaggggctggtacagtcctcctccttcgggctggattctatgctgtcagctttctctctgtggccgtgggcagcaccgtctattaccagggcaaatatgccaaatctactctctccggattcccccaactctgaactttcccttccaccaggtctgacctggaaaggtccaagaaggcagctgccggctgtggtcccagcgcccctcccaccaccatgtgggagctcagcacatctgcttcccccagtcccaggaggctgagcctgattgtcctgagaaatgggaaggatcagatatgactcctccttggcaactgccctttcctgccaggcccacacataccctcttctggctgttaggggagcttgggtccctgaacactgtcattcacccaataaattactatttgaccccagagtgggtggaagggtga

SEQ ID NO: 58361 - DNA, 534 bp, Artificial Sequence
  derived and/or modified sequence
atggcctggatgctgctgctgatcctgatcatggtgcaccccggctcatgtgcactctgggtcagccagccccctgagatcagaaccttggagggaagttccgcctttctcccctgctccttcaacgcctcacagggcagactggctattggatctgtgacttggttccgggacgaggttgtccccggcaaagaagtccgcaacggaacacccgaatttagagggcgtctggccccactggccagttctcggttcctgcatgatcatcaggcggagctgcacatacgggatgtccgggggcacgatgcatctatttacgtttgccgggtcgaggtgttgggtctgggagtagggaccggcaatgggacaaggctcgtagtggagaaagagcacccacagctcggcgccgggaccgttctgctgctacgcgcgggcttctatgcagtttctttcctcagcgtggcagttggatctactgtgtattatcagggtaaatacgcaaagtccacactgagcgggttcccccagctttag

SEQ ID NO: 58362 - DNA, 534 bp, Artificial Sequence
  derived and/or modified sequence
atggcctggatgctgctgctgatcctgatcatggtgcaccccggcagttgcgcgttgtgggtgagtcagccacccgagattcgaaccctggaagggagcagcgcatttctaccctgcagctttaatgccagtcagggtagattagccattgggtccgtaacgtggtttagggatgaggtggtccccggaaaggaggtgcgaaatggtacaccagagtttcgcgggagattagcgcccctggccagcagcaggttcctgcatgaccaccaggctgaactccacatccgtgatgtgcggggccacgatgccagcatctatgtttgccgagttgaggtcttgggcctgggggtgggtactggtaatggtacaaggttggtggtggaaaaggagcaccctcagctcggggccggtaccgttctactgttgagagcaggcttctacgcggtctcctttttgagtgtcgcagttggatctacggtgtactatcagggcaagtacgctaagagcaccctgagtggctttccccaactgtag

SEQ ID NO: 58363 - DNA, 534 bp, Artificial Sequence
  derived and/or modified sequence
atggcctggatgctgctgctgatcctgatcatggtgcaccccggctcctgtgcactctgggtcagtcagccacctgagataagaactctcgaggggtcatctgcattcctgccctgttcctttaatgcttcccaggggcggctcgccattggaagtgttacatggttccgggacgaggtcgtccccggtaaggaggtgcgcaatggaacacccgaattcaggggacgcctggcccccttggcctccagtcgcttccttcacgaccaccaagccgaactgcacattcgcgacgtcagaggccacgatgcctctatctatgtctgtagagtcgaggtattagggttaggagttggaactggcaatggaaccaggctggtggtcgaaaaagaacatccccagcttggtgccgggaccgtgttgctactgcgcgcagggttctatgcagtgtcgttcctgtccgtggccgtgggaagtacagtgtattaccagggcaaatatgccaaatctacactcagcggtttcccacagttatag

SEQ ID NO: 58364 - DNA, 534 bp, Artificial Sequence
  derived and/or modified sequence
atggcctggatgctgctgctgatcctgatcatggtgcaccccggcagctgtgccctgtgggtctctcagcccccggaaatcaggactctcgagggatctagcgctttccttccctgttcgttcaatgctagccagggtcgtctggctattggctccgtgacctggtttagagatgaagtggtgcctggcaaggaggttagaaacggaaccccggaattccggggcagactggcacctctcgcttctagccggttcctgcacgaccatcaagcggagctgcatatacgcgacgtccggggccacgatgccagtatttatgtttgccgcgtggaggtcctgggactaggagtgggaactgggaacggcacgagactggtggtggaaaaggagcacccacagctaggggccggaactgtactattgctccgtgctgggttttatgcggtgagttttctaagcgtggccgtgggctcaaccgtgtattatcagggaaagtacgctaaaagcacgctgagtggcttccctcagctgtag

SEQ ID NO: 58365 - DNA, 534 bp, Artificial Sequence
  derived and/or modified sequence
atggcctggatgctgctgctgatcctgatcatggtgcaccccggctcatgtgccctttgggtttcacaaccgcctgagatcaggactctggaagggtctagcgcgttcctcccctgttcatttaacgccagccagggccgactggcgattggctccgtgacttggtttcgcgacgaggtggtgcccggtaaagaggtccgtaacggaacccctgagttccgtggacggctcgcccctctggcgtcttctcgcttcctgcacgaccaccaagcagagcttcacatcagggatgtgcggggacacgatgcaagtatctatgtgtgcagggtggaggtgctgggcctgggcgttggcaccggaaacggtacccgattggtggtagagaaagaacatccacagcttggcgctggtactgtgctgctgctcagggctggcttttacgccgtctcatttttgagtgtggcagtgggctcaaccgtgtattatcaaggtaagtatgccaagagtactctcagtgggttcccccagttgtag

SEQ ID NO: 58366 - DNA, 534 bp, Artificial Sequence
  derived and/or modified sequence
atggcctggatgctgctgctgatcctgatcatggtgcaccccggcagttgtgccctctgggtatcccagccaccggagattcgtaccttggaaggatcaagcgcctttcttccatgttcgttcaatgcatcccagggacggttggcgatcggctctgtcacctggttccgcgacgaggttgttccagggaaagaggttcgtaatgggacacccgaatttcgcgggcggcttgcacccctggcctcatcgagattcctccacgaccaccaggcagaacttcacattagagatgtcagaggccacgacgccagtatatatgtgtgtcgggtggaggtgctggggctgggagtcggcaccggaaatggcacgcgtttagtagtggaaaaagagcatccccagttaggcgctggaaccgtgctcctgctccgggccggcttctatgctgtcagttttctgtcggtggcggtgggatctactgtctattaccaggggaaatatgcgaaaagtacactctcagggtttcctcagctgtag

SEQ ID NO: 58367 - DNA, 534 bp, Artificial Sequence
  derived and/or modified sequence
atggcctggatgctgctgctgatcctgatcatggtgcaccccggctcttgtgccctctgggtcagccagccgccagagatacgcaccctggaaggctccagtgctttcctcccatgctcttttaacgctagccaggggcgactcgccattgggagcgtcacatggttccgcgatgaggtggtacctggcaaggaagtgcgcaacgggactcccgaattccgcgggcgcttagccccactggcgtctagcaggttcctgcatgatcaccaggccgaactccacattcgcgacgtgaggggtcacgatgcaagcatatacgtctgcagggtggaagtgctcggactgggcgtcggaaccggcaacggaacccgcctagtggtcgaaaaggagcatcctcagttaggagccggcaccgtattactgcttagagctgggttctacgctgtgtcatttctctcagtggccgttgggagcaccgtgtactaccagggcaaatatgcaaagagcacgctcagcggatttcctcagttgtag

SEQ ID NO: 58368 - DNA, 534 bp, Artificial Sequence
  derived and/or modified sequence
atggcctggatgctgctgctgatcctgatcatggtgcaccccggctcttgcgccctttgggtgtcgcaacctcccgagatacgcacactggaggggagcagtgcttttctgccttgcagctttaatgcctctcagggccgcttggctatcggcagtgtgacttggttcagagacgaggtcgtgccaggaaaagaggtgcgcaatggaaccccagagttccgcgggcggctcgccccccttgcctcatcacgcttcctgcacgatcaccaggccgagcttcatattagagatgtgcgcggccacgatgcaagcatctatgtctgcagagtggaggttcttgggctgggcgtgggcacggggaatgggactcgtctagtggttgagaaagaacacccccagttaggagccggtaccgtcctgctcctgcgtgctggcttttacgctgtttcattccttagcgtcgccgtaggatcgacagtctattatcaggggaagtacgccaagtccacattaagcggcttcccccagctgtag

SEQ ID NO: 58369 - DNA, 534 bp, Artificial Sequence
  derived and/or modified sequence
atggcctggatgctgctgctgatcctaatcatggtacatcccggttcctgtgccttatgggtatcgcaacctcctgagataagaacacttgagggatcctctgccttcctaccttgtagctttaatgcatctcagggtaggctcgccattgggtctgtcacttggtttcgtgacgaagtggtgccagggaaagaggtgcgtaatggaactcccgaattccggggtcgactggctcctctggcatcaagcagatttctgcatgaccatcaggcagagctgcacattagagatgtgcgagggcacgacgcaagcatctacgtttgtcgcgtggaggtcctcgggctgggcgtgggcacaggcaatggcaccaggctggtggtggagaaagagcatccacagctaggggcaggcaccgtattactgctccgtgcgggtttctatgccgtgtcctttcttagcgtcgctgtaggctctaccgtttattaccagggcaagtacgctaagtcaactcttagcggctttccacagctgtag

SEQ ID NO: 58370 - DNA, 534 bp, Artificial Sequence
  derived and/or modified sequence
atggcctggatgttgttgttgatacttattatggtccaccccggaagttgcgccctctgggtcagtcaaccacctgaaattcggacactggagggtagttcagcctttctaccatgctctttcaatgcatcacagggcagactcgctattggatccgtgacctggttcagagatgaagtggtcccaggaaaagaggtaaggaatggtactccggagtttagaggacggttggcaccactggctagctcacgctttttacacgaccaccaggcagaactccacattagggacgttcggggacacgatgcaagcatttacgtttgcagagtagaggtactaggtctgggcgttggcaccggaaacggcacgaggctagtggtggaaaaagagcatcctcagctgggggctggcactgtactgcttctgcgcgctgggttctatgccgtgtcctttctgtccgtcgcggtcggcagcaccgtgtattatcaaggcaaatacgctaaaagcaccctgtctgggtttccacaattatag

SEQ ID NO: 58371 - DNA, 534 bp, Artificial Sequence
  derived and/or modified sequence
atggcgtggatgttgttgctgattttgatcatggttcacccagggtcttgtgccctgtgggtcagccaacccccagaaatccgcacactcgaaggttcatccgctttccttccctgttcatttaatgcctcacaggggagactcgctatcgggagtgtgacctggttccgggacgaagtcgtgcccggtaaagaggtgaggaatggcaccccagagtttagagggagactggctcccctcgcgtcaagtcggttcctgcatgaccaccaggccgagctgcatatccgggatgtgcgcggtcacgacgcctctatctacgtttgcagggtcgaagtactcggtctaggcgtaggaacagggaacggcaccagactggtggtagaaaaggaacatccacaattaggagccggtacagtgcttctgctccgggctggcttttacgcagtgtcctttctgtccgtcgctgtcggctccaccgtctactaccagggcaaatacgccaagagcacactgtccggattcccccagctctag

SEQ ID NO: 58372 - DNA, 534 bp, Artificial Sequence
  derived and/or modified sequence
atggcatggatgcttctgctgattctgattatggtgcatcccggttcatgcgccctgtgggtgagtcagcccccagagattcggactctagaagggtcttcagctttcctgccatgctcttttaacgcgagtcagggcaggttagccataggttcagtgacttggttccgggacgaggtggttccgggaaaagaagtgaggaatggaacaccggagtttcggggtcggctggcacctcttgccagcagccgcttcttgcacgaccaccaggcggagctgcatatcagggacgttcgaggccatgatgcgtcaatatatgtatgtcgggtggaggtcctggggctgggcgtaggaaccggtaacgggacacgcctagtggtagagaaggagcaccctcagctcggggctggcacagtgcttctcctaagggcgggtttttacgccgtgtcatttctttcagtggcggtaggtagtacagtgtattaccagggtaaatatgcaaaatccactctgagcggttttccacaattgtag

SEQ ID NO: 58373 - DNA, 534 bp, Artificial Sequence
  derived and/or modified sequence
atggcatggatgctgcttctgattctgatcatggttcaccccggtagctgtgctctgtgggtgtctcaaccacccgaaatacgaaccctggaaggttcctctgcatttctcccatgcagcttcaacgctagccagggtaggctcgccattggatctgtgacatggttccgggacgaggttgtgcccggtaaggaagtccggaacggaacccctgagtttcgcggacggttggcccctctggcttcatccagatttctacatgaccatcaggcagaattgcatatccgagacgttagggggcacgacgccagcatctatgtatgcagggtggaagtgctgggactgggggttgggaccggaaacggaacccggctcgtcgttgaaaaggagcacccccagttgggagcgggaaccgtgctgctcctgagagccggtttctacgccgtatcatttctgtctgtcgcagtcgggtctaccgtatactaccagggcaaatatgcaaagtcgacactgtctggcttcccgcagttgtag

SEQ ID NO: 58374 - DNA, 534 bp, Artificial Sequence
  derived and/or modified sequence
atggcctggatgctgttattaatcttgatcatggtccatcccggatcttgtgctctttgggtgtcccagccaccggagataaggactctcgaaggcagtagcgccttcttgccttgctcctttaacgcctcccagggcagactggccataggctccgtgacttggttccgcgatgaggtggtgcccggtaaggaagtgcgaaacgggacacccgaatttagagggaggttagctccattggcatcaagtaggttcctgcacgaccatcaggccgaactgcacattagggacgtccggggtcatgacgcttctatttacgtatgcagggttgaagtgctcggcctaggtgtggggactgggaatgggactcgcctcgtggtcgagaaggagcacccgcaactgggtgccggaacagtcctcctgctccgcgctggtttttatgcagtctccttcctcagtgtggcagtgggatccacagtttattatcagggaaaatacgctaagtccaccctgagcggatttccccagctttag

SEQ ID NO: 58375 - DNA, 534 bp, Artificial Sequence
  derived and/or modified sequence
atggcttggatgctgctgcttatcctgattatggtgcatcccggatcatgtgctctctgggtgagccagccaccggagattcggacgttagaaggcagttcagcctttctgccctgctctttcaacgcttcccagggcaggctcgcaataggcagtgttacttggttccgagacgaagtggtgcctggcaaggaggtgcggaatgggacccctgaattccggggaagattggcacctctcgcctcaagccgattcctccacgatcaccaggctgaactgcacatcagagacgtgcgcggtcacgatgcatcaatatacgtgtgcagagtcgaagtgttgggcctgggagtggggactggtaacggaacccggctagtcgtggagaaggagcaccctcagctgggcgcagggacagtgcttttattaagggcgggtttctatgcagtttcttttctctctgtggccgtgggatctacagtctattatcaggggaagtatgctaaatctaccttaagcggatttccacagctctag

SEQ ID NO: 58376 - DNA, 534 bp, Artificial Sequence
  derived and/or modified sequence
atggcctggatgctcttactgattcttatcatggtgcatccgggtagctgtgctctttgggtatctcagccacctgaaatccggacactggagggatcatctgccttccttccatgtagtttcaacgcatcccaaggccgactggctatcggctcggtcacctggttccgcgatgaagtggtgcccggaaaggaagtcaggaatggaacccccgagttccgcggtagactggcacccctcgctagctcgcgcttcctccatgatcaccaggctgaactccacattagagatgttcggggacacgacgcttccatatacgtctgcagggtggaagtcctcggacttggggttggcactggtaatgggacgcgcctagtggtggaaaaggagcacccacagttgggcgcaggcacggtactattactgcgagctgggttttatgcggttagcttcctatctgtggctgtgggaagcactgtatattatcagggcaaatacgctaaaagtacccttagcgggttccctcagctgtag

SEQ ID NO: 58377 - DNA, 534 bp, Artificial Sequence
  derived and/or modified sequence
atggcctggatgctgctgctgatcctgatcatggtgcaccccggcagctgcgccctgtgggtgagccagccccccgagatcagaaccctggagggcagcagcgccttcctgccctgcagcttcaacgccagccagggcagactggccatcggcagcgtgacctggttcagagacgaggtggtgcccggcaaggaggtgagaaacggcacccccgagttcagaggcagactggcccccctggccagcagcagattcctgcacgaccaccaggccgagctgcacatcagagacgtgagaggccacgacgccagcatctacgtgtgcagagtggaggtgctgggcctgggcgtgggcaccggcaacggcaccagactggtggtggagaaggagcacccccagctgggcgccggcaccgtgctgctgctgagagccggcttctacgccgtgagcttcctgagcgtggccgtgggcagcaccgtgtactaccagggcaagtacgccaagagcaccctgagcggcttcccccagctgtag

SEQ ID NO: 58378 - protein, 165 aa, Artificial Sequence
  derived and/or modified sequence
MAWMLLLILIMVHPGSCALWVSQPPEIRTLEGSSAFLPCSFNASQGRLAIGSVTWFRDEVVPGKEAELHIRDVRGHDASIYVCRVEVLGLGVGTGNGTRLVVEKEHPQLGAGTVLLLRAGFYAVSFLSVAVGSTVYYQGKCHCHMGTHCHSSDGPRGVIPEPRCP

SEQ ID NO: 58379 - protein, 190 aa, Artificial Sequence
  derived and/or modified sequence
MAWMLLLILIMVHPGSCALWVSQPPEIRTLEGSSAFLPCSFNASQGRLAIGSVTWFRDEVVPGKEVRNGTPEFRGRLAPLASSRFLHDHQAELHIRDVRGHDASIYVCRVEVLGLGVGTGNGTRLVVEKEHPQLGAGTVLLLRAGFYAVSFLSVAVGSTVYYQGKCHCHMGTHCHSSDGPRGVIPEPRCP

SEQ ID NO: 58380 - DNA, 498 bp, Artificial Sequence
  derived and/or modified sequence
atggcctggatgcttctgctaatcttgatcatggtgcaccccgggtcctgcgctctgtgggtcagccagccccctgagatccgcactctggaggggtcctcagcgttcttaccttgtagtttcaatgcgtcccaaggtcgccttgccattggcagcgtgacatggttccgagatgaggtggttccgggcaaagaggcagagttacacatccgagatgtgcggggtcatgacgctagcatctacgtgtgcagagtcgaagtgctgggcctgggtgttggcacaggcaatggaacacgcctagttgtggagaaagaacacccccagctcggagcaggtaccgtgctcttgctgcgcgctggattttacgcagtgtcatttctctccgtggctgtcggaagtaccgtctactaccaggggaagtgtcattgccacatgggaactcactgccatagttctgacggcccacggggcgtcatccccgagccccggtgcccttag

SEQ ID NO: 58381 - DNA, 573 bp, Artificial Sequence
  derived and/or modified sequence
atggcatggatgctgttactgattctgataatggtgcaccctggctcctgtgccctctgggtgtctcagccccccgagatccggaccctggaaggcagcagtgcgttcctgccctgttcgtttaatgcctcacaaggacgcctggctatcgggtcagttacttggtttcgggacgaggtggtgcccggcaaagaggttaggaatggaacacccgaatttaggggtcgattggctcccctcgcaagcagcagattcctccatgaccaccaggctgagctgcatatcagagatgttcgcggacacgacgcatctatttatgtatgtcgcgtggaagtactggggctcggcgtgggaaccggcaacgggacacgcttggtggtcgagaaagagcacccacagctgggtgcggggacagttctgttgctcagagcaggcttctacgccgtcagttttctgagcgtggccgtcggatctacagtgtactaccaaggcaaatgtcactgccacatggggacacattgtcactcctccgacggtcccagaggggtaatccccgaaccaagatgcccttag

SEQ ID NO: 58382 - DNA, 573 bp, Artificial Sequence
  derived and/or modified sequence
atggcatggatgctgctgcttatcctaataatggtgcaccctggctcttgcgctctctgggtgtcacaacctcctgaaataagaaccctggagggcagctcagccttccttccctgctcctttaatgctagccagggacgcttggcgattggcagtgtgacctggtttcgcgacgaagtcgtgccagggaaggaggttcgcaacggcacaccggagtttcgtggccggctggcccccttggcttctagcagattcttgcacgatcaccaggccgaactgcacataagagatgtgcgtggccatgatgcatccatctacgtttgcagggtggaggtgctgggcctgggcgtgggtacaggaaacggaacccgcctggttgtggaaaaagaacaccctcaactcggcgctgggacagtcctgctactaagggcaggcttttacgcggtgtcctttttgagcgtggccgttggtagtaccgtttactatcagggcaaatgtcattgtcacatgggcacccactgccattcttccgacggcccgcgcggcgtaataccggagccacgctgtccctag

SEQ ID NO: 58383 - DNA, 498 bp, Artificial Sequence
  derived and/or modified sequence
atggcctggatgctgcttctgatcctgatcatggtgcatcctggttcctgcgcgctgtgggtgtcacaacccccagagatcagaaccctcgagggttcaagcgccttcctcccgtgctcattcaacgcgtcccagggaagactcgctattggatccgtcacctggtttcgcgacgaagttgtgcctggcaaggaagctgagctgcatattcgtgacgtccggggccatgacgccagcatttacgtgtgcagagtcgaggttctcggattgggtgtgggaactgggaatggtacaaggctggtggtggagaaagagcatcctcagctgggggccgggacagtcctgctgctgagagcaggcttctacgccgtctcttttttgagtgtggcagttggatccactgtgtactaccagggcaagtgccactgtcacatgggaactcattgtcactcctcagacggaccaagaggagtaatccccgagccgcggtgtccgtag

SEQ ID NO: 58384 - DNA, 573 bp, Artificial Sequence
  derived and/or modified sequence
atggcttggatgctgcttttgatccttatcatggtacaccctggcagttgtgcactgtgggttagccagcctcccgagattcgcacactggaggggtcctcagcctttcttccctgctcctttaacgcatcgcagggtcgcctagccataggatccgttacgtggtttcgcgacgaagttgtgcctggcaaagaggtgcggaatggaactcctgagtttcgcggcagactggcccccctagcttccagccgattcttgcacgatcaccaagccgagctgcatatacgcgacgtcagaggccatgatgctagcatttacgtgtgtagggtggaggttctgggactgggagtcggaactggcaatggaacccgcctggttgtggagaaagaacaccctcaattgggtgccgggaccgtgctgttactgcgcgccggattttacgcagtgtccttcctctcggttgcggttggttctaccgtgtattaccagggaaaatgtcattgccatatgggaacccactgtcactcttcagacgggcctaggggcgtgatcccagagcctcggtgtccgtag

SEQ ID NO: 58385 - DNA, 573 bp, Artificial Sequence
  derived and/or modified sequence
atggcctggatgctgctactgattctaataatggtgcacccaggtagctgcgcactatgggtgagtcaacctccagaaatcagaacattagaaggatccagtgcttttcttccatgctcgtttaacgccagccagggtcgactggcaatcggcagtgtaacatggttccgcgatgaagtggtccccgggaaggaagtacgcaatggtacaccggaattcagaggccgactggctccactggcaagttccaggtttttacacgaccaccaggcggagctgcacatccgggatgtgaggggccacgatgccagcatctatgtctgtagagtcgaagtgttggggctgggagttgggactggcaatggcactcgtctcgtcgtggagaaagagcaccctcagcttggtgctggcaccgtgctcctcttacgcgctggattctacgccgtgtctttcctctctgtggcagtcggctcaacggtctattaccagggcaagtgccattgccacatggggacgcattgccacagttcggatggtccgagaggcgtgatacctgaacccagatgcccttag

SEQ ID NO: 58386 - DNA, 498 bp, Artificial Sequence
  derived and/or modified sequence
atggcatggatgctgctgcttattctgatcatggtgcatccaggatcttgcgcactgtgggtatcccagccaccggagattcgaactctggaaggctcttctgctttcctgccatgctcattcaacgcctcgcagggtaggttggcaatcggatcggtgacttggttcagggatgaagtcgtgccagggaaagaagctgaactgcatattcgggatgtccggggtcacgatgcctctatttacgtctgtcgggtcgaagttcttggactcggcgtcggaacaggtaacggtactcggctggttgtcgagaaagaacatccccagctcggcgctggtactgttctgctgctgcgagcaggcttctatgccgtgagcttcctctccgttgcggtaggatccacagtttactaccagggaaaatgtcactgtcacatgggcacccactgccactccagtgacggccccagaggcgttattccggagccacggtgtccttag

SEQ ID NO: 58387 - DNA, 498 bp, Artificial Sequence
  derived and/or modified sequence
atggcttggatgcttctccttatcctgatcatggtccatccaggctcgtgtgccctatgggtgtcacaacccccggagatcaggacacttgagggctcttctgccttcttgccctgttcttttaatgcctcccagggaagattggctattggctcagtcacctggttccgggacgaggtagtgccagggaaagaggccgaactgcatatacgcgacgtcaggggccatgatgcttcaatatatgtgtgcagagttgaggtactgggtctgggtgttggcaccggcaacgggaccagactggtagttgagaaggagcatccacagctgggcgccggtactgtgttgttactgagggcgggattttacgccgtctccttcctaagcgtagcagttgggagtactgtctattatcagggcaagtgtcactgccatatggggacccattgccacagcagcgatggtcctagaggagtgatccccgagcccagatgcccttag

SEQ ID NO: 58388 - DNA, 498 bp, Artificial Sequence
  derived and/or modified sequence
atggcgtggatgcttttgctcattctgattatggtgcatcctgggtcctgtgcactgtgggtcagccagcctcctgaaattcggacactggagggcagttcagcgtttctgccgtgtagtttcaatgcctctcaagggaggctagcaatcgggtccgtcacatggttccgtgacgaggtggtacccggcaaagaggctgaactccacatccgagacgtgcggggccatgacgcatccatatacgtttgtcgcgtggaggtgctaggtttgggggtgggcacaggcaacggaactaggttggtagtagagaaggagcacccacagctgggggccgggaccgtcctcctgctgcgtgctggtttctatgcagtgtcgtttttaagcgtggcggttggctccaccgtctactatcagggaaagtgccactgccacatggggacacactgtcatagttcggacgggcccaggggggtgatcccagaaccacgctgcccttag

SEQ ID NO: 58389 - DNA, 573 bp, Artificial Sequence
  derived and/or modified sequence
atggcctggatgttgctacttatcttaattatggtgcatcccggctcatgtgcactgtgggtctcccagccccctgaaattagaacactggagggcagctccgcatttcttccatgctcatttaatgccagtcagggaagactcgccatcgggtcggtcacgtggttccgggatgaggtggtcccaggaaaggaggtacgcaacgggacacccgagtttagagggcgcttggccccccttgcctcttctcggtttctgcatgaccatcaggctgaactgcacatccgcgatgtgaggggccatgatgcctctatttacgtatgcagggtggaagttttagggttaggggtgggaaccgggaacggaacaaggttggttgtagagaaggaacacccccaactgggcgccggtactgtgctgctgttgagggcaggtttttatgctgtgtcctttctgtctgtggcggttggatctacagtctattaccagggaaagtgccattgccacatggggacccattgtcacagctcagatgggccacggggggttatccctgagccgcggtgcccatag

SEQ ID NO: 58390 - DNA, 498 bp, Artificial Sequence
  derived and/or modified sequence
atggcctggatgttattattaatcttaattatggtccaccccggctcatgcgcgttatgggtttctcaaccgcccgagatccgcaccctggaggggagcagcgcattcctgccgtgcagcttcaacgcctcacagggaaggttggccattggatccgttacatggtttagagatgaagtcgtccctgggaaagaggccgaactccacatacgtgacgtcagaggccacgatgcatcaatttacgtgtgccgcgtggaagtgctggggctgggggtcgggacgggtaacggtactaggctggttgttgagaaggaacacccccaacttggagccgggacagtgcttcttctcagagcagggttctatgccgtgtcatttcttagcgtggctgtgggtagtaccgtctactatcaggggaaatgccactgtcacatggggacccactgccattcctccgacggaccaagaggcgtgatccctgagcctagatgtccttag

SEQ ID NO: 58391 - DNA, 573 bp, Artificial Sequence
  derived and/or modified sequence
atggcttggatgctgctgctgattctgataatggtgcacccaggttcttgtgccttgtgggttagccagccaccggaaatccgcaccctggagggttcctcggctttccttccatgtagcttcaatgcttcccaagggcggctggctattggctccgtaacgtggttccgcgacgaggtggtccccggtaaggaagtgcggaatggaactcccgagttccggggtagactcgcgcccctagcttcctctcgattccttcacgatcatcaagctgaattgcacataagggatgtgaggggtcatgacgcctctatttacgtgtgtagagtggaggtgctgggactcggagttggcacaggaaacggcactcgactggtggtcgagaaggagcatcctcagctgggggctggcaccgtgctactcctacgagcgggattctacgcggtaagcttcctttctgttgcggttggatccactgtctactatcaggggaagtgtcactgtcatatgggcacccactgtcacagttccgatggaccgcggggagtcatacccgagccacggtgtccatag

SEQ ID NO: 58392 - DNA, 573 bp, Artificial Sequence
  derived and/or modified sequence
atggcctggatgctgttgcttatcctcattatggtccaccccggcagttgcgctctctgggtgagccagccacctgagataaggaccctggagggcagctcagctttcctcccctgcagttttaacgcttcacaaggcagacttgccatcggatccgttacatggtttcgcgacgaagttgtgcctggcaaggaagtccgcaatggaactcccgagttcagaggccgactggctccattggcctcaagccgattcctccacgatcaccaggccgagctccatataagggatgtcagaggacacgatgcctcgatctacgtgtgccgcgtggaagtgctgggtctcggcgtggggaccgggaacggtacaaggctggtggtggaaaaggaacacccgcagctgggcgctggaacagtgttgctgctgcgggcaggattctatgctgtttcttttctgtctgtggccgttgggtctacagtatactaccaggggaaatgccactgtcacatgggaactcactgccacagctccgacggacctagaggtgtcattccagagccccggtgtccttag

SEQ ID NO: 58393 - DNA, 498 bp, Artificial Sequence
  derived and/or modified sequence
atggcctggatgctgctcttaatactcatcatggtgcacccaggcagttgtgccctgtgggtgtctcaaccccctgaaattcgaacactcgagggtagctcagcatttctgccttgttcttttaacgcaagtcaaggtcgacttgctattgggtccgttacctggtttagggatgaagtggtgccaggaaaagaggccgagcttcatatccgcgacgtgcggggccacgatgcctctatctacgtttgtagggtggaggtcctggggcttggggtcggcacaggcaacgggactcgacttgttgtggagaaagaacaccctcaacttggagcaggcacagtgttgctgttgagagctggattctatgccgtaagcttcttgtcggtcgccgtgggcagcacagtatactaccagggtaagtgtcactgtcatatgggcacccactgccattccagcgatggacccaggggagtgattccggaaccccgatgcccatag

SEQ ID NO: 58394 - DNA, 498 bp, Artificial Sequence
  derived and/or modified sequence
atggcatggatgctgttgctaatactcatcatggtacaccctggctcctgtgctctttgggtttcacagcccccagaaatccggacattggaggggtcctctgcttttcttccgtgctctttcaacgcaagccaggggcggctggccatcgggtctgtgacttggttccgcgacgaggtcgtgcccggtaaggaagcagagcttcacattagggatgtgcgcggtcatgacgcgtccatctatgtctgccgcgtagaggttcttggtctgggcgtcggcaccggcaacggcacccgccttgtcgtagaaaaagagcacccccaattgggagccgggaccgtcctactgctgcgcgctgggttttatgccgtgagttttctcagtgttgccgtcgggtcaactgtttactaccagggaaagtgccactgtcatatgggtacccattgccacagcagcgacggccccagaggtgtcattccagaaccacgttgtccttag

SEQ ID NO: 58395 - DNA, 573 bp, Artificial Sequence
  derived and/or modified sequence
atggcttggatgctgctgttaatcctgattatggtccacccagggtcctgcgcactttgggtgtcacaaccccccgagattcgaaccctagaaggcagttccgcgttccttccatgcagcttcaatgccagccagggacgccttgccatcggctctgtcacttggtttcgcgatgaggtggtccctggtaaggaggtacggaatgggaccccggaatttcggggacgactcgcccctctggcctcttccagatttctgcacgaccaccaggctgaactgcatattcgtgatgttcggggtcacgatgcatcaatttatgtgtgtagagttgaagttctcggccttggcgtgggtactggcaatgggactcgtctagtcgtggaaaaagaacacccgcaattaggagccggcacagtgcttttgttgagagctgggttctatgcggtgtccttcctgagcgtggccgtaggatctaccgtgtattaccaggggaagtgccactgtcacatgggaactcactgtcatagtagcgatgggcccaggggcgttattccagaaccccgatgcccctag

SEQ ID NO: 58396 - DNA, 498 bp, Artificial Sequence
  derived and/or modified sequence
atggcctggatgctgctgctgatcctgatcatggtgcaccctggcagctgtgccctgtgggtgtcccagcccccagagatccgcaccctggagggcagcagcgccttcctgccctgcagcttcaatgccagccagggccgcctggccatcggctctgtgacctggttcagagatgaggtggtgcctgggaaggaggccgagctgcacatcagagatgtgcggggccatgatgccagcatctacgtgtgccgggtggaggtgctgggcctgggcgtgggcactggaaatggcacccggctggtggtggagaaggagcacccccagctgggcgccggcaccgtgctgctgctgcgggccggcttctatgctgtgtccttcctgtctgtggccgtgggcagcacagtgtactaccagggcaagtgccactgccacatgggcacccactgccacagcagtgatggcccccggggcgtcatccctgagccccgctgcccctag

SEQ ID NO: 58397 - DNA, 573 bp, Artificial Sequence
  derived and/or modified sequence
atggcctggatgctgctgctgatcctgatcatggtgcaccctggcagctgtgccctgtgggtgtcccagcccccagagatccgcaccctggagggcagcagcgccttcctgccctgcagcttcaatgccagccagggccgcctggccatcggctctgtgacctggttcagagatgaggtggtgcctgggaaggaggtgagaaatggcaccccagagttccggggccgcctggcccccctggccagcagccgcttcctgcatgaccaccaggccgagctgcacatcagagatgtgcggggccatgatgccagcatctacgtgtgccgggtggaggtgctgggcctgggcgtgggcactggaaatggcacccggctggtggtggagaaggagcacccccagctgggcgccggcaccgtgctgctgctgcgggccggcttctatgctgtgtccttcctgtctgtggccgtgggcagcacagtgtactaccagggcaagtgccactgccacatgggcacccactgccacagcagtgatggcccccggggcgtcatccctgagccccgctgcccctag

SEQ ID NO: 58398 - DNA, 541 bp, Artificial Sequence
  derived and/or modified sequence
cccttcgccaactgggacatcttccgacatggcctggatgctgttgctcatcttgatcatggtccatccaggatcctgtgctctctgggtgtcccagccccctgagattcgtaccctggaaggatcctctgccttcctgccctgctccttcaatgccagccaagggagactggccattggctccgtcacgtggttccgagatgaggtggttccagggaaggaggctgagctgcacatccgggacgtgcgaggccatgacgccagcatctacgtgtgcagagtggaggtgctgggccttggtgtcgggacagggaatgggactcggctggtggtggagaaagaacatcctcagctaggggctggtacagtcctcctccttcgggctggattctatgctgtcagctttctctctgtggccgtgggcagcaccgtctattaccagggcaaatgccactgtcacatgggaacacactgccactcctcagatgggccccgaggagtgattccagagcccagatgtccctagtcctcttcaaaagac

SEQ ID NO: 58399 - DNA, 875 bp, Artificial Sequence
  derived and/or modified sequence
ccacaagctggccccttggcctcctagagaccctgacatctcctccagcagcatctgtcctctctcctcagggaggcaagcatttgatgctcgaggtccctggcagttgtggtccttggcaagtgatgtgtgagtcccgtgtgtcataggaagctccccatccccatctggtgaccaaaggcctggctacaagtagtgagtccttcctcctccacccagacctcactgctcagatccccttcgccaactgggacatcttccgacatggcctggatgctgttgctcatcttgatcatggtccatccaggatcctgtgctctctgggtgtcccagccccctgagattcgtaccctggaaggatcctctgccttcctgccctgctccttcaatgccagccaagggagactggccattggctccgtcacgtggttccgagatgaggtggttccagggaaggaggtgaggaatggaaccccagagttcaggggccgcctggccccacttgcttcttcccgtttcctccatgaccaccaggctgagctgcacatccgggacgtgcgaggccatgacgccagcatctacgtgtgcagagtggaggtgctgggccttggtgtcgggacagggaatgggactcggctggtggtggagaaagaacatcctcagctaggggctggtacagtcctcctccttcgggctggattctatgctgtcagctttctctctgtggccgtgggcagcaccgtctattaccagggcaaatgccactgtcacatgggaacacactgccactcctcagatgggccccgaggagtgattccagagcccagatgtccctagtcctcttcaaaagaccccaataaatctgccccaccact

SEQ ID NO: 58400 - DNA, 875 bp, Artificial Sequence
  derived and/or modified sequence
ccacaagctggccccttggcctcctagagaccctgacatctcctccagcagcatctgtcccctctcctcagggaggcaagcatttgatgctcgaggtccctggcagttgtggtccttggcaagtgatgtgtgagtcccgtgtgtcataggaagctccccatccccatctggtgaccaaaggcctggctacaagtagtgagtccttcctcctccacccagacctcactgctcagatccccttcgccaactgggacatcttccgacatggcctggatgctgttgctcatcttgatcatggtccatccaggatcctgtgctctctgggtgtcccagccccctgagattcgtaccctggaaggatcctctgccttcctgccctgctccttcaatgccagccaagggagactggccattggctccgtcacgtggttccgagatgaggtggttccagggaaggaggtgaggaatggaaccccagagttcaggggccgcctggccccacttgcttcttcccgtttcctccatgaccaccaggctgagctgcacatccgggacgtgcgaggccatgacgccagcatctacgtgtgcagagtggaggtgctgggccttggtgtcgggacagggaatgggactcggctggtggtggagaaagaacatcctcagctaggggctggtacagtcctcctccttcgggctggattctatgctgtcagctttctctctgtggccgtgggcagcaccgtctattaccagggcaaatgccactgtcacatgggaacacactgccactcctcagatgggccccgaggagtgattccagagcccagatgtccctagtcctcttcaaaagaccccaataaatctgccccaccact

SEQ ID NO: 58401 - DNA, 874 bp, Artificial Sequence
  derived and/or modified sequence
ccacaagctggccccttggcctcctagagaccctgacatctcctccagcagcatctgtcctctctcctcagggaggcaagcatttgatgctcgaggtccctggcagttgtggtccttggcaagtgatgtgtgagtcccgtgtgtcataggaagctccccatccccatctggtgaccaaaggcctggctacaagtagtgagtccttcctcctccacccagacctcactgctcagatccccttcgccaactgggacatcttccgacatggcctggatgctgttgctcatcttgatcatggtccatccaggatcctgtgctctctgggtgtcccagccccctgagattcgtaccctggaaggatcctctgccttcctgccctgctccttcaatgccagccaagggagactggccattggctccgtcacgtggttccgagatgaggtggttccagggaaggaggtgaggaatggaaccccagagttcaggggccgcctggccccacttgcttcttcccgtttcctccatgaccaccaggctgagctgcacatccgggacgtgcgaggccatgacgccagcatctacgtgtgcagagtggaggtgctgggccttggtgtcgggacagggaatgggactcggctggtggtggagaaagaacatcctcagctaggggctggtacagtcctcctccttcgggctggattctatgctgtcagctttctctctgtggccgtgggcagcaccgtctattaccagggcaaatgccactgtcacatgggaacacactgccactcctcagatgggccccgaggagtgattccagagcccagatgtccctagtcctcttcaaaagaccccaataaatctgccccaccac

SEQ ID NO: 58402 - DNA, 498 bp, Artificial Sequence
  derived and/or modified sequence
atggcctggatgctgctgctgatcctgatcatggtgcaccccggcagttgcgctctatgggtcagtcagcccccggagatccggacactggagggctccagcgcattcctaccatgtagcttcaacgcctctcaaggacgcctggccattgggagtgttacttggttcagagacgaggtagtcccaggaaaagaagcggagctgcacatccgcgatgtaagaggtcacgacgcctcaatttatgtttgtagagtggaggtgttaggcctgggggtgggaaccggcaatgggacaaggctcgtggtggagaaagaacacccccagcttggggcaggaacagtgctgctcctccgcgccggcttctatgccgtgtccttcctgtccgtggctgtgggtagtaccgtttactaccagggcaaatgccactgccatatgggaacacattgccactcaagcgacggaccccgaggagtgatcccagaaccccgttgcccatag

SEQ ID NO: 58403 - DNA, 573 bp, Artificial Sequence
  derived and/or modified sequence
atggcctggatgctgctgctgatcctgatcatggtgcaccccggctcttgcgcgctgtgggtctcccagcctccggaaatccggactctggaaggcagctccgcctttctgccctgctcttttaacgcttctcagggtagactggctattggatctgtgacatggtttcgtgacgaagtagtaccagggaaagaagtcaggaacggaacccctgaatttcgaggacggctcgcaccgcttgcaagctctcgttttcttcacgaccaccaggccgagctgcacataagagatgtgaggggtcacgacgcttccatctacgtgtgtcgggtggaggtattgggtttgggggtcgggactgggaatggtactcggctggtggtggaaaaagagcacccccagcttggcgcaggaactgtgctcctgctgcgcgctggcttttacgcggtaagcttcctctctgtcgccgtaggaagcaccgtttactaccagggcaaatgccactgccatatgggcacacactgccacagcagcgacggtcctcggggcgttatcccggagccgagatgcccttag

SEQ ID NO: 58404 - DNA, 573 bp, Artificial Sequence
  derived and/or modified sequence
atggcctggatgctgctgctgatcctgatcatggtgcaccccggctcctgtgctttgtgggtaagccagccgcccgaaattcgtaccctggagggatctagcgctttcctaccttgtagtttcaacgcttcccagggccgcttagctatcggctcggttacctggttccgcgacgaagttgttccgggaaaggaagtgcgcaatgggacccctgagttccgaggccggctggctcctctggcctcttctaggtttctgcacgatcaccaggctgagctgcatatacgagatgtgaggggccacgacgcatcgatctatgtgtgccgcgtcgaggtactggggcttggagtgggaaccgggaacggaacaaggttggtggttgagaaagagcacccccagctgggagcaggcacagtcttgctcctacgcgcaggcttctatgctgtttcttttctgtcagtggcagtggggtccacggtgtactatcaaggcaagtgccactgccacatgggtactcactgccactcaagcgatggaccccgcggcgttatcccagaacctaggtgtccatag

SEQ ID NO: 58405 - DNA, 498 bp, Artificial Sequence
  derived and/or modified sequence
atggcctggatgctgctgctgatcctgatcatggtgcaccccggctcatgtgcactttgggtgtcccagccaccggagatcaggactctcgagggcagcagcgcattcctgccttgctcctttaacgcaagccaagggagacttgccatcggctccgtcacctggttcagggatgaggtcgtccctggaaaggaggccgaacttcatatccgggatgtacgagggcacgatgccagcatatatgtgtgccgggtggaggtactcggactcggagtaggaacaggcaacggcacgcggctggtagtggaaaaagagcatcctcagcttggcgcggggaccgtactgctgctgagagccggtttttacgccgtaagttttctcagcgtggccgtcggttctactgtttactatcagggaaaatgccactgtcacatgggaacgcactgccacagttccgacggcccccgcggggttattcccgaaccccgatgcccatag

SEQ ID NO: 58406 - DNA, 573 bp, Artificial Sequence
  derived and/or modified sequence
atggcctggatgctgctgctgatcctgatcatggtgcaccccggctcttgtgctctatgggtgtcacagcctccagaaattcggactttagaaggatcctcagctttcctgccctgctctttcaacgccagccaaggtcgtctcgcaatcggctctgtgacttggttcagagatgaggtcgtgcccggcaaagaggtgagaaacggaaccccagagtttcggggcaggctcgcccctcttgccagttcaaggttccttcacgatcatcaggcggaactgcacatccgggacgttcgaggccacgacgcctccatctacgtatgccgcgtggaagtgcttggattgggagtgggaaccggtaatggcaccaggctagtggtcgagaaggaacacccacaactgggtgcaggtacagtgctcctgctgcgggccgggttctatgccgtgtcattcctgtctgtggccgtagggtcaactgtgtactaccagggaaaatgccattgccacatgggcacgcattgccacagctctgacgggccaagaggggtaatacctgaaccacggtgtccgtag

SEQ ID NO: 58407 - DNA, 573 bp, Artificial Sequence
  derived and/or modified sequence
atggcctggatgctgctgctgatcctgatcatggtgcaccccggcagctgcgctttgtgggtatcacagccacccgagatccgcaccctcgaggggtctagtgcattccttccctgttcctttaacgcttctcaggggagattggctatcggttctgtgacatggttcagggacgaggtggtgcctggcaaagaagtccggaatggcacacctgagtttagaggtcgactggcacccctggcgtcttccaggttcttgcatgatcaccaggccgagttgcacattagagatgttcgggggcacgatgcttcaatctacgtttgtagagtagaagtcctgggactgggggtcgggaccggcaacgggaccagactcgtagttgaaaaggagcacccacagctcggcgccggcaccgtactgctccttagagccggtttttatgctgtctcatttctaagcgtggcagtcggctctaccgtctattatcagggcaaatgtcactgtcacatggggacacactgccattcttccgatggcccaagaggagtcataccagagccccgttgcccctag

SEQ ID NO: 58408 - DNA, 498 bp, Artificial Sequence
  derived and/or modified sequence
atggcctggatgctgctgctgatcctgatcatggtgcaccccggctcatgtgccctgtgggtaagccagcctcctgagattcgcactctagagggttcttctgcgtttctgccctgctctttcaacgcgtcacaggggcgactggcaatcggcagcgtcacctggtttcgggatgaggtggtccctgggaaagaagcagaattacatattcgcgatgttagggggcacgatgcttccatctacgtctgtcgagtagaggtactgggcctgggggtaggtacagggaacgggacacgcctcgttgtcgaaaaggagcaccctcagctgggcgcagggacagtgctcctgttgagagccggattctatgctgtgagctttctgagcgttgcagtagggtctaccgtctactaccagggaaaatgccactgccatatgggcactcactgccatagcagcgacggacccagaggagtgatcccagaacccagatgcccatag

SEQ ID NO: 58409 - DNA, 498 bp, Artificial Sequence
  derived and/or modified sequence
atggcctggatgctgctgctgatcctgatcatggtgcaccccggctcctgcgctctctgggtgtctcagccgcccgagattcggaccctcgaaggcagcagcgctttcttgccctgcagttttaatgcctcccaggggaggctggccataggatcagtgacctggtttagggacgaagtggtccccggaaaggaagccgaactgcatattagggatgttagaggtcatgacgccagcatctacgtgtgccgagtcgaagtcctcggtctcggtgtcgggaccggtaatggtaccagattggtggtcgagaaggaacatccccagttgggggctggcaccgtgctcttgctgcgcgctggattttacgcagtgtcattcttgtccgttgccgtggggagcactgtatactatcagggcaagtgccactgtcacatgggcacccactgccacagctcagatggacctagaggcgtgatcccggaaccacgctgtccttag

SEQ ID NO: 58410 - DNA, 498 bp, Artificial Sequence
  derived and/or modified sequence
atggcctggatgctgctgctgatcctgatcatggtgcaccccggcagctgcgccctctgggtcagccagccccccgagatcaggaccctcgaaggctcttctgcatttctcccttgcagcttcaacgccagccagggcagactggcaatagggagtgttacatggttccgagatgaggtggtgcctgggaaggaggcagagctccatatcagggatgttcgagggcacgacgcctcgatttatgtatgccgtgtggaggtgctgggactcggtgtgggcacaggaaatgggaccagactcgtcgtcgaaaaggagcacccacagctaggcgcaggcaccgtactgctgctccgggccgggttctacgcggtgtcttttctgtcagttgccgttgggagtaccgtgtattaccagggcaagtgccactgccacatgggtactcactgtcactcatccgatgggccacggggcgtcataccagaaccaagatgtccatag

SEQ ID NO: 58411 - DNA, 573 bp, Artificial Sequence
  derived and/or modified sequence
atggcctggatgctgctgctgatcctgatcatggtgcaccccggcagctgcgccttgtgggtatctcagccaccagagataaggaccctggaaggcagcagcgcattcctcccttgctccttcaacgctagtcaggggcggctggcaattggcagtgtgacgtggtttcgcgacgaagtggtccccgggaaagaagtcagaaatgggacccctgaattccgaggccgtctggcccccttggcttcaagccgatttcttcatgatcatcaggcggagctccacatccgtgatgtcagaggccatgacgcctcaatttacgtctgtagggtagaagtcctgggactgggcgtggggaccgggaatggcacaagacttgttgtagagaaggaacaccctcagttgggagctgggactgtactgctgctacgcgctggcttctatgccgtctcatttttgtcagtagcagtgggttccaccgtctattatcagggcaaatgccattgccatatgggcactcactgtcattcttccgatggtcctcggggagtcatcccagaaccccgctgcccctag

SEQ ID NO: 58412 - DNA, 498 bp, Artificial Sequence
  derived and/or modified sequence
atggcctggatgctgctgctgatcctgatcatggtgcaccccggctcttgtgcattatgggtgagtcaaccacctgagattcgcaccctcgaaggcagttcagccttcttgccgtgctcctttaacgcttcccagggccggctagccatcggctctgtcacttggttccgagacgaggtagtacccggaaaggaagctgagctgcacatcagagacgtgcggggacacgatgcctcgatctacgtatgtcgcgtcgaggtgctgggcctgggggtcggtacaggaaatggtacgagactggtcgtcgagaaggagcatcctcagttgggagccgggactgttctgctgctgcgcgcagggttttatgcagttagcttcctgtccgtggcggtgggcagcactgtgtactaccagggtaagtgccactgtcacatgggcacgcattgtcacagctccgacggtccaagaggcgttatcccagaaccccggtgtccttag

SEQ ID NO: 58413 - DNA, 573 bp, Artificial Sequence
  derived and/or modified sequence
atggcctggatgctgctgctgatcctgatcatggtgcaccccggctcttgcgccttgtgggtttctcagccacctgaaatcagaactctggagggctcatctgccttcttgccttgcagcttcaacgcctctcaggggaggctggccatcggctcagtgacctggtttcgggacgaggttgtgccaggaaaggaagtacgtaatgggactcccgagtttagggggaggctggcacctctggcgagtagccggtttctgcatgaccaccaagcggaactccacatccgggatgtgcgcggacacgatgccagcatatatgtgtgccgcgtggaagtgctgggcctcggggttgggaccgggaacgggactcgacttgtggtcgaaaaggagcaccctcaattaggggccggcaccgtgctgctcctgagagccggattctatgccgtgtcatttctgtcggtggcagtggggtcaactgtctattaccagggtaagtgccattgccatatgggcacacactgtcattcctctgacggccccaggggcgtgattcccgaaccccgttgcccttag

SEQ ID NO: 58414 - DNA, 573 bp, Artificial Sequence
  derived and/or modified sequence
atggcctggatgctgctgctgatcctgatcatggtgcaccccggcagctgcgcactatgggtgagccagccgcctgagattcgcacactggagggatcctccgctttcctaccctgttcattcaatgcaagccagggaaggctggccattgggtccgtgacctggttccgcgatgaagtagtccctggaaaggaagtgcgaaatggcactcctgaattcagggggcggttagcacctttagcctcatctcgctttctgcatgaccaccaggctgaattgcatatcagagacgttaggggccatgatgcctctatctacgtgtgccgcgtggaggtcctgggcttaggggttggcacaggtaatgggacgcgccttgtggtggagaaggagcatccccaactcggggcaggaactgtacttctcctgagagcaggattttacgccgtcagtttcttaagcgtcgcagtgggaagtaccgtctattatcaggggaagtgccattgtcacatgggaactcactgccacagtagcgacggacctaggggcgtcatcccagagcctcgatgcccgtag

SEQ ID NO: 58415 - DNA, 498 bp, Artificial Sequence
  derived and/or modified sequence
atggcctggatgctgctgctgatcctgatcatggtgcaccccggcagttgcgcactgtgggttagtcagcctccagagatcaggactctggagggttcctctgcctttctaccttgttcattcaacgcatcccagggtcgcctggccatcggcagcgtaacctggttccgcgatgaagtggtgcctggaaaagaggccgaactgcatatacgggacgtgagagggcatgatgcaagtatctacgtgtgtagggtggaagtccttgggctgggtgtgggaacaggaaacggtacacggctcgtcgtggagaaagagcatccccagctgggtgccggcacagtgctcctgttgagggctgggttttacgccgtctctttcctgagtgtggccgtcgggtctacggtctactatcaggggaagtgtcattgccacatgggaacccactgccacagctcagacggaccgcggggagtaatacccgagccgagatgcccttag

SEQ ID NO: 58416 - DNA, 498 bp, Artificial Sequence
  derived and/or modified sequence
atggcctggatgctgctgctgatcctgatcatggtgcaccccggctcctgcgctctctgggtctcccagcctccagagattagaaccctagaggggtcaagtgcttttttgccctgtagtttcaacgcatctcagggccgactggctattggctcggtaacctggttcagggacgaagttgtgcctggcaaagaggccgaattgcatatcagagacgtcagaggccacgacgcttcaatctatgtgtgccgtgtggaagtgttgggacttggcgtcggtacaggaaatggcactcgcttagtcgtggaaaaggagcacccgcaactcggcgcaggaactgtcttgcttcttcgggccggtttttacgccgtctctttcctgtcggtggctgtgggaagcactgtgtattaccaaggaaagtgccactgccacatgggaacccactgccacagcagtgacggcccccgcggtgtgattccggaaccccgttgcccctag

SEQ ID NO: 58417 - DNA, 573 bp, Artificial Sequence
  derived and/or modified sequence
atggcctggatgctgctgctgatcctgatcatggtgcaccccggcagctgtgccctgtgggttagtcagccccctgaaatacgaaccttggagggctcctcagcgttcttaccatgctcctttaacgctagccaagggcgcttagctattggaagcgttacctggtttcgagatgaggttgtgccgggcaaagaagtgcgcaacgggaccccagagtttcgcgggagactcgcccccctagccagctcccggttccttcacgaccatcaggcagaattgcacatacgagatgtccgcggccatgacgcctctatctacgtatgcagagtggaagtgctgggtctcggtgtggggacaggcaacggtacccggctcgtggttgagaaagaacacccccagttgggggctgggacagtgcttctactacgtgctggtttctatgcggtctcttttcttagcgtcgccgtagggtccacagtctattaccagggaaaatgccattgtcatatgggaacgcattgtcattccagcgatggtcctcggggagtcatccccgaaccccgctgcccttag

SEQ ID NO: 58418 - DNA, 498 bp, Artificial Sequence
  derived and/or modified sequence
atggcctggatgctgctcctgatcctcatcatggttcacccgggtagctgcgccctgtgggtctctcagcctcctgagatcagaaccctagaaggctcttctgcttttctaccttgtagcttcaacgccagccaaggacgtctagccataggctcagtcacctggttccgcgatgaagtggtccccggaaaggaggccgaactccatatcagggacgtgcgcggacatgacgcttccatctacgtgtgtagagtggaggtgctgggcctgggcgtggggaccggaaacggcacacgactggtggtagaaaaggaacatccgcagctgggcgctggaaccgtgctgctgctgcgggcaggcttctacgccgtgagcttcctcagtgtggccgtaggaagcaccgtgtactatcagggaaagtgccactgccacatggggacccactgtcatagcagtgacggccctaggggggtgatccccgaacccagatgtccctag

SEQ ID NO: 58419 - DNA, 573 bp, Artificial Sequence
  derived and/or modified sequence
atggcatggatgctcctcctgatattgattatggtgcatccgggaagctgcgctctatgggtttcccaaccacctgagattcggactctagaggggtcttcagccttcttgccgtgttcttttaacgcatctcaagggagattggctatcggctctgtgacctggttccgagacgaggtggtgcctgggaaggaggtgcgaaacgggactcctgaatttcggggacgactcgcaccactcgcaagctccagatttcttcatgaccaccaggcagagctccacatacgcgatgttcgcggacatgatgccagcatctacgtgtgcagggttgaagtactggggcttggtgttgggacgggcaatgggacgagactcgtcgtagaaaaggagcacccgcagctaggggcaggcaccgtccttctcctgcgtgcgggattttatgccgtctcatttctgtctgtggccgtgggctcaactgtatactatcaggggaaatgtcactgtcacatggggacccattgccactctagcgacggtcctcgcggagtcatcccagagccgaggtgtccatag

SEQ ID NO: 58420 - DNA, 573 bp, Artificial Sequence
  derived and/or modified sequence
atggcttggatgctcttgttaattttgattatggtccacccagggagctgcgcactgtgggtctctcagcctccagagatcagaacactggagggtagctcagcattcctcccgtgtagcttcaacgccagccaaggccgactggcaatcggtagtgttacctggttccgggatgaggtggtccctggtaaggaagtgagaaacggtacccccgaattccgcggtcggctggccccacttgccagctccaggtttctgcacgatcaccaggccgagctgcacatccgggatgtgcgcggacatgacgcctctatttatgtgtgccgtgtcgaagtactgggactgggcgtcggcacaggcaacggtacacggctggtggttgagaaggaacaccctcagcttggcgctggaacggttctgctgctgcgcgcaggcttttacgctgtgtcctttctgtctgtggcagtggggtcaactgtctactaccagggtaaatgtcattgtcacatgggcacgcactgtcacagctccgatggcccaagaggggtgatccccgagccaaggtgcccctag

SEQ ID NO: 58421 - DNA, 498 bp, Artificial Sequence
  derived and/or modified sequence
atggcctggatgctgctgctgattctgattatggtgcatccgggatcttgtgcgctatgggtgtctcagcctccagagattcgcaccctagaaggcagttcagcattcctcccatgctctttcaatgcctcacagggccgactcgcaatcggctctgtgacttggtttagggatgaggtcgttcctggcaaggaagccgaactccacatcagggacgtgcggggtcacgacgcttcaatttatgtttgtagggtggaagtcctaggattaggcgttggcacagggaacggcacgcgacttgttgtcgaaaaggagcatccccagctcggagccggaacggtcctcctcctgagggccggtttctatgccgtcagctttctgagcgttgctgtcggcagcacagtctactaccagggaaagtgtcactgtcacatgggaacccattgtcatagctcagatggcccacggggtgtgatcccagagccaagatgtccctag

SEQ ID NO: 58422 - DNA, 573 bp, Artificial Sequence
  derived and/or modified sequence
atggcctggatgctcctgcttatcctgattatggtacatcccggaagctgcgctttatgggtgtctcagcctcccgagattaggaccctggaaggaagctctgctttcctgccctgttcgtttaacgcttcccagggccgtttagctataggctcggtcacctggtttcgcgacgaagtggtgcccggaaaagaagttcggaacgggacccccgagttccgtggcagactcgctcctttggcctcttctcgcttcctgcatgatcatcaggccgagctccatattcgtgacgtccgcggtcatgacgcctctatctacgtttgtcgcgtagaggtgttgggccttggcgtcggcacaggcaatggcactcggctggtagtggaaaaggaacacccccagttgggagccggaaccgtgttgctgttaagggctggattctatgcagtttcattcttgtctgtggccgtcgggagcaccgtttactaccagggcaaatgccactgccatatggggacacactgtcacagctccgacggaccacgcggagtgataccagagccaaggtgcccttag

SEQ ID NO: 58423 - DNA, 573 bp, Artificial Sequence
  derived and/or modified sequence
atggcttggatgctgcttttgatactgataatggtgcatccgggttcctgcgccctgtgggtgtcccagccacctgagattaggactcttgaaggctccagcgccttcctgccttgtagctttaacgcgtcacagggaaggttggccatcggatccgtgacttggtttagagatgaggtggtgcccggtaaagaggtaaggaacgggactcctgaatttcgaggacgtttggccccactggcctcctcgcgctttttgcatgatcaccaggcagaactccatatccgggacgtgagggggcacgatgcctctatctacgtttgccgggtggaagtgctggggctaggggttggtaccggaaatggtacccggttagtagtggaaaaggagcacccacagctgggcgcaggcactgtcttactactgcgggcagggttctatgccgtgtctttcctgtccgtcgcagtgggatctactgtgtactaccaaggaaagtgccattgccatatgggaacccactgccattcctcagacgggccaaggggagtgattcccgaaccgagatgcccatag

SEQ ID NO: 58424 - DNA, 498 bp, Artificial Sequence
  derived and/or modified sequence
atggcgtggatgttattgctcattttgatcatggtacaccctggcagctgcgccctgtgggtgagccagccccctgagattaggaccctcgagggttctagtgcctttctcccctgttctttcaacgcttcccaaggaagactcgccattggatccgtgacctggttcagggacgaggtggtgccagggaaggaagccgagctgcacataagagatgttcgcggacacgatgcgagtatttatgtctgcagggtggaggtgctggggctcggcgtgggcactggcaatggcacccgcctggttgtagagaaggagcacccccaactaggagcagggactgtgctgctgctgagagcaggattctacgccgtgagttttctgtctgttgcagtgggctccacagtgtactaccaagggaaatgccattgccacatgggaacccattgccactccagcgatggccctcggggagttatacctgaaccacggtgcccatag

SEQ ID NO: 58425 - DNA, 498 bp, Artificial Sequence
  derived and/or modified sequence
atggcctggatgctgctcctaattctcattatggtgcatcccggatcatgtgctctgtgggtgtcccaacctccagagattaggacccttgagggaagctcggcattcttgccatgttcttttaacgccagtcagggtcgactggccattggcagtgttacctggtttagagatgaggtagtgccgggaaaggaagcagagcttcacattcgggacgtccggggtcacgatgccagcatttatgtatgccgggtggaggtgctgggcctgggagtgggcaccggtaatgggacaagactagtggttgagaaagaacatccccagttgggagccggtacagtattgctcctgcgggcagggttctacgcggtctcctttctcagtgttgcggtgggatcgaccgtgtactatcagggcaagtgccactgccacatggggactcattgtcactcgagcgatggcccaagaggcgtgatccccgagcccagatgtccatag

SEQ ID NO: 58426 - DNA, 498 bp, Artificial Sequence
  derived and/or modified sequence
atggcctggatgctgttgttgattctgataatggtgcatcctggttcttgcgcgctgtgggtgtcccaacctccggaaatccgaacactcgaggggtctagtgcatttctgccctgttccttcaacgcttcgcaaggaagacttgccattggatccgtgacatggttccgcgacgaagtggtgccaggcaaggaagccgagcttcatatcagggatgtgcgagggcacgatgcttcaatttacgtgtgccgggtggaggtgctgggattgggcgttggcactgggaatggtacaagactggttgttgagaaagagcatcctcagctgggggctggcacagtgttgctgctgcgcgctgggttctacgcggtctcttttctctcagtggcagtcggaagcaccgtatattaccagggaaagtgccactgccacatgggcacacattgtcattcctctgacggacctcgcggagttatccccgagccgcgatgtccctag

SEQ ID NO: 58427 - DNA, 573 bp, Artificial Sequence
  derived and/or modified sequence
atggcctggatgctgctgctgatactgattatggttcaccctggcagttgtgccctatgggtgagccagccgccagagattcgcacactggagggctccagtgcatttctgccgtgttctttcaatgccagccagggcagactggcaatagggtctgtgacgtggtttcgagatgaggtggttccaggcaaagaagttcgaaacggcactccagagttccggggtcggctggccccattagcctcgtcccggttcttacacgaccatcaagccgagctacacatccgggatgtccggggacacgacgcatcaatttatgtgtgcagagtggaggtcttgggactgggggtgggaaccggaaatggcacgcgcctggtcgtagagaaagagcacccccagttgggagcgggtaccgttctgctcctgagggccggattttacgccgtttcgttcttgagcgttgcagtcggctcaacagtgtattaccaagggaaatgccattgccatatggggacccactgccactcaagcgacggccctcggggagtgataccggagccaaggtgtccttag

SEQ ID NO: 58428 - DNA, 498 bp, Artificial Sequence
  derived and/or modified sequence
atggcctggatgttgctgctgattctcataatggtgcatcccggaagctgcgctttatgggttagccagccgcctgagatacgaactttggaaggcagctctgctttcctgccgtgttctttcaacgccagccaggggcgactcgctattggcagtgtgacttggttccgcgacgaagtcgtccctgggaaggaggctgaactccacattagagacgtgcgcggacacgatgccagtatttatgtgtgccgcgtggaggtgttgggcctaggtgtgggcacaggcaatggaacaagattggtcgtggaaaaagagcacccacagcttggtgccggaaccgttctcctgctgcgggctggtttttacgccgtgtcgttcctgagtgtggccgtcggctctacagtgtactaccaggggaagtgtcactgccatatgggaacacattgtcattcttcggatggaccacggggagttattccggagcctaggtgcccctag

SEQ ID NO: 58429 - DNA, 573 bp, Artificial Sequence
  derived and/or modified sequence
atggcctggatgctcctgttgatcctgattatggtccaccccggatcatgcgctttgtgggtctcacaacctcccgagattagaacgctggagggcagttccgcctttctgccttgctcatttaatgcctcacaaggcaggctggcaataggaagcgtgacctggttcagggatgaggtcgtaccaggcaaagaggtgagaaatggcaccccagaattccgcggacgcctcgctccacttgccagtagtagattcctgcacgaccatcaagccgaactgcatatcagagacgtcaggggccacgacgccagtatttacgtttgccgagtggaagtactaggcctgggtgtgggaacgggtaacggaacaaggctggtggtggaaaaagaacatcctcagttgggcgctggcacggtgttacttttgcgagcagggttttacgctgtgagttttctcagcgtggcagtgggctccactgtctattatcagggcaaatgccattgtcatatggggacacactgccacagcagcgatggccctaggggcgtgatccccgagcctcgctgcccctag

SEQ ID NO: 58430 - DNA, 573 bp, Artificial Sequence
  derived and/or modified sequence
atggcctggatgctgctgttgattctgataatggtgcacccaggttcgtgtgctttgtgggtctctcagcctcctgagatcaggactctagagggtagctcagcctttcttccttgttcatttaacgccagccaggggaggctggccatcggtagcgtgacttggttccgggacgaagtggtgcccggaaaagaggtccgcaatgggacaccagaatttcgcggacgcttggcccctctcgccagttcacgcttcctgcacgaccatcaagcagagcttcacatacgcgatgtcaggggacacgacgcaagcatctatgtatgcagggtggaggtcctcggcctgggtgtcggaactgggaacggtacccgactggtggttgagaaagagcaccctcagctcggagcaggcacagttttgttgttgcgggctggattttacgccgtcagtttcttaagcgtggccgtaggcagcactgtctattaccaaggtaaatgtcactgccatatgggaactcactgccactcatctgatggccctagaggggtgattccagagcctcgctgtccgtag

SEQ ID NO: 58431 - DNA, 498 bp, Artificial Sequence
  derived and/or modified sequence
atggcatggatgctgctgctcattctgatcatggtgcaccctggctcatgtgccctctgggtgtcacagccgcctgaaatcagaactcttgaggggtcctccgccttccttccctgcagcttcaacgccagccagggtagactggcaatcgggagcgttacttggtttcgcgacgaagtcgttcctggaaaagaggcagaactgcacattagagacgtacggggacacgatgcctccatctatgtctgccgcgtggaagtactgggccttggagtaggaacagggaatggaactcggctcgtcgtcgagaaggagcaccctcagttgggagccggaaccgtgcttcttctgcgcgcagggttctacgccgtatcctttctgtccgtcgccgtcggtagcacagtgtattatcaggggaaatgccattgccacatggggactcactgccacagtagtgacgggcctcggggagtcatccccgagccgaggtgtccttag

SEQ ID NO: 58432 - DNA, 498 bp, Artificial Sequence
  derived and/or modified sequence
atggcctggatgctgcttctgattttgattatggtgcacccaggttcatgcgccctctgggttagccagcctccagaaatacgtacgctggagggctcttcggccttcctgccttgctcctttaatgcgagccaggggagactggctatcgggagcgtaacttggttccgcgacgaggtggtccccggtaaagaagcggaactgcatattcgcgatgtccgtggtcatgacgcctctatctatgtatgccgcgtcgaagtgcttggtttgggggtcgggaccgggaacggcacgaggttggtggtcgagaaggaacatccccagcttggggctgggaccgtgctcttgctccgcgctggtttttatgccgtgtcttttctgtcagtagcagtaggatcaaccgtctattatcagggaaagtgccactgccatatggggactcattgccacagttctgacggccctagaggagtgattcctgaacctcggtgcccctag

SEQ ID NO: 58433 - DNA, 573 bp, Artificial Sequence
  derived and/or modified sequence
atggcctggatgctgttgctgattctgataatggtgcatcccggatcctgtgctctgtgggtgtcccagccacccgagatcagaaccttggaaggaagttcagctttcttaccctgctccttcaatgcttcgcaggggagattagccatcggatccgttacgtggttccgggacgaggtcgttccaggaaaggaagtaaggaatgggactcccgaatttcggggtagattagcgccactggcaagctctagattcttgcatgatcatcaggccgaacttcatattcgcgatgtccgaggacatgatgcaagcatatatgtatgccgggtggaggtactgggattaggcgtgggcacaggtaacgggactaggttggtcgtcgagaaagagcatcctcagctcggagcaggcaccgtgttgttgctgcgcgcaggattctacgctgtatcattcctctcagtggccgtcgggagcactgtttactatcagggtaagtgtcattgtcacatggggacacattgccattcttctgatggcccaagaggcgtcatccctgagcccaggtgtccatag

SEQ ID NO: 58434 - DNA, 498 bp, Artificial Sequence
  derived and/or modified sequence
atggcctggatgctgctgctgatcctgatcatggtgcaccccggcagctgcgccctgtgggtgagccagccccccgagatcagaaccctggagggcagcagcgccttcctgccctgcagcttcaacgccagccagggcagactggccatcggcagcgtgacctggttcagagacgaggtggtgcccggcaaggaggccgagctgcacatcagagacgtgagaggccacgacgccagcatctacgtgtgcagagtggaggtgctgggcctgggcgtgggcaccggcaacggcaccagactggtggtggagaaggagcacccccagctgggcgccggcaccgtgctgctgctgagagccggcttctacgccgtgagcttcctgagcgtggccgtgggcagcaccgtgtactaccagggcaagtgccactgccacatgggcacccactgccacagcagcgacggccccagaggcgtgatccccgagcccagatgcccctag

SEQ ID NO: 58435 - DNA, 573 bp, Artificial Sequence
  derived and/or modified sequence
atggcctggatgctgctgctgatcctgatcatggtgcaccccggcagctgcgccctgtgggtgagccagccccccgagatcagaaccctggagggcagcagcgccttcctgccctgcagcttcaacgccagccagggcagactggccatcggcagcgtgacctggttcagagacgaggtggtgcccggcaaggaggtgagaaacggcacccccgagttcagaggcagactggcccccctggccagcagcagattcctgcacgaccaccaggccgagctgcacatcagagacgtgagaggccacgacgccagcatctacgtgtgcagagtggaggtgctgggcctgggcgtgggcaccggcaacggcaccagactggtggtggagaaggagcacccccagctgggcgccggcaccgtgctgctgctgagagccggcttctacgccgtgagcttcctgagcgtggccgtgggcagcaccgtgtactaccagggcaagtgccactgccacatgggcacccactgccacagcagcgacggccccagaggcgtgatccccgagcccagatgcccctag

SEQ ID NO: 58436 - protein, 1117 aa, Artificial Sequence
  derived and/or modified sequence
MKKASRSVGSVPKVSAISKTQTAEKIKPENSSSASTGGKLVKPGTAASLSKTKSSDDLLAGMAGGVTVTNGVKGKKSTCPSAAPSASAPAMTTVENKSKISTGTASSTKRSTSTGNKESSSTRERLRERTRLNQSKKLPSAGQGANDMALAKRSRSRTATECDVRMSKSKSDNQISDRAALEAKVKDLLTLAKTKDVEILHLRNELRDMRAQLGINEDHSEGDEKSEKETIMAHQPTDVESTLLQLQEQNTAIREELNQLKNENRMLKDRLNALGFSLEQRLDNSEKLFGYQSLSPEITPDNQSDGGGTLTSSVEGSAPGSVEDLLSQDENTLMDHQHSNSMDNLDSECSEVYQPLTSSDDALDAPSSSESEGIPSIERSRKGSSGNASEVSVACLTERIHQMEENQHSTSEELQATLQELADLQQITQELNSENERLGEEKVILMESLCQQSDKLEHFSRQIEYFRSLLDEHHISYVIDEDVKSGRYMELEQRYMDLAENARFEREQLLGVQQHLSNTLKMAEQDNKEAQEMIGALKERSHHMERIIESEQKGKAALAATLEEYKATVASDQIEMNRLKAQLENEKQKVAELYSIHNSGDKSDIQDLLESVRLDKEKAETLASSLQEDLAHTRNDANRLQDAIAKVEDEYRAFQEEAKKQIEDLNMTLEKLRSDLDEKETERSDMKETIFELEDEVEQHRAVKLHDNLIISDLENTVKKLQDQKHDMEREIKTLHRRLREESAEWRQFQADLQTAVVIANDIKSEAQEEIGDLKRRLHEAQEKNEKLTKELEEIKSRKQEEERGRVYNYMNAVERDLAALRQGMGLSRRSSTSSEPTPTVKTLIKSFDSASQVPNPAAAAIPRTPLSPSPMKTPPAAAVSPMQRHSISGPISTSKPLTALSDKRPNYGEIPVQEHLLRTSSASRPASLPRVPAMESAKTLSVSRRSSEEVKRDISAQEGASPASLMAMGTTSPQLSLSSSPTASVTPTTRSRIREERKDPLSALAREYGGSKRNALLKWCQKKTEGYQNIDITNFSSSWNDGLAFCALLHTYLPAHIPYQELNSQDKRRNFMLAFQAAESVGIKSTLDINEMVRTERPDWQNVMLYVTAIYKYFET

SEQ ID NO: 58437 - DNA, 3354 bp, Artificial Sequence
  derived and/or modified sequence
atgaagaaggccagcagaagcgtgggcagcgtgcccaaggtgagcgccatcagcaagacccagaccgccgagaagatcaagcccgagaacagcagcagcgccagcaccggcggcaagctggtgaagcccggcaccgccgccagcctgagcaagaccaagagcagcgacgacctgctggccggcatggccggcggcgtgaccgtgaccaacggcgtgaagggcaagaagagcacctgccccagcgccgcccccagcgccagcgcccccgccatgaccaccgtggagaacaagagcaagatcagcaccggcaccgccagcagcaccaagagaagcaccagcaccggcaacaaggagagcagcagcaccagagagagactgagagagagaaccagactgaaccagagcaagaagctgcccagcgccggccagggcgccaacgacatggccctggccaagagaagcagaagcagaaccgccaccgagtgcgacgtgagaatgagcaagagcaagagcgacaaccagatcagcgacagagccgccctggaggccaaggtgaaggacctgctgaccctggccaagaccaaggacgtggagatcctgcacctgagaaacgagctgagagacatgagagcccagctgggcatcaacgaggaccacagcgagggcgacgagaagagcgagaaggagaccatcatggcccaccagcccaccgacgtggagagcaccctgctgcagctgcaggagcagaacaccgccatcagagaggagctgaaccagctgaagaacgagaacagaatgctgaaggacagactgaacgccctgggcttcagcctggagcagagactggacaacagcgagaagctgttcggctaccagagcctgagccccgagatcacccccgacaaccagagcgacggcggcggcaccctgaccagcagcgtggagggcagcgcccccggcagcgtggaggacctgctgagccaggacgagaacaccctgatggaccaccagcacagcaacagcatggacaacctggacagcgagtgcagcgaggtgtaccagcccctgaccagcagcgacgacgccctggacgcccccagcagcagcgagagcgagggcatccccagcatcgagagaagcagaaagggcagcagcggcaacgccagcgaggtgagcgtggcctgcctgaccgagagaatccaccagatggaggagaaccagcacagcaccagcgaggagctgcaggccaccctgcaggagctggccgacctgcagcagatcacccaggagctgaacagcgagaacgagagactgggcgaggagaaggtgatcctgatggagagcctgtgccagcagagcgacaagctggagcacttcagcagacagatcgagtacttcagaagcctgctggacgagcaccacatcagctacgtgatcgacgaggacgtgaagagcggcagatacatggagctggagcagagatacatggacctggccgagaacgccagattcgagagagagcagctgctgggcgtgcagcagcacctgagcaacaccctgaagatggccgagcaggacaacaaggaggcccaggagatgatcggcgccctgaaggagagaagccaccacatggagagaatcatcgagagcgagcagaagggcaaggccgccctggccgccaccctggaggagtacaaggccaccgtggccagcgaccagatcgagatgaacagactgaaggcccagctggagaacgagaagcagaaggtggccgagctgtacagcatccacaacagcggcgacaagagcgacatccaggacctgctggagagcgtgagactggacaaggagaaggccgagaccctggccagcagcctgcaggaggacctggcccacaccagaaacgacgccaacagactgcaggacgccatcgccaaggtggaggacgagtacagagccttccaggaggaggccaagaagcagatcgaggacctgaacatgaccctggagaagctgagaagcgacctggacgagaaggagaccgagagaagcgacatgaaggagaccatcttcgagctggaggacgaggtggagcagcacagagccgtgaagctgcacgacaacctgatcatcagcgacctggagaacaccgtgaagaagctgcaggaccagaagcacgacatggagagagagatcaagaccctgcacagaagactgagagaggagagcgccgagtggagacagttccaggccgacctgcagaccgccgtggtgatcgccaacgacatcaagagcgaggcccaggaggagatcggcgacctgaagagaagactgcacgaggcccaggagaagaacgagaagctgaccaaggagctggaggagatcaagagcagaaagcaggaggaggagagaggcagagtgtacaactacatgaacgccgtggagagagacctggccgccctgagacagggcatgggcctgagcagaagaagcagcaccagcagcgagcccacccccaccgtgaagaccctgatcaagagcttcgacagcgccagccaggtgcccaaccccgccgccgccgccatccccagaacccccctgagccccagccccatgaagaccccccccgccgccgccgtgagccccatgcagagacacagcatcagcggccccatcagcaccagcaagcccctgaccgccctgagcgacaagagacccaactacggcgagatccccgtgcaggagcacctgctgagaaccagcagcgccagcagacccgccagcctgcccagagtgcccgccatggagagcgccaagaccctgagcgtgagcagaagaagcagcgaggaggtgaagagagacatcagcgcccaggagggcgccagccccgccagcctgatggccatgggcaccaccagcccccagctgagcctgagcagcagccccaccgccagcgtgacccccaccaccagaagcagaatcagagaggagagaaaggaccccctgagcgccctggccagagagtacggcggcagcaagagaaacgccctgctgaagtggtgccagaagaagaccgagggctaccagaacatcgacatcaccaacttcagcagcagctggaacgacggcctggccttctgcgccctgctgcacacctacctgcccgcccacatcccctaccaggagctgaacagccaggacaagagaagaaacttcatgctggccttccaggccgccgagagcgtgggcatcaagagcaccctggacatcaacgagatggtgagaaccgagagacccgactggcagaacgtgatgctgtacgtgaccgccatctacaagtacttcgagacctag

SEQ ID NO: 58438 - DNA, 3354 bp, Artificial Sequence
  derived and/or modified sequence
atgaaaaaggccagcaggagcgtgggctccgtacccaaagtgtctgccatttccaagacacagaccgccgagaagatcaaacctgaaaatagtagctctgcatccaccgggggcaagctcgtgaagcctgggaccgcagcttccctaagtaaaacgaaatcatccgacgacctccttgccggcatggcgggaggcgttaccgtaacaaatggcgttaaggggaagaaaagtacatgtcctagtgctgctccgagcgcctccgctccggctatgaccacagtcgaaaacaagtctaagatatcaactgggacggcaagttccactaagcgttccacttccacaggaaataaagagtcttcatctaccagggagaggctacgcgaacggactaggctgaatcagtctaagaagctacctagtgctggacagggagcgaacgatatggccctcgcaaagcgctcccgctctcgcactgccactgagtgcgacgtgaggatgtcaaagtcaaaatcagataaccagataagcgatcgggcggccctcgaggcaaaggtgaaggacttgttaaccctggcaaagacaaaagatgtagagatactgcatctccgcaatgagctacgggatatgagagctcaactagggattaatgaagaccatagcgagggggatgagaaaagtgagaaggagaccattatggcgcaccaacctacagacgtagagtctacactgctccagttgcaggaacagaacaccgccattcgcgaggagttaaaccagctcaaaaacgagaatagaatgttaaaagaccgcctgaatgcccttggctttagccttgagcagcgtctggacaactccgagaagctctttgggtatcagagcctgtctcctgagattacgcctgacaaccaatcagatggcggcggcaccttgacttcttccgttgaggggtcagcgcccggcagcgtcgaagatctgttgagtcaggatgaaaacaccctgatggatcatcaacattcgaattccatggataatctcgactctgagtgctccgaggtgtaccaacccctaacttccagcgacgacgcgctcgatgctccttcaagctcggagtctgagggcatcccttccatcgaaaggtcaagaaagggatcttctgggaacgcgagcgaggtgtctgtcgcttgcctcactgagcgaattcatcagatggaagagaaccagcattctactagcgaagagctgcaagccactctccaggagctggccgatctccagcagatcacacaggagttaaattccgagaatgagagactgggcgaagaaaaagtcattctgatggagtccttatgtcaacaaagtgacaagctagagcatttcagtaggcagatcgagtattttcggtcactactggatgaacatcatatcagttacgtcattgatgaagacgttaaaagtggccggtatatggaactagagcagcgttacatggacctggctgagaacgcccgttttgaacgcgaacagctcctgggggttcagcagcaccttagcaatacacttaagatggccgaacaggataacaaagaagcccaggagatgatcggagcgctgaaagaacgtagtcaccacatggagaggatcatcgagtccgaacagaagggcaaagcggcacttgctgccacgctggaggaatacaaggccaccgttgccagcgatcaaatcgagatgaatagactgaaggctcagctggaaaacgagaagcagaaagtcgctgagctatactctattcataacagcggagataagagcgatatacaggacttactggagagcgttcggttggacaaagaaaaggctgagactctagcctcatccctgcaggaggacttggcccacactagaaacgatgcgaaccgtctccaggatgccatagctaaagttgaagacgagtacagggcctttcaggaagaagccaaaaagcagatcgaagatttgaacatgacgcttgagaaactgcggagcgacctggatgagaaagagactgaacgctcggacatgaaggagacaatcttcgaactcgaagacgaggtggaacagcaccgcgctgtgaagctccatgacaatttaatcatttctgatctggaaaacacagtcaaaaagctgcaggaccagaagcacgacatggagcgagagatcaagacgcttcatcggcgactgagagaagaatccgcagaatggcggcagttccaagcggacctccaaacagccgtagtcattgccaatgatatcaagagcgaagctcaagaagaaataggcgatctgaaacgcagactgcacgaggcccaggagaagaatgaaaagctaacaaaggagctcgaagagatcaagagcaggaaacaggaagaagagagaggccgcgtgtataattacatgaacgcggtggaacgagatctggcagcgctgaggcaaggtatgggactaagtaggcgctcatctacctcctccgaacccacacccaccgtgaaaactctgatcaagagctttgactctgccagccaggtccccaatcccgcagccgctgccattccacggacaccccttagcccatcacccatgaaaacaccgcccgccgccgccgtctcacccatgcagcggcattctatcagtggcccgattagcactagcaaacctcttactgccttatccgacaagcgccctaattacggcgagatccccgtccaggagcatctgctccggacttcctctgcaagcagaccagcatctcttccccgcgtccctgctatggaaagcgccaaaactctgtctgtgagtaggcgttcttccgaggaggtcaagagagatatcagcgcccaggagggggccagcccggcatcactgatggcaatggggaccacaagtcctcaactgtccctcagttcttcccccacagcttcagtgacgccgaccacgaggtcccgaataagggaggagcggaaggaccctctgtccgcgcttgcccgtgaatatggagggagtaaacgcaatgcactgctgaaatggtgccagaagaagacggagggataccagaacatcgatatcactaatttttccagcagctggaacgacggcctggcattttgtgctctgctccacacgtatttgcctgctcatatcccctatcaagagcttaacagccaggataagaggaggaactttatgctcgcttttcaggcagcagagtccgttggcatcaagagcactcttgatatcaacgagatggttaggactgagaggccggattggcagaacgtcatgctatacgttactgctatctataaatattttgagacttag

SEQ ID NO: 58439 - DNA, 3354 bp, Artificial Sequence
  derived and/or modified sequence
atgaagaaagcgtctcggagtgtgggttctgttcccaaggtcagcgctatcagcaaaacacaaaccgcagaaaaaatcaagccggagaacagcagcagcgctagcacaggaggtaagcttgtgaaacccgggaccgcggcaagtctgagcaagaccaaaagttccgacgaccttttggccggaatggccggaggggtaaccgtcacaaatggggtgaaaggcaaaaagtcaacatgtccatccgccgctccaagtgctagtgctcctgctatgacgaccgtggagaacaaaagcaagatctccactgggactgcaagctccacaaaacgctctacaagtactggtaataaggagtcttcttctactcgggagcgtctccgcgagaggacccggctgaatcaatccaaaaagcttccttcagccgggcagggcgccaatgatatggccctcgcgaaacggtcaagatctcgtacagccaccgagtgtgatgtgcgaatgtctaagtcaaagtccgacaatcagatctccgatagagccgccctggaagctaaggtgaaggaccttttgaccttagcaaagactaaggacgtcgaaatcctgcacctgagaaatgaattacgcgacatgcgcgcccaactgggcattaacgaggaccactcagagggtgacgaaaagagcgagaaagaaacgataatggcacaccaacccaccgatgtagagagcactctgttgcagttacaagagcagaacactgccataagggaagaattgaaccaactcaaaaatgagaaccggatgctcaaggataggttgaacgccctggggtttagcctggagcagcggctagacaactccgagaagctgtttgggtaccagtcactgagtccggagatcaccccggataaccagtcagatggtggggggactctgacaagttcagttgaggggtccgctcctggatccgttgaagatctgttgagtcaggacgaaaataccctcatggatcaccagcactcaaacagcatggataacttggactccgagtgtagcgaagtgtaccaaccactaacatcttctgacgatgcactcgacgccccatctagtagcgagagcgagggtataccctcgattgagcgctccaggaagggtagctccggcaacgcatcggaagtgagcgtcgcgtgcctcactgagagaatacaccagatggaagaaaaccagcatagcacatcagaagaactccaggcgaccctacaagaacttgcagatctccaacagattactcaggagctcaactccgagaacgagcggctaggcgaggaaaaggtgattctcatggagagcctgtgccagcagagcgacaagctggagcacttttcacggcaaattgaatactttcgttccctgttggatgagcatcatatcagctacgtgattgacgaggatgtgaagtcaggacggtacatggagctggagcagaggtacatggatcttgccgaaaatgctcgatttgaaagagagcagctattgggcgtccagcagcatctgtcaaatacactgaaaatggccgaacaggacaataaggaagcccaagaaatgataggcgcgctgaaggagagatcacaccacatggagcgcattatcgaaagtgagcagaagggaaaagcagctctggcagcaactcttgaggaatacaaggccaccgtggcctcagatcagatcgagatgaataggttaaaggcccagctggagaacgagaagcaaaaagttgccgagctgtactctatacacaacagtggggataaatcagacatccaagacttactggaatcagtacgactggacaaagagaaggctgagacgctggccagctccctacaggaagatctcgcccatactagaaatgacgccaatcgactccaggacgccatagcaaaagtagaagacgagtatagggctttccaggaggaagccaagaagcaaatcgaagatctgaacatgacacttgagaaacttcgatccgaccttgacgaaaaggaaactgagaggtccgatatgaaggaaacaatttttgaactcgaggatgaggtggagcaacacagggcagtgaagctacacgacaacctaattatctctgacctggaaaatactgtgaaaaagttacaagaccaaaagcacgatatggaacgtgagattaaaacactccacagaaggctaagggaggaaagcgcagagtggagacagttccaggcagacctgcagacagcagtcgtaatcgccaatgatatcaagagcgaagcccaggaggagatcggcgacctgaaacggcggctgcatgaggcccaggaaaagaatgagaagttgacaaaagagcttgaagaaattaagagtcggaaacaggaggaagagcggggaagagtgtacaactacatgaacgccgtggaacgggatctcgctgctctccggcaggggatggggctgagccgtcggtcctctaccagcagtgagccaacacctaccgtgaagacattaattaaaagttttgattccgcctctcaagtgccaaaccccgctgctgccgcaatcccgaggacgcccctgtccccatcacctatgaagaccccacctgctgctgccgtgtcgccaatgcaaaggcacagcatcagtggacccatctctactagcaagccactgaccgccctcagcgacaaacgtcctaactatggggaaattcccgttcaggagcacctgcttaggacctccagtgcttctaggcctgcctccctgccccgggtcccagccatggaatccgctaaaacccttagcgtgtcaagaagatcttctgaagaggtcaagcgggatatcagcgcgcaggagggggctagtcctgcttctctgatggctatgggtactacgtccccacagctgtccctctcaagttcacccacagcatctgtcaccccgactacccgctccagaattagagaagaaaggaaggatcccctgtcagcacttgctagggagtacggcgggtcgaaaagaaacgctctccttaaatggtgccagaaaaaaacggaaggatatcagaacattgacatcaccaacttttcatccagctggaacgacggcctcgccttctgtgccttgctccatacatatctgccggcccacattccataccaggaattgaacagtcaggataaaaggcgcaatttcatgctggcctttcaggcagccgaatctgttgggattaagtctacattggatattaacgagatggtgcgcaccgagagacctgactggcagaacgttatgctgtatgtgactgccatctacaaatatttcgagacatag

SEQ ID NO: 58440 - DNA, 3354 bp, Artificial Sequence
  derived and/or modified sequence
atgaagaaggccagccgctctgtgggctctgtgcccaaggtgtctgccatcagcaagacccagacagctgagaagatcaagccagagaacagcagcagcgccagcactggaggcaagctggtgaagccaggcacagctgccagcctgagcaagaccaagagcagtgatgacctgctggccggcatggccggcggcgtgacagtgaccaacggggtgaagggcaagaagagcacctgccccagcgctgcccccagcgccagcgccccagccatgaccaccgtggagaacaagagcaagatcagcactggaacagccagcagcaccaagaggagcaccagcacaggcaacaaggagagcagcagcacccgggagcggctgcgggagaggacccggctgaaccagagcaagaagctgcccagcgctggccagggcgccaatgacatggccctggccaagaggagccgcagcaggacagccacagaatgtgatgtgaggatgagcaagagcaagagtgacaaccagatcagtgacagagctgccctggaggccaaggtgaaggacctgctgaccctggccaagaccaaggatgtggagatcctgcacctgagaaatgagctgcgggacatgagggcccagctgggcatcaatgaagaccacagtgaaggagatgagaagtctgagaaggagaccatcatggcccaccagcccacagatgtggagagcaccctgctgcagctgcaggagcagaacacagccatccgggaggagctgaaccagctgaagaatgaaaataggatgctgaaggaccggctgaatgccctgggcttcagcctggagcagaggctggacaacagcgagaagctgtttggctaccagagcctgagccctgagatcaccccagacaaccagagtgatggcggcggcaccctgaccagctctgtggagggcagcgcccctggctctgtggaggacctgctgagccaggatgagaacaccctgatggaccaccagcacagcaacagcatggacaacctggacagcgagtgcagcgaggtgtaccagcccctgaccagcagtgatgatgccctggatgcccccagcagcagcgagagcgagggcatccccagcattgaaagaagcaggaagggcagcagtggaaatgccagcgaggtgtctgtggcctgcctgacagagcgcatccaccagatggaggagaaccagcacagcaccagcgaggagctgcaggccaccctgcaggagctggccgacctgcagcagatcacccaggagctgaacagtgaaaatgaaaggctgggggaggagaaggtgatcctgatggagagcctgtgccagcagagcgacaagctggagcacttcagccggcagatcgagtacttccgcagcctgctggatgagcaccacatctcctatgtgattgatgaagatgtgaagagcggccgctacatggagctggagcagcgctacatggacctggccgagaatgccaggtttgagcgggagcagctgctgggcgtgcagcagcacctgagcaacaccctgaagatggccgagcaggacaacaaggaggcccaggagatgattggagccctgaaggagaggagccaccacatggagcgcatcatcgagagcgagcagaagggcaaggccgccctggccgccaccctggaggagtacaaggccaccgtggccagtgaccagatcgagatgaaccggctgaaggcccagctggagaatgagaagcagaaggtggccgagctgtacagcatccacaacagcggggacaagagtgacatccaggacctgctggagagcgtgcggctggacaaggagaaggccgagaccctggccagcagcctgcaggaggacctggcccacaccagaaatgatgccaaccggctgcaggatgccatcgccaaggtggaggatgagtaccgggccttccaggaggaggccaagaagcagatcgaggacctgaacatgaccctggagaagctgcggagtgacctggatgagaaggagacagagaggagtgacatgaaggagaccatctttgagctggaggatgaggtggagcagcacagagctgtgaagctgcatgacaacctgatcatcagtgacctggagaacacagtgaagaagctgcaggaccagaagcatgacatggagcgggagatcaagaccctgcaccggcggctgcgggaggagagcgctgagtggaggcagttccaggccgacctgcagacagctgtggtgattgccaatgacatcaagtctgaggcccaggaggagattggagacctgaagaggcggctgcacgaggcccaggagaagaatgagaagctgaccaaggagctggaggagatcaagagcaggaagcaggaggaggagcggggccgggtgtacaactacatgaatgctgtggagcgggacctggccgccctgcggcagggcatgggcctgagcagaagaagcagcaccagcagcgagcccacccccaccgtgaagaccctcatcaagagctttgacagcgccagccaggtgcccaacccagctgctgctgccatccccaggacccccctgagccccagccccatgaagaccccacctgctgctgctgtgagccccatgcagaggcacagcatcagcggccccatcagcaccagcaagcccctgacagccctgagtgacaagaggcccaactacggggagatccctgtgcaggagcacctgctgcggaccagcagcgccagcaggcctgccagcctgccccgggtgcctgccatggagagcgccaagaccctgtctgtgtccagaagaagcagcgaggaggtgaagagggacatcagcgcccaggagggcgccagccctgccagcctgatggccatgggcaccaccagcccccagctgagcctgagcagcagccccacagcctctgtgacccccaccaccaggagccgcatccgggaggagaggaaggaccccctgagcgccctggcccgggagtatggaggcagcaagagaaatgccctgctgaagtggtgccagaagaagacagagggctaccagaacatcgacatcaccaacttcagcagctcctggaatgatggcctggccttctgtgccctgctgcacacctacctgcctgcccacatcccctaccaggagctgaacagccaggacaagagaagaaacttcatgctggccttccaggccgctgagagcgtgggcatcaagagcaccctggacatcaatgagatggtgaggacagagaggccagactggcagaatgtgatgctgtatgtgacagccatctacaagtactttgagacctag

SEQ ID NO: 58441 - DNA, 3354 bp, Artificial Sequence
  derived and/or modified sequence
atgaagaaggccagccggagcgtgggcagcgtgcccaaggtgagcgccatatctaaaacccagacagcagagaaaatcaagcccgagaactcgagcagcgctagtaccggcggaaaattggtcaagccaggtactgcggccagccttagtaagacaaagagctctgacgacctccttgccggtatggccgggggggttaccgtcaccaatggggttaaaggcaagaagtctacgtgccccagcgcagctccatcagcgtcggcgcccgcaatgacaaccgtggaaaataagtctaagatctctaccggtacggccagctctaccaaaagatcaacctcaacgggaaacaaggaatcttccagtacgagggaacgacttcgggaacggactagactgaatcaaagcaaaaagctgccgtcagccggacagggcgccaatgacatggcactcgcaaagcgctctcgcagtagaacagcaacagagtgcgacgttagaatgtcgaagtccaagagcgacaatcaaatatcagatagagctgctcttgaggctaaggtaaaagatctactgactctggccaagacaaaggatgtggaaattcttcacctgagaaacgagcttcgtgatatgagggcccagttaggaattaatgaggatcatagcgagggcgatgagaaatccgaaaaggagacaattatggcccaccagccgactgatgtagagtcaacactgctccagttacaggagcaaaatactgcaattcgggaggagctgaaccagctaaagaacgagaacaggatgctgaaggatcgactcaacgcactcggcttctccttggagcagcgcctggacaattctgagaaactgtttggatatcagagcctgtcacccgagatcacaccagacaatcagagcgatgggggaggcacactgacatcatccgtggaaggaagcgccccaggatctgtcgaagacctgttgtcacaagacgaaaatactttgatggatcatcagcattctaattccatggataatctcgattctgaatgcagcgaagtataccagcctctaacctcaagcgatgacgctctggatgcaccgtcatcaagcgagagcgagggtattccgtcaattgagagatcccggaaaggctcttcggggaacgcctccgaagtgtccgtcgcctgcctgaccgaacgtattcaccagatggaagaaaatcagcactcgacctcagaagagcttcaagcaacacttcaggaattagccgacctgcaacaaataactcaggagttgaattctgagaacgagaggctgggtgaggaaaaggtcatactcatggaatccctctgtcagcagagcgataaactcgagcacttcagccgacagatcgagtatttccggtccctcctggatgaacatcatatatcttacgtgattgatgaagacgttaagagcgggaggtacatggagttggaacagaggtacatggacttagccgaaaatgccaggtttgagcgtgaacagctgctcggcgtgcagcagcaccttagcaatactctaaaaatggccgaacaggataacaaggaggcacaggagatgattggggctcttaaggagcgaagtcaccatatggaaaggataatagagtcggagcagaaggggaaggcagcccttgctgcaactcttgaagaatacaaagctaccgtggcgtcagatcaaattgagatgaatcgccttaaggcccagctagaaaacgaaaagcagaaggtcgccgagctctatagcatccacaatagcggagataagagcgacatccaggacttgttggagtccgtgcgattagacaaagagaaagcagagactttggcgtccagcctgcaggaggatctcgcacatactcgcaacgatgcgaatcgccttcaggacgccattgcaaaagtggaagacgagtacagggcctttcaggaagaggctaaaaagcagatcgaggacttaaacatgactcttgagaaattgcgctccgaccttgatgaaaaggagactgagagaagtgacatgaaagagaccatattcgagctggaagatgaagttgagcagcaccgcgcggtcaagctccacgataacctgatcatatccgacttggagaacacagtgaaaaagctccaggatcagaaacacgatatggaacgggaaataaaaacccttcacagaagattgcgggaggaatccgcagagtggcggcaatttcaggccgatttgcaaactgccgtggtcattgccaacgacatcaaaagcgaggcccaggaagagatcggggacctcaagcggaggcttcacgaggcccaggaaaaaaatgaaaagctcactaaggaactggaagagattaagagtagaaaacaggaagaggagagaggtagagtctataattacatgaatgctgtggaacgagatttggctgccctgcgacagggcatgggcctctctagacggtccagcacctcgtccgaacccacccctacagtgaagactttgattaagtcttttgattcggcatcccaggtgccaaacccggccgctgccgcgattcctaggactcctctctcccctagtccgatgaaaacccctccggccgctgcagtatctccgatgcaaagacacagcatttccggcccaatctctaccagtaagccgctgacagcgctgagtgacaaacgaccaaattacggtgaaatcccggtgcaagagcacctgctgcgcacatcctcagcaagccgccctgcatcactaccaagggttcctgccatggagtccgctaaaacattatccgtcagccgtagatcctccgaagaagtgaagcgtgatatttctgcacaggagggagcctcaccggcatccctcatggctatgggtaccacatccccccagctctccctgtcctcttcgcccacagcctctgtcactccaaccactagaagtagaatccgtgaagagcggaaagatccactctcggctctggccagggaatacggaggatcaaagcggaacgccttgctgaagtggtgtcagaagaaaactgagggataccagaatatagatatcaccaacttcagctcgtcctggaacgatggactggctttctgtgcactgctccacacttatcttcccgctcacatcccttaccaggagttgaacagccaagacaagcgtcgcaattttatgctggcattccaagcagctgagtccgtcggcataaaatcaacgctcgacatcaatgagatggttcgcactgaacgaccagactggcagaacgtgatgctatatgtgacggctatttacaagtattttgaaacttag

SEQ ID NO: 58442 - DNA, 3354 bp, Artificial Sequence
  derived and/or modified sequence
atgaagaaggccagccggagcgtgggcagcgtgcccaaggtgagcgctatatcgaagacacaaactgcagagaaaattaagcccgagaactcttctagcgccagtaccgggggtaagctggttaagccgggaactgccgcttccctcagtaagacgaagagtagtgacgatctgttagctggtatggctgggggagttactgtgactaatggtgtgaagggaaagaaatccacatgccctagtgctgccccctccgcctctgcccctgctatgacgaccgtcgagaataaaagcaagatctccacaggtacggcttcatctacaaaaaggagtacgagcacaggcaataaggagagttctagtacgagggagcgcctaagagagcggacaagactgaaccagtctaaaaagctgccctccgccggtcagggtgccaacgatatggcactcgcaaagcgtagcaggagccgcacagcaacagaatgcgacgtgcggatgtcaaaatccaaatccgataatcagattagtgatagggcggctctggaagcgaaggttaaggacctgctcacgctggcaaaaaccaaggatgtggaaattctccatttgcggaacgaactgagagacatgcgtgcgcagctgggcattaacgaggatcacagcgaaggcgacgaaaaatcagaaaaggagacaattatggcacaccagccaacagatgtggaatccactctcctacagctgcaggagcagaacactgccatacgagaagagctaaaccagctaaagaatgagaaccgcatgctgaaggatcggttgaacgctctgggcttctcactcgaacaaagattagacaacagtgagaaactattcgggtaccagagcctcagccccgaaatcacaccagataaccagagtgatggcggcggcactcttacaagcagcgtggagggatctgctccagggagtgtggaagatctgctgagtcaggacgagaacaccctgatggaccatcaacacagtaattctatggacaatctcgactcagagtgcagcgaagtgtaccaacctcttacatcctcggacgacgctctggatgccccatcatcgtctgagagtgaggggatcccctccattgaacgctcacggaaaggaagctcggggaacgctagtgaagtgtctgtcgcgtgcctgacagaaagaattcaccagatggaggaaaatcagcactctacctccgaggaactgcaggcgacgcttcaggaactggcagatctgcagcaaattacccaagaattaaactcagagaacgaaagactgggcgaggaaaaagtgattctgatggagtctctgtgccagcagagtgataaactggaacatttttctcgccagatcgagtactttagaagtttgctagacgaacatcacatcagctatgtgatagacgaagatgtgaaatccgggcggtacatggagctggaacagcggtatatggatctggcggagaacgcaagattcgagcgcgagcaactgttgggcgtccaacaacacctgagcaatacgttgaaaatggccgaacaagacaataaagaagcacaggagatgattggcgccctgaaggaacgtagtcatcatatggagaggatcatcgagtccgagcagaaagggaaggcagcactggcagcgactctggaggaatataaggcaactgttgccagtgaccagattgaaatgaacagactgaaagctcagcttgagaacgagaaacagaaggttgctgaactctatagcattcataacagcggagataagagcgatattcaagaccttttagagtccgtaagactcgataaagaaaaagctgagactctggcctcaagcctgcaggaggatctcgcccacacacgaaacgatgcaaaccggctacaagatgcaattgccaaagtcgaagacgaataccgcgccttccaagaggaggccaagaaacagatagaggatcttaatatgaccctagagaagctacgctctgatctagatgagaaagaaaccgagcgctccgatatgaaagagaccattttcgagctggaggatgaggtggagcaacacagggcagtgaaattacatgacaatctgataataagcgaccttgaaaacacagtgaagaagctgcaggatcagaaacacgacatggaacgtgagatcaagaccctccaccgtagactgcgtgaggaatccgcagaatggcgccagttccaggcagacctgcagactgctgtggtcatcgctaatgacataaagagtgaggcacaggaagaaattggggacctcaagaggagactccatgaagcccaggaaaagaatgagaagctaaccaaggaactcgaggagataaaaagccgcaaacaagaagaagaacgggggagggtttataactacatgaacgccgtggaaagggatctggccgcactaaggcagggaatgggactgtctcgccgctcctcgaccagcagtgagcccactccaaccgtgaagactctgatcaagtcttttgattcggcgtcccaagttccaaatccagcggcagctgcgattccacgcactcctctgtctccctcacccatgaaaacacccccagcagctgcagtgtcgcccatgcagaggcattctatttcaggacctatcagtacgagcaagcctctcactgcactgagtgataagcgtcccaactatggcgaaattcccgtgcaggaacatctactgcgaacaagttcggctagccgccctgcatcactgcccagagttccagcaatggagagcgccaagaccctgtctgtctcccgaaggtccagcgaggaggtcaagagggacatcagcgcccaggagggcgccagcccagctagtctcatggcaatgggtactacatcaccccagctttctctctcaagcagccccacagcgagcgttacccctactactcgcagtagaattcgcgaagagcggaaggaccccctttccgccctggcgcgagagtacggtggctccaaacggaacgcgctgctcaaatggtgccagaagaaaactgaaggataccaaaacatagatattacaaacttttcttctagctggaatgacggcctcgctttttgtgcgttattacacacctacttgccggcccacatcccttaccaggaactgaactctcaggacaagaggagaaacttcatgctggcctttcaggctgcagagtcggttggtattaagtccacgctcgatatcaacgaaatggtccgaaccgagaggcctgactggcagaatgtcatgctctacgtgacagcgatctataagtactttgagacctag

SEQ ID NO: 58443 - DNA, 3354 bp, Artificial Sequence
  derived and/or modified sequence
atgaaaaaggcgtcccgaagtgtaggttccgtccccaaggtctccgccataagtaaaacgcagaccgccgaaaagataaagccagaaaactcatctagcgcgtctactggtgggaagcttgtgaaacccggaactgctgccagcctttccaagacgaaatcttctgacgatctgctggcgggtatggcgggtggcgtgaccgtcaccaacggggtgaaagggaagaagagtacctgcccaagcgccgcaccttcagcgagcgccccagctatgacaacggtggagaataagtctaaaatatcaaccggcaccgcctcgtcaaccaagcgctccacatccacagggaacaaagagtctagctcaactcgcgaacggctaagggaaaggacccgcttaaatcagagcaaaaagctcccatccgcagggcagggggctaatgatatggcccttgcaaagaggagcagatctcgcacggctacggagtgcgatgttcggatgagcaagtctaaaagtgacaatcagatcagcgaccgcgctgcactcgaggctaaggtgaaggacctattaactctcgcaaagactaaagacgtggagatccttcatctaaggaacgagctgcgggacatgagggcgcagctgggaatcaatgaggaccatagcgaaggcgatgagaaaagcgagaaggagaccatcatggcacatcagcctacggatgtggagagtaccttactccagctgcaggagcagaacaccgcgattagagaggagttaaaccagctgaaaaatgagaacaggatgctgaaagacagactgaatgccctgggattctcactggagcaaaggttggacaatagcgaaaagttgttcgggtatcagtcactttcccccgagataacacctgataatcaatccgatggcggaggtacacttaccagctctgtggaaggttcggccccaggatctgtggaagatctactgagccaggatgagaacactcttatggaccatcagcatagtaatagcatggacaacctagactcggagtgcagtgaggtttaccagccccttacatctagtgatgatgcccttgatgcgccttcaagttcagagtctgaaggaatccctagcatcgagaggtccagaaaaggctcgtccggtaacgcctctgaggtgagtgtcgcctgtctgactgaaaggattcatcagatggaagaaaatcaacattctacatcggaagagttgcaggccacattgcaggagcttgcagacttacagcagattacccaggagttgaatagtgaaaacgaacgcctgggcgaagagaaggtgattctgatggaatcactttgccagcagtccgataaattggaacactttagtcggcagattgagtatttcagaagcctgctcgacgaacatcacatttcttatgtgattgacgaggacgtgaagtctggacgctatatggagctggaacagcgctacatggatcttgccgagaatgctaggttcgagagggagcaattactgggtgttcaacagcacctcagtaataccttgaaaatggcagagcaggacaacaaggaagcacaggagatgatcggggcactgaaggagcggtcacaccatatggagcgcattattgagagtgagcaaaaggggaaggcagctctcgcagccaccttggaggaatataaagctaccgtggcttcagaccagatagagatgaacagactcaaggctcagcttgaaaacgaaaaacaaaaggtcgctgaactgtactctatccacaattctggcgataagagtgacatacaagacttgctggagtcagtccggctcgataaagaaaaagccgaaacactggcatctagcctgcaggaggacttagcacacacccgcaacgacgccaacaggctacaagatgctatcgccaaagtggaagacgaatacagggcatttcaagaggaagctaaaaaacaaatcgaagatcttaatatgacactcgagaagttacggtcagaccttgacgagaaggagacggaaaggtcagatatgaaggaaaccatcttcgaactcgaagacgaggtggagcagcaccgggcagtgaaactccatgacaacctgattatatcggacctggaaaacacagtcaagaagctgcaggaccagaagcacgatatggagcgggagataaagactctgcataggcgcctgagggaagagtccgccgagtggcgtcagttccaggccgacctgcagaccgctgtggtgattgccaacgatattaagagcgaggcacaagaggaaatcggcgacctcaaacggcgattgcacgaggcccaggagaagaacgaaaaactcaccaaagaattggaagagatcaagtcaaggaaacaagaggaagaaagagggagggtgtataattatatgaatgcagtagagcgagatttagcagctttacgacaggggatggggttgtctcgcagatcttcgaccagcagcgagcccacaccaaccgtgaaaactctcattaaatcatttgattcagcgtctcaggtgccaaacccagccgcagctgcgatccctcggaccccactgtccccgagtcccatgaagactccaccagctgccgctgtcagtcctatgcagagacattcaataagtggcccaattagcacttcaaagcccctgacggcactcagcgacaagcggcctaattacggcgagattcctgtccaggagcaccttctacgtacaagctcagcgtcacgacctgcatcccttcctcgagtaccagcgatggagagcgcgaaaacacttagcgtcagtaggcgttcctctgaggaagtaaaaagggacatctctgcccaagagggggcttcgcccgcttcccttatggccatgggcactacctcaccacaattaagtttatcttcttcccctacagcttccgtaacgccgactacccggtctagaatccgagaggagagaaaggatccgttgtctgcgctagctagagaatacggcggttcgaaacgcaatgctctcttgaaatggtgccagaagaagactgagggctaccagaatatcgatatcacaaatttttcatcttcgtggaatgatgggctggcgttctgtgctctcctccatacatatctgcccgcacacattccttatcaggaactaaattcacaggacaagaggaggaattttatgttagcatttcaagccgcagaatccgtgggaattaagagcactctggatattaatgaaatggtgcgcaccgagcgccctgactggcaaaatgtcatgctgtacgtaactgctatctataaatacttcgagacttag

SEQ ID NO: 58444 - DNA, 3354 bp, Artificial Sequence
  derived and/or modified sequence
atgaaaaaagccagccggagcgtcggtagcgtgccaaaggtgtccgcaatttccaaaactcagacagcagagaaaatcaaacccgaaaactcaagttccgcttcgacaggtgggaaactagtgaagccaggcactgctgcatccctgtccaagactaaatcttctgatgacctgcttgctgggatggctgggggagttactgttaccaacggcgtgaagggtaaaaaatcgacatgtccctccgccgctccctctgcgtctgcacccgcaatgacaacagtcgaaaacaagtctaaaattagcaccggcaccgcttcatccacgaagagatctaccagcactggcaacaaggagtcatcatccacacgcgaaagactgagggaacgcacccggttgaatcaaagtaagaaactgccatccgccggacagggcgcaaacgacatggccctcgcaaagcgcagtcggtctcgtacagcaacggagtgcgacgttcggatgtcaaagagcaaatccgataaccagatttctgacagggcggcattagaggcaaaggtaaaagatctgcttacactcgctaaaacgaaagacgtggagatcttgcacctgaggaacgagttaagggatatgcgggcacagctagggatcaacgaagatcactcggaaggagatgagaaatccgaaaaggaaactataatggctcatcagcccacggatgtggagagtacactcctgcagctccaggagcagaatacggcaatccgggaggaattgaatcagctgaagaacgaaaacaggatgctgaaggaccgactgaacgcattaggcttttctctcgagcagcgattagacaatagcgagaaactcttcggctaccagtctttgagccctgagatcacccccgacaatcaaagcgatggaggcggaaccctgacctccagtgtggaaggcagcgcacctgggtccgttgaagaccttctctcccaggacgaaaacaccttaatggaccatcagcactccaattctatggataacttggactctgaatgctctgaggtgtaccagcctctaacctcctccgacgatgctttggatgccccaagctcaagtgagagtgagggtatcccttccatcgaacggagtcgaaagggctctagcggcaatgctagtgaggtttcagtagcatgccttacagagcgaatccaccaaatggaagagaatcagcactccacgagcgaggagctgcaggcaaccctgcaggagctcgccgaccttcagcagatcacacaggaactgaattccgaaaacgaacgcctgggtgaggaaaaggtgattctgatggaaagcctgtgccagcaatcagacaaactggaacatttcagtcggcaaattgagtacttcaggtcactactagatgaacaccacatatcttatgtgatagatgaggacgtgaagtctggcagatatatggagctcgagcagaggtatatggacctcgctgaaaacgccaggttcgagagggagcaacttctgggcgtgcagcaacacctgtcgaacacacttaagatggctgagcaggataacaaagaagcccaagaaatgatcggcgctctgaaagaacgttcacatcatatggaaagaataatcgaatccgagcagaaggggaaggccgctttggcggctactcttgaggaatataaggcgaccgtggcctctgaccagattgaaatgaatcgcctcaaggcgcagttggagaatgagaaacagaaagtggccgagctgtactcaattcataatagcggggataagtctgatattcaggaccttctggagtcggtccggctcgacaaagagaaagcagaaactctcgcgagcagcttgcaggaagatcttgcgcatacccggaatgatgcaaaccgattgcaagacgcaattgccaaggttgaagacgagtatcgcgctttccaagaagaggccaagaagcagatcgaagacctcaatatgacacttgagaaactgcgaagcgacctagacgaaaaggagacagagagaagcgacatgaaagaaacgattttcgagcttgaggatgaggtagagcagcacagagcagtgaagctccatgacaacctgatcataagtgacctggagaacacggtcaagaagctgcaggaccaaaaacatgacatggaacgggagataaagaccctccaccgacggctgagagaagagtccgctgaatggaggcaatttcaagctgacctgcaaacggcagtcgtgatcgccaatgacatcaagtctgaagctcaggaagaaatcggggatctcaagaggcgcctccatgaagcacaggagaaaaacgaaaaactgactaaggaactggaagagattaaatcacgtaagcaggaggaggaacggggacgggtctataattacatgaatgcagtcgaacgcgacctcgccgcactgcgtcagggaatgggactttctagaaggagcagtacgagctcggagcccacccctaccgtaaagaccctcattaagtccttcgattcagccagccaggtccccaacccggcagcagctgccatccctaggacaccactgtcaccttcccccatgaaaactccaccagcggcagccgtcagtcctatgcagcgacacagcatcagcggccctatatcaacttctaaaccgctgacggccctatcagacaagcgccctaactatggcgagatacccgtccaggagcaccttctcagaacatcatccgcttctagaccagcctccctgcccagagtcccggctatggaatctgctaaaactctctcagtgtcacgcagaagtagtgaggaggtgaaacgcgacatatctgcacaggaaggtgcttcacctgccagcctcatggcaatggggacaaccagtccccagttatcattgtcaagttcccctacagcgagcgtcacgccaaccacaaggtcccgtatcagagaggaacgaaaggatcctctgagtgctttggccagggagtatggcggttcaaagcgaaatgctctgttaaagtggtgtcaaaagaagactgaaggctatcagaatatagatatcacgaatttctcttctagttggaatgatggccttgccttttgcgctctcctccatacctatctgccggcacatattccttatcaagagctcaatagccaggataagcggaggaatttcatgctggcctttcaggcagctgagtccgtggggatcaaaagtaccttggacattaacgaaatggtccggacagaacggccagactggcaaaacgtaatgctttatgtaaccgctatatacaagtactttgaaacttag

SEQ ID NO: 58445 - DNA, 6269 bp, Artificial Sequence
  derived and/or modified sequence
ggaggccgggcggcccggcaagcggcgctgcggggtaggctgctttcctgaggccggactcaacgggtctcggctgagccaccgggtgagctcaccgcccagcccaaaccaggagattgcgagggagcgatgcggtgcagcgcgtgttcttggggaagatcccgactaagccattttccagtggcacctcttccatcatgagttcctgaggcagtccgatggggctactttattccagaacaatcacaatttgcttgtaaatgcatcacgaagaggcagcccagaatgaagaaagcaagcaggagtgttggctcagtgcctaaagtgtctgcaataagtaaaacgcaaacagcagaaaaaattaaacctgaaaacagctcttcagcatctacgggaggcaaacttgtaaaacctggaacagcagcatcattgtcaaagaccaagagcagtgatgaccttttagctggaatggccggaggggtaacggtgactaatggtgttaaaggaaagaaaagcacctgcccatctgcagcaccttcagcatctgcccctgccatgaccaccgtggagaacaaatccaagattagcacaggcacagcttcttcaaccaagcggagcacttctacaggtaataaagaatccagttctactagagaaagattacgtgaacgtacccgattaaaccagagcaaaaaactaccttctgcaggtcagggagctaatgacatggcattggccaaacgttcccgcagtcgaactgctacagaatgtgacgttcgtatgagcaagtctaagtcagacaatcagatcagtgacagagctgctttggaggccaaagtgaaggatcttctcacgctggcaaaaaccaaagacgtagaaattttacatttgagaaatgaactgcgagacatgcgtgcccagctgggcattaatgaggatcattctgagggtgatgaaaaatctgagaaggaaactattatggctcaccagccgactgatgtggagtccactttattgcagttgcaggaacagaatactgccatccgtgaagaactcaaccagctgaaaaatgaaaacagaatgttaaaggacaggttgaatgcattgggcttttccctagagcagaggttagacaattctgaaaaactgtttggctatcagtccctgagcccagaaatcacccctgataaccagagcgatggaggaggaactctgacttcttcagtggaaggctctgcccctggctcagtggaggatctcttgagtcaggatgaaaatacactaatggaccatcagcacagtaactccatggacaatttagacagtgagtgcagtgaggtctaccagcccctcacatcgagcgatgatgcgctggatgcaccatcctcctcagagtcggaaggcatccccagcatagagcgctcccggaaggggagcagcgggaatgccagtgaagtgtccgtggcttgcctgactgaacggatacaccagatggaagagaaccaacacagtacaagtgaggaactccaggcaaccctgcaagagctagctgatttacagcagattacccaggaactgaatagtgaaaacgaaaggcttggagaagagaaggttattctgatggagtctttatgtcagcagagcgataagttggaacactttagtcgacagattgaatacttccgctctcttctagatgagcatcacatttcttatgtcatagatgaagatgtaaaaagtgggcgctatatggaattagagcaacgttacatggacctcgctgagaatgcccgttttgaacgggagcagcttcttggtgtccagcagcatttaagcaatactttgaaaatggcagaacaagacaataaggaagctcaagaaatgataggggcactcaaagaacgcagtcaccatatggagcgaattattgagtctgagcagaaaggaaaagcagccttggcagccacgttagaggaatacaaagccacagtggccagtgaccagatagagatgaatcgcctgaaggctcagctggagaatgaaaagcagaaagtggcagagctgtattctatccataactctggagacaaatctgatattcaggacctcctggagagtgtcaggctggacaaagaaaaagcagagactttggctagtagcttgcaggaagatctggctcatacccgaaatgatgccaatcgattacaggatgccattgctaaggtagaggatgaataccgagccttccaagaagaagctaagaaacaaattgaagatttgaatatgacgttagaaaaattaagatcagacctggatgaaaaagaaacagaaaggagtgacatgaaagaaaccatctttgaacttgaagatgaagtagaacaacatcgtgctgtgaaacttcatgacaacctcattatttctgatctagagaatacagttaaaaaactccaggaccaaaagcacgacatggaaagagaaataaagacactccacagaagacttcgggaagaatctgcggaatggcggcagtttcaggctgatctccagactgcagtagtcattgcaaatgacattaaatctgaagcccaagaggagattggtgatctaaagcgccggttacatgaggctcaagaaaaaaatgagaaactcacaaaagaattggaggaaataaagtcacgcaagcaagaggaggagcgaggccgggtatacaattacatgaatgccgttgagagagatttggcagccttaaggcagggaatgggactgagtagaaggtcctcgacttcctcagagccaactcctacagtaaaaaccctcatcaagtcctttgacagtgcatctcaagtaccaaaccctgctgcagctgcaattcctcgaacgcccctgagcccaagtcctatgaaaacccctcctgcagcagctgtgtcccctatgcagagacattccataagtggaccaatctcaacatccaaacccctgacagccctgtcagataagagaccaaactatggggaaatccctgttcaagagcatctgttaagaacatcttcagccagccggcctgcttccctgccaagagtgcctgcgatggaaagtgccaagaccctctcagtgtctcgacgaagtagtgaagaagtgaaacgggacatttctgcacaggagggagcgtcgccagcctctctgatggctatgggaaccacgtctccacagctttccctgtcctcttctccaacggcatctgtgactcccaccacccgaagccgaataagagaagaaaggaaagaccctctctcagcattggccagagaatatggaggatcaaagaggaacgccttgctgaagtggtgtcagaagaaaacagaaggctatcagaatattgacattacaaacttcagcagcagctggaatgatgggctggccttctgtgccctcctgcatacatatctccctgcccacattccatatcaagaactgaacagccaggataagagaaggaacttcatgctggctttccaggcagctgaaagtgtcggcatcaaatccacactggacattaatgaaatggtacggactgaacgacccgactggcagaacgtgatgctgtatgtgacggcgatctacaagtactttgagacctgagcatgccgggaggagccgccccaatagcgggggtacccctccacagcgaccgagcgacaccgacgccattagctacgcacccctgtaaagcttccagcaactctgggctgccccacagcgtgtgagcctccagctcggggcttccgtattggaagaactcagccgtgtggcccacagctcccaccagggcccctcccacatgacccgtccattcaggtcatgtgggctcagcacacatcctgcaggccggtggctgctggagttttccttctgaagagaatattgaactacactagtgctccagggcaccaaacaaaaagggctcatgcacagctgaatttgggaaaagggattcagttctgtgggaaactcactagggttgatgaaggctcggccgcggcacttcctgactattggctggggtgggttccggtgctggtgagaacccagaaggagagtcagcgcctggcagttcccagcgccctgggcccttcaccgtcctagtttggaggagcatgttcaccacagacgtgggtcagctgccccacacctgacggggctgtcccggccgacacaatccaggcgtgttcagcctgagctaggagagtatctagagggcgtggtgcgggcacgccagggctggggtgctgctgctgcactcacgcggctgggctttctggcgggaagcagttacgggggccccttgcctggactcagcgacctgtcttccagcctggaaggggtttggagtcccagctctggctttagatttcttcatcataaggagtttttctagttaacatttttgttttgttacgagcaatgctggaaaaggtcgctcctgttctgttagtaccaaagttacattgtttcaataagcatagaaatctaaacaacatctgtacattagcatggtgagagcaaggaataaagcaggaaataggagaaaagtaaacaactttagggagcccaggcagtgtcatttaaactcactgagtcactaagacataattctcctaggccagagttaaagaaagtgccttaactcttcttgtgagggcagccactgccctccgtggccaaggcaggacctccaagactcagtggttgagttgtctcctaccaccatgcccgccctccccaggtactgggtccatgccccctgtgcccaccctccccaggtgctgggtccatgctgtttgaaccaaagccttatttaaaggtggtcactggagatgctctcaggccagaactcaacagctatttttgggaatagggatctcccgtgtgcctaacgcagtagctattggtttgaacaatgtccagacaagacctgtacctttgagaatataactgtgtttggcacctgcatagcaccatgaggaagaccagccaccagtggaagcggggtcactgccccacagactggatgcaatgaggggctcacaggaggcccagccagcccgattgtgggctgaggggtctgcattcaagcacgatgttctagaataggagtttaacgtgtctacgtaacctagaatgtggttattaggaaaggggctgtgcatgtgggtgcagctggcggcacacctggtcaccagatggccagaagctgcccatcagccctgcccagatgtcagcctgggagctcaggctgctgccgctggctggatgccctttggtgaaatgcctgttttcagctaagaaaggagaggccaggcaagcaaagtcatgccacaaagcatatcagagacccccgcagactcctggccccgtcccgccccctgtctgagttgtgtttttgttgctgttcctctgttgatggccagctctgctgttggcatgagccactgatgttcatgtgagaattactgtttttaagtgtctctccacttaggtgtcctcagttcccacttttgctctcatttgccttcacagaggccactccacctgtccggatccagctgtctggtcatggtttggtttatttattttgtccttcaggggctgttttgccctaagaatgagggggcttcccctggtctgcagttcccaactttatcccttgctggccatgcgagcccagccctggtgcctcatgggatgggggggtaggggtccccaggatcttctggaggaaggtggccatggatggatgggctgtatctgtgttttccctctgggagtctcatgggtccagcatcaggcctgaggtcagcaacagggaaagagggtgggcacggggagggcttggccccgcctatctagaggcttgcctcgggcccctccttggggaaggtttgcgtgcagagctgcaagggagagggttccagaagcattgccttttgcctcgtctaataggatccttaggacactgtgggctttaggaatgactatagatgctcacacgtgtttaaagtgacatttggagatgctctcagtcctgtggcatctggcacgaagtctccaagaagccactttgcctcttctcccttcaagcacaagctttactgcaaaagggccagtcgcgtttctatttctctcgatcccaggcttctgcggaccgacgatacgtttaaatgttgttctagtaaatattcttgaatgtattaaaatggctgaaacaacaa

SEQ ID NO: 58446 - DNA, 6673 bp, Artificial Sequence
  derived and/or modified sequence
ggccaagggcggggcccgcgagggaggccgggcggcccggcaagcggcgctgcggggtaggctgctttcctgaggccggactcaacgggtctcggctgagccaccgggtgagctcaccgcccagcccaaaccaggagattgcgagggagcgatgcggtgcagcgcgatttgcttgtaaatgcatcacgaagaggcagcccagaatgaagaaagcaagcaggagtgttggctcagtgcctaaagtgtctgcaataagtaaaacgcaaacagcagaaaaaattaaacctgaaaacagctcttcagcatctacgggaggcaaacttgtaaaacctggaacagcagcatcattgtcaaagaccaagagcagtgatgaccttttagctggaatggccggaggggtaacggtgactaatggtgttaaaggaaagaaaagcacctgcccatctgcagcaccttcagcatctgcccctgccatgaccaccgtggagaacaaatccaagattagcacaggcacagcttcttcaaccaagcggagcacttctacaggtaataaagaatccagttctactagagaaagattacgtgaacgtacccgattaaaccagagcaaaaaactaccttctgcaggtcagggagctaatgacatggcattggccaaacgttcccgcagtcgaactgctacagaatgtgacgttcgtatgagcaagtctaagtcagacaatcagatcagtgacagagctgctttggaggccaaagtgaaggatcttctcacgctggcaaaaaccaaagacgtagaaattttacatttgagaaatgaactgcgagacatgcgtgcccagctgggcattaatgaggatcattctgagggtgatgaaaaatctgagaaggaaactattatggctcaccagccgactgatgtggagtccactttattgcagttgcaggaacagaatactgccatccgtgaagaactcaaccagctgaaaaatgaaaacagaatgttaaaggacaggttgaatgcattgggcttttccctagagcagaggttagacaattctgaaaaactgtttggctatcagtccctgagcccagaaatcacccctgataaccagagcgatggaggaggaactctgacttcttcagtggaaggctctgcccctggctcagtggaggatctcttgagtcaggatgaaaatacactaatggaccatcagcacagtaactccatggacaatttagacagtgagtgcagtgaggtctaccagcccctcacatcgagcgatgatgcgctggatgcaccatcctcctcagagtcggaaggcatccccagcatagagcgctcccggaaggggagcagcgggaatgccagtgaagtgtccgtggcttgcctgactgaacggatacaccagatggaagagaaccaacacagtacaagtgaggaactccaggcaaccctgcaagagctagctgatttacagcagattacccaggaactgaatagtgaaaacgaaaggcttggagaagagaaggttattctgatggagtctttatgtcagcagagcgataagttggaacactttagtcgacagattgaatacttccgctctcttctagatgagcatcacatttcttatgtcatagatgaagatgtaaaaagtgggcgctatatggaattagagcaacgttacatggacctcgctgagaatgcccgttttgaacgggagcagcttcttggtgtccagcagcatttaagcaatactttgaaaatggcagaacaagacaataaggaagctcaagaaatgataggggcactcaaagaacgcagtcaccatatggagcgaattattgagtctgagcagaaaggaaaagcagccttggcagccacgttagaggaatacaaagccacagtggccagtgaccagatagagatgaatcgcctgaaggctcagctggagaatgaaaagcagaaagtggcagagctgtattctatccataactctggagacaaatctgatattcaggacctcctggagagtgtcaggctggacaaagaaaaagcagagactttggctagtagcttgcaggaagatctggctcatacccgaaatgatgccaatcgattacaggatgccattgctaaggtagaggatgaataccgagccttccaagaagaagctaagaaacaaattgaagatttgaatatgacgttagaaaaattaagatcagacctggatgaaaaagaaacagaaaggagtgacatgaaagaaaccatctttgaacttgaagatgaagtagaacaacatcgtgctgtgaaacttcatgacaacctcattatttctgatctagagaatacagttaaaaaactccaggaccaaaagcacgacatggaaagagaaataaagacactccacagaagacttcgggaagaatctgcggaatggcggcagtttcaggctgatctccagactgcagtagtcattgcaaatgacattaaatctgaagcccaagaggagattggtgatctaaagcgccggttacatgaggctcaagaaaaaaatgagaaactcacaaaagaattggaggaaataaagtcacgcaagcaagaggaggagcgaggccgggtatacaattacatgaatgccgttgagagagatttggcagccttaaggcagggaatgggactgagtagaaggtcctcgacttcctcagagccaactcctacagtaaaaaccctcatcaagtcctttgacagtgcatctcaagtaccaaaccctgctgcagctgcaattcctcgaacgcccctgagcccaagtcctatgaaaacccctcctgcagcagctgtgtcccctatgcagagacattccataagtggaccaatctcaacatccaaacccctgacagccctgtcagataagagaccaaactatggggaaatccctgttcaagagcatctgttaagaacatcttcagccagccggcctgcttccctgccaagagtgcctgcgatggaaagtgccaagaccctctcagtgtctcgacgaagtagtgaagaagtgaaacgggacatttctgcacaggagggagcgtcgccagcctctctgatggctatgggaaccacgtctccacagctttccctgtcctcttctccaacggcatctgtgactcccaccacccgaagccgaataagagaagaaaggaaagaccctctctcagcattggccagagaatatggaggatcaaagaggaacgccttgctgaagtggtgtcagaagaaaacagaaggctatcagaatattgacattacaaacttcagcagcagctggaatgatgggctggccttctgtgccctcctgcatacatatctccctgcccacattccatatcaagaactgaacagccaggataagagaaggaacttcatgctggctttccaggcagctgaaagtgtcggcatcaaatccacactggacattaatgaaatggtacggactgaacgacccgactggcagaacgtgatgctgtatgtgacggcgatctacaagtactttgagacctgagcatgccgggaggagccgccccaatagcgggggtacccctccacagcgaccgagcgacaccgacgccattagctacgcacccctgtaaagcttccagcaactctgggctgccccacagcgtgtgagcctccagctcggggcttccgtattggaagaactcagccgtgtggcccacagctcccaccagggcccctcccacatgacccgtccattcaggtcatgtgggctcagcacacatcctgcaggccggtggctgctggagttttccttctgaagagaatattgaactacactagtgctccagggcaccaaacaaaaagggctcatgcacagctgaatttgggaaaagggattcagttctgtgggaaactcactagggttgatgaaggctcggccgcggcacttcctgactattggctggggtgggttccggtgctggtgagaacccagaaggagagtcagcgcctggcagttcccagcgccctgggcccttcaccgtcctagtttggaggagcatgttcaccacagacgtgggtcagctgccccacacctgacggggctgtcccggccgacacaatccaggcgtgttcagcctgagctaggagagtatctagagggcgtggtgcgggcacgccagggctggggtgctgctgctgcactcacgcggctgggctttctggcgggaagcagttacgggggccccttgcctggactcagcgacctgtcttccagcctggaaggggtttggagtcccagctctggctttagatttcttcatcataaggagtttttctagttaacatttttgttttgttacgagcaatgctggaaaaggtcgctcctgttctgttagtaccaaagttacattgtttcaataagcatagaaatctaaacaacatctgtacattagcatggtgagagcaaggaataaagcaggaaataggagaaaagtaaacaactttagggagcccaggcagtgtcatttaaactcactgagtcactaagacataattctcctaggccagagttaaagaaagtgccttaactcttcttgtgagggcagccactgccctccgtggccaaggcaggacctccaagactcagtggttgagttgtctcctaccaccatgcccgccctccccaggtactgggtccatgccccctgtgcccaccctccccaggtgctgggtccatgctgtttgaaccaaagccttatttaaaggtggtcactggagatgctctcaggccagaactcaacagctatttttgggaatagggatctcccgtgtgcctaacgcagtagctattggtttgaacaatgtccagacaagacctgtacctttgagaatataactgtgtttggcacctgcatagcaccatgaggaagaccagccaccagtggaagcggggtcactgccccacagactggatgcaatgaggggctcacaggaggcccagccagcccgattgtgggctgaggggtctgcattcaagcacgatgttctagaataggagtttaacgtgtctacgtaacctagaatgtggttattaggaaaggggctgtgcatgtgggtgcagctggcggcacacctggtcaccagatggccagaagctgcccatcagccctgcccagatgtcagcctgggagctcaggctgctgccgctggctggatgccctttggtgaaatgcctgttttcagctaagaaaggagaggccaggcaagcaaagtcatgccacaaagcatatcagagacccccgcagactcctggccccgtcccgccccctgtctgagttgtgtttttgttgctgttcctctgttgatggccagctctgctgttggcatgagccactgatgttcatgtgagaattactgtttttaagtgtctctccacttaggtgtcctcagttcccacttttgctctcatttgccttcacagaggccactccacctgtccggatccagctgtctggtcatggtttggtttatttattttgtccttcaggggctgttttgccctaagaatgagggggcttcccctggtctgcagttcccaactttatcccttgctggccatgcgagcccagccctggtgcctcatgggatgggggggtaggggtccccaggatcttctggaggaaggtggccatggatggatgggctgtatctgtgttttccctctgggagtctcatgggtccagcatcaggcctgaggtcagcaacagggaaagagggtgggcacggggagggcttggccccgcctatctagaggcttgcctcgggcccctccttggggaaggtttgcgtgcagagctgcaagggagagggttccagaagcattgccttttgcctcgtctaataggatccttaggacactgtgggctttaggaatgactatagatgctcacacgtgtttaaagtgacatttggagatgctctcagtcctgtggcatctggcacgaagtctccaagaagccactttgcctcttctcccttcaagcacaagctttactgcaaaagggccagtcgcgtttctatttctctcgatcccaggcttctgcggaccgacgatacgtttaaatgttgttctagtaaatattcttgaatgtattaaaatggctgaaacaacaagcttgggcttttctagcttgccctccactccctgccgtccctctgacgtcgcataaaccagaacccagctccctcctgggactggctgtggagagaagggcacctctgagccagcctgtggccctaccccaaggcgcacttcctcatgtgggcagatcctgaccaggagtccagggtggcctcccctgggccacagcacatcaccgtgtggcctggggctgtgggacagtgagccctgtaaccactagggttctgtgacagatgccaagaccccagagaccgtggcagagctacccccaggagagcggaagcccctacacagcccagacacatgccttccctgggggctggggagtgtgtctcgaggggttttgtttgttttgaggcatgtatcatcttggaaataattgtcaggatgtataaaatagagaaaaagaaaaaaggtatcctacccagaggcaaccagataaacttttttgcctgtgc

SEQ ID NO: 58447 - protein, 1114 aa, Artificial Sequence
  derived and/or modified sequence
MNNEITYYFPCQRWLAVEEDDGQLSRELLPVDESYVLPQSEEGRGGGDNNPLDNLALEQKDKSTTFSVTIKTGVKKNAGTDANVFITLFGTQDDTGMTLLKSSKTNSDKFERDSIEIFTVETLDLGDLWKVRLGHDNTGKAPGWFVDWVEVDAPSLGKCMTFPCGRWLAKNEDDGSIIRDLFHAELQTRLYTPFVPYEITLYTSDVFAAGTDANIFIIIYGCDAVCTQQKYLCTNKREQKQFFERKSASRFIVELEDVGEIIEKIRIGHNNTGMNPGWHCSHVDIRRLLPDKDGAETLTFPCDRWLATSEDDKKTIRELVPYDIFTEKYMKDGSLRQVYKEVEEPLDIVLYSVQIFTGNIPGAGTDAKVYITIYGDLGDTGERYLGKSENRTNKFERGTADTFIIEAADLGVIYKIKLRHDNSKWCADWYVEKVEIWNDTNEDEFLFLCGRWLSLKKEDGRLERLFYEKEYTGDRSSNCSSPADFWEIALSSKMADVDISTVTGPMADYVQEGPIIPYYVSVTTGKHKDAATDSRAFIFLIGEDDERSKRIWLDYPRGKRGFSRGSVEEFYVAGLDVGIIKKIELGHDGASPESCWLVEELCLAVPTQGTKYMLNCNCWLAKDRGDGITSRVFDLLDAMVVNIGVKVLYEMTVWTGDVVGGGTDSNIFMTLYGINGSTEEMQLDKKKARFEREQNDTFIMEILDIAPFTKMRIRIDGLGSRPEWFLERILLKNMNTGDLTMFYYGDWLSQRKGKKTLVCEMCAVIDEEEMMEWTSYTVAVKTSDILGAGTDANVFIIIFGENGDSGTLALKQSANWNKFERNNTDTFNFPDMLSLGHLCKLRVWHDNKGIFPGWHLSYVDVKDNSRDETFHFQCDCWLSKSEGDGQTVRDFACANNKICDELEETTYEIVIETGNGGETRENVWLILEGRKNRSKEFLMENSSRQRAFRKGTTDTFEFDSIYLGDIASLCVGHLAREDRFIPKRELAWHVKTITITEMEYGNVYFFNCDCLIPLKRKRKYFKVFEVTKTTESFASKVQSLVPVKYEVIVTTGYEPGAGTDANVFVTIFGANGDTGKRELKQKMRNLFERGSTDRFFLETLELVVTRLGLAAECG

SEQ ID NO: 58448 - DNA, 921 bp, Artificial Sequence
  derived and/or modified sequence
atgaggttgggcactaattgtgaacatcctcagctgccactggcagcgcccagcggctattattttccatgtcaaaggtggctggcggtggaagaagatgatggtcagctctccagggagctgctgcctgtggacgagtcctatgtcttaccccaatctgaagaggggagaggcggcggagacaacaatccccttgataaccttgccctcgaacaaaaagacaagtctacaacgttttccgtgacaatcaagaccggggtgaagaaaaacgcagggaccgacgccaacgtgttcattaccctgttcggaacacaggatgacacgggcatgacgctgctgaaatcttccaaaaccaactcagacaagtttgaaagagactccatcgaaatttttacggtggagaccctggacctgggcgatctgtggaaggtgcggttgggacatgacaacacaggaaaagccccgggctggtttgttgactgggttgaggtcgatgccccctctctgggtaagtgtatgacgttcccttgcggccgctggctcgctaagaatgaagacgatgggtccattattcgagatctcttccatgccgagctgcagacacgactatatacaccttttgtgccctacgaaatcaccttatatacttccgacgtgttcgcagccggcacagacgctaatattttcatcattatttacggctgtgatgctgtatgcacgcagcagaaatacctttgtaccaataaaagagagcagaaacaattttttgaaagaaagtcagccagccgtttcattgtggagctcgaggatgtgggggagataatcgaaaagatccgcatcggtcacaacaacactgggatgaacccagggtggcactgcagccacgttgatatacgacgcttgctgccagataaggattag

SEQ ID NO: 58449 - DNA, 3345 bp, Artificial Sequence
  derived and/or modified sequence
atgaacaacgaaatcacctattacttcccatgccagcggtggcttgccgtcgaggaagacgatgggcagttgagtagggaactcctccctgtcgacgaaagctacgtactccctcagtctgaagagggacgaggaggtggtgacaacaatcctctggacaacctggcacttgagcagaaggataagtccaccactttttccgtgaccatcaaaaccggagtaaagaagaacgctggaacagatgccaacgtgtttatcacacttttcgggactcaggatgataccggaatgacactgttgaagtcctcaaagaccaacagcgacaagttcgagcgcgatagtattgagatttttacggtcgaaacactagacttgggcgacctgtggaaggtcagactggggcacgataacaccggcaaagcccccgggtggtttgtagactgggtagaagtcgacgctccatccttgggcaagtgcatgacatttccatgcggacgctggctggctaaaaatgaggacgatgggtccatcatcagagacctgtttcacgcagaattacagactagattatacacacccttcgtgccttacgaaatcacactctatacgtcggatgtctttgccgcaggcacagacgccaatattttcattattatctacggttgtgatgccgtatgtacccagcagaagtatctttgcacaaacaagcgagagcagaaacagttctttgaacggaaatccgccagtcggtttatagtagaactggaggacgtcggggagattatcgagaagatccgaatcggacacaacaataccggcatgaatcccggatggcactgttctcatgttgacattagaaggctccttcccgacaaagacggtgcggagaccttgacattcccctgcgatcgttggctggccacgagtgaggatgacaaaaaaactatacgagaactggtcccctatgacatctttacagagaagtatatgaaagatggatccctaaggcaggtatacaaagaggtcgaggaacccctcgacatcgtcctttacagcgttcagatttttacaggaaacatacccggcgctgggactgatgccaaggtttacatcacaatatatggggatctgggagacacaggcgaaagatatttggggaaaagtgaaaaccgaaccaataagtttgagagaggcacagccgacacattcataattgaggccgctgatctgggagtaatatataaaattaagttacggcatgataactcaaaatggtgcgcggactggtacgttgaaaaagtggagatatggaacgataccaacgaagatgagtttctatttctttgtggcagatggctgtcgctaaagaaggaggatggccgcctggaaaggctcttttacgagaaggaatatacaggcgaccgctccagcaactgttcatcacccgccgatttctgggaaatcgccctctccagcaaaatggcggacgtggacatcagtaccgtgactggccccatggctgattacgtgcaagaaggaccaatcattccctattacgtctccgtgaccacgggaaaacacaaggacgccgcaacagattctagggcctttatctttttgatcggagaggatgacgaacgttccaaaaggatctggctggactatccacgcggaaagagggggttcagccgaggctctgttgaggagttttatgtggccggtcttgatgtgggcatcatcaaaaagatcgaattaggccatgacggcgcatctccggaatcgtgttggcttgtggaggagctgtgcctggctgtgccaacacagggcactaagtacatgctcaactgtaactgctggttagctaaagaccggggtgatggcattacctcacgagtgtttgatctgctagacgccatggtagtcaacatcggagtcaaggtgctgtatgaaatgacggtgtggaccggcgatgtcgtcggtggtgggaccgattcaaatattttcatgacattatacggcataaacggtagtacggaggaaatgcagctcgataaaaaaaaggcaagatttgaacgcgaacagaacgacaccttcataatggagatcctggatatcgctccttttaccaagatgagaattagaatagacggcctcggaagccggcccgagtggttcctggagagaatcctccttaagaacatgaatacaggagatctaacaatgttttactatggagattggctgtctcagaggaagggaaagaagaccttggtatgcgagatgtgtgccgtcatcgacgaggaagaaatgatggaatggacctcttataccgtggccgtcaaaaccagcgacatactcggtgccggcacagatgccaatgtcttcattattattttcggcgagaatggggattcagggactctagccctgaagcagtccgctaattggaataaatttgaacgcaataatacagacactttcaattttccggatatgttgtctctcggacatctctgtaagttgagagtgtggcatgataacaagggcatttttcccggatggcacctttcatatgtcgacgtcaaagacaacagccgtgacgagacgttccattttcagtgcgactgctggctctccaagtcagaaggcgacggccaaaccgtgagggacttcgcttgtgcgaacaacaagatatgtgatgagctggaggaaaccacatacgagatcgtgatcgagactgggaatggcggggagacgagagaaaatgtgtggttaatactagaaggtcgcaagaaccgctcaaaagagtttttaatggagaatagctcgcgccagagagccttccgtaaggggacgacagatacctttgaatttgattctatctaccttggggacatcgcgtcactctgtgttggccacctcgccagggaagaccgatttatacccaagagagaactggcttggcacgttaagaccattacaataaccgagatggagtatggaaacgtgtacttttttaattgtgactgtcttattccccttaagcgcaaaaggaagtacttcaaggtgtttgaagtgactaaaacaacagagagtttcgcaagtaaggtgcagagcttagtgccggtgaaatatgaggtaattgtgaccacaggctacgaaccaggagccggaacagatgctaacgtgttcgtcacgatttttggtgctaatggagacaccgggaaacgtgaactgaaacagaagatgcgcaacttgtttgaacggggtagtaccgatcgcttctttctggaaacgctcgaattggtagttacccggcttggactcgctgctgagtgcggctag

SEQ ID NO: 58450 - DNA, 921 bp, Artificial Sequence
  derived and/or modified sequence
atgaggctgggcaccaactgtgagcacccccagctgcccctggccgcccccagcggctactacttcccctgccagcgctggctggccgtggaggaggatgatggccagctgagccgggagctgctgcctgtggatgagagctatgtgctgccccagagcgaggagggccggggcggcggggacaacaaccccctggacaacctggccctggagcagaaggacaagagcaccaccttctctgtgaccatcaagacaggagtgaagaagaatgccggcacagatgccaacgtgttcatcaccctgtttggcacccaggatgacaccggcatgaccctgctgaagagcagcaagaccaacagcgacaagtttgagcgggacagcattgagatcttcaccgtggagaccctggacctgggggacctgtggaaggtgcggctgggccatgacaacacaggcaaggcccctggctggtttgtggactgggtggaggtggatgcccccagcctgggcaagtgcatgaccttcccctgtggccgctggctggccaagaatgaagatgatggcagcatcatccgggacctcttccacgccgagctgcagacccggctgtacaccccatttgtgccctatgagatcaccctgtacaccagtgatgtgtttgctgctggaacagatgccaacatcttcatcatcatctacggctgtgatgctgtgtgcacccagcagaagtacctgtgcaccaacaagcgggagcagaagcagttctttgagaggaagagcgccagccgcttcatcgtggagctggaggatgtgggggagatcatcgagaagatccgcatcggccacaacaacacaggcatgaaccctggctggcactgcagccacgtggacatccggcggctgctgcctgacaaggactag

SEQ ID NO: 58451 - DNA, 3345 bp, Artificial Sequence
  derived and/or modified sequence
atgaacaatgagatcacctactacttcccctgccagcgctggctggccgtggaggaggatgatggccagctgagccgggagctgctgcctgtggatgagagctatgtgctgccccagagcgaggagggccggggcggcggggacaacaaccccctggacaacctggccctggagcagaaggacaagagcaccaccttctctgtgaccatcaagacaggagtgaagaagaatgccggcacagatgccaacgtgttcatcaccctgtttggcacccaggatgacaccggcatgaccctgctgaagagcagcaagaccaacagcgacaagtttgagcgggacagcattgagatcttcaccgtggagaccctggacctgggggacctgtggaaggtgcggctgggccatgacaacacaggcaaggcccctggctggtttgtggactgggtggaggtggatgcccccagcctgggcaagtgcatgaccttcccctgtggccgctggctggccaagaatgaagatgatggcagcatcatccgggacctcttccacgccgagctgcagacccggctgtacaccccatttgtgccctatgagatcaccctgtacaccagtgatgtgtttgctgctggaacagatgccaacatcttcatcatcatctacggctgtgatgctgtgtgcacccagcagaagtacctgtgcaccaacaagcgggagcagaagcagttctttgagaggaagagcgccagccgcttcatcgtggagctggaggatgtgggggagatcatcgagaagatcagaattggccacaacaacacaggcatgaaccctggctggcactgcagccacgtggacatccggcggctgctgcctgacaaggatggagctgagaccctgaccttcccctgtgaccgctggctggccaccagtgaagatgacaagaagaccatccgggagctggtgccctatgacatcttcacagagaagtacatgaaggatggcagcctgcggcaggtgtacaaggaggtggaggagcccctggacatcgtgctgtacagcgtgcagatcttcaccggcaacatccctggagctggaacagatgccaaggtgtacatcaccatctacggggacctgggggacaccggggagcgctacctgggcaagtcagaaaatagaaccaacaagtttgagcggggcacagctgacaccttcatcattgaagctgctgacctgggcgtcatctacaagatcaagctgcggcatgacaacagcaagtggtgtgccgactggtacgtggagaaggtggagatctggaatgacaccaatgaagatgagttcctgttcctgtgtggccgctggctgagcctgaagaaggaggatggccgcctggagcggctcttctatgagaaggagtacaccggggacaggagcagcaactgcagcagccctgctgacttctgggagatcgccctgagcagcaagatggctgatgtggacatcagcacagtgacaggccccatggctgactatgtgcaggagggccccatcatcccctactacgtgtctgtgaccaccgggaagcacaaggatgctgccacagacagccgggccttcatcttcctgattggagaagatgatgagaggagcaagaggatctggctggactacccccggggcaagaggggcttcagccggggctctgtggaggagttctacgtggccggcctggatgtgggcatcatcaagaagattgagctgggccatgatggagccagccctgagagctgctggctggtggaggagctgtgcctggccgtgcccacccagggcaccaagtacatgctgaactgcaactgctggctggccaaggacagaggagatggcatcaccagccgggtgtttgacctgctggatgccatggtggtgaacattggagtgaaggtgctgtatgagatgacagtgtggacaggagatgtggtgggcggcggcacagacagcaacatcttcatgaccctgtatggcatcaatggcagcacagaggagatgcagctggacaagaagaaggccaggtttgagcgggagcagaatgacaccttcatcatggagatcctggacatcgcccccttcaccaagatgaggatcagaattgatggcctgggcagcaggcctgagtggttcctggagcgcatcctgctgaagaacatgaacacaggagacctgaccatgttctactacggggactggctgagccagaggaagggcaagaagaccctggtgtgtgagatgtgtgctgtgattgatgaggaggagatgatggagtggaccagctacacagtggccgtgaagaccagtgacatcctgggcgccggcacagatgccaacgtgttcatcatcatctttggagaaaatggagacagcggcaccctggccctgaagcagagcgccaactggaacaagtttgaaagaaacaacacagacaccttcaacttcccagacatgctgagcctgggccacctgtgcaagctgcgggtgtggcatgacaacaagggcatcttccctggctggcacctgtcctatgtggatgtgaaggacaacagcagagatgagaccttccacttccagtgtgactgctggctgagcaagtcagaaggagatggccagacagtgcgggactttgcctgtgccaacaacaagatctgtgatgagctggaggagaccacctatgaaattgtgattgaaacaggaaatggaggagagaccagagaaaatgtgtggctgatcctggagggcaggaagaacagaagcaaggagttcctgatggagaacagcagccggcagagggccttcaggaagggcaccacagacacctttgaatttgacagcatctacctgggggacatcgccagcctgtgtgtgggccacctggccagagaagatcgcttcatccccaagcgggagctggcctggcacgtgaagaccatcaccatcacagagatggagtatggaaatgtgtacttcttcaactgtgactgcctgatccccctgaagaggaagaggaagtacttcaaggtgtttgaggtgaccaagaccacagagagctttgccagcaaggtgcagagcctggtgcctgtgaagtatgaagtcatcgtgaccaccggctatgagcctggagctggaacagatgccaacgtgtttgtgaccatctttggagccaatggagacaccgggaagcgggagctgaagcagaagatgaggaacctgtttgagcggggcagcacagaccgcttcttcctggagaccctggagctggtggtgacccggctgggcctggccgcagaatgtggctag

SEQ ID NO: 58452 - DNA, 1358 bp, Artificial Sequence
  derived and/or modified sequence
gaaccagggtcctgacctggagtctgacctctgccagaaactcatcaggtcaccctggacaagtcatgccatctttatgggcttttgtttcctcttctgataaatgggcttaatgttgccagcctaacttcttaagatgttctgaaaatccaaggcatttaagcttggaaaggaaaaagtgccacagaaccatgaggctggggacaaactgtgaacatccccagcttccccttgcagctccatcagggtactactttccatgccaacgttggctggcagtggaggaagatgatggccagctgtccagggagctgttgccagtggatgagtcctatgtgctgccacagagcgaggagggtaggggaggcggtgacaacaaccccctcgacaacctggccctggagcagaaagataaatctaccacattctcagtgaccataaagactggggttaagaagaatgcgggcacagatgctaatgtcttcatcacactctttggcacacaggatgacactggaatgaccctcctgaagtcctccaagacaaacagcgataagtttgagagggacagcattgaaatcttcacggtggagacgctggatctgggagacctgtggaaagtccggcttggccatgacaacacaggcaaggccccaggctggtttgtagactgggtagaggtggatgccccatctcttgggaagtgcatgacgtttccctgtggccgctggctggccaaaaacgaagacgacgggtccatcatcagagacctcttccatgcagagcttcagacgaggctgtacacaccatttgttccttacgagatcaccctctacaccagtgatgtctttgctgctgggacagatgccaacatcttcatcatcatctatggctgcgatgccgtgtgcacccagcagaagtatctgtgtaccaacaagagggaacagaagcagttctttgagaggaagtctgcctcccgcttcatcgtagagttagaagatgtgggagaaatcattgaaaaaattcggattggccataataacacgggcatgaatcctgggtggcactgctctcacgtggacatccgcaggctcctcccggataaagactagagatggggtttcaccatgttggccaagctggtcttgaaatcctgacatcagggtgcagagaccttgactttcccatgcgatcggtggcttgccacctctgaggatgacaaaaagaccattcgagaactggttccatatgacatcttcactgagaaatacatgaaagatgggtccttacggcaagtctacaaggaagtagaagagcctctggacattgtgctgtactcggtgcagatcttcacaggg

SEQ ID NO: 58453 - DNA, 921 bp, Artificial Sequence
  derived and/or modified sequence
atgcggctgggcaccaactgcgagcacccccagctgcccctggccgctccgagcggctactactttccttgccagcgctggctggccgtggaggaggatgatggccaactgagtagggagctcctccccgtggacgagagttacgttttgcctcagtctgaggaggggagggggggaggtgataataatcctctcgacaatctggcactagaacagaaggacaagagcactacgttctccgtgaccataaagactggtgtgaaaaaaaatgccgggacagacgccaatgtcttcattaccctttttgggacacaggatgacaccggtatgacgcttctcaagagctcgaaaactaattctgacaaatttgagcgggactccattgagattttcacggtcgaaactctagacttgggagatctgtggaaggtgagactgggccacgataatacggggaaagccccaggctggttcgttgactgggtcgaggttgacgctccttctcttggcaaatgtatgacctttccttgtggccggtggcttgccaagaatgaggacgatggctccatcataagggatctattccatgccgagctccagacccgtctatataccccattcgtgccctatgagattacattgtacaccagcgatgtgtttgcggccggaaccgatgcgaatatctttatcatcatctacgggtgtgacgctgtttgcactcagcagaagtatctctgtaccaacaaacgggagcaaaagcagttctttgaacgtaagtccgcctcacggtttattgttgagctggaggatgtaggcgagataattgagaaaattcggatcgggcataacaataccggcatgaatcccggctggcactgctcacatgtggatattaggaggttactgcctgataaggactag

SEQ ID NO: 58454 - DNA, 3345 bp, Artificial Sequence
  derived and/or modified sequence
atgaacaacgagatcacctactacttcccctgccagcggtggctggcagtcgaagaggatgatggacagctctcgcgagaactcctgccagtcgatgaatcatatgtcctcccacagagcgaggaaggacgggggggaggcgataataacccattggataacctagcactggagcaaaaggataagagtacaacatttagcgtgactattaagaccggggtcaaaaaaaatgccgggaccgatgctaatgtttttatcaccctttttggaacgcaggacgacactggcatgactctgcttaagtccagcaagaccaacagtgataagtttgaacgtgactcaattgagatttttaccgtggagacacttgacctgggggatctgtggaaggtacgactgggccacgacaacactgggaaagcccctggttggtttgtggattgggtggaggtggacgcaccttccttgggaaagtgcatgaccttcccctgcggacgttggctggccaaaaatgaagatgacggttcaatcatcagagatctttttcacgcggaactccaaaccagattgtacacacctttcgtgccttacgagatcacattatacacgtccgacgtatttgccgctggcactgatgctaacatttttattattatctacggttgcgatgccgtgtgtacccaacagaagtacttatgcaccaataaacgcgagcagaagcagttcttcgagcggaagtcagcaagtcgatttattgtagagctagaggatgtgggagagattatagagaaaattagaatcggccacaataataccggtatgaatcctgggtggcactgctcgcatgtggacatccggcgactgcttcctgataaagacggggctgagacgctcacttttccttgtgacaggtggttagccaccagcgaggacgacaagaaaaccatcagggaacttgtgccatatgatatattcactgagaagtacatgaaagacggctctctgcggcaagtgtataaagaggtcgaagaacccctggatattgtcctgtattccgtgcaaatctttacgggcaacattccaggagctgggacggatgcaaaagtctacataaccatctatggggatttgggcgataccggagagaggtatctgggtaaatccgagaatcgcactaataagttcgaaaggggcacggccgacaccttcatcattgaggccgccgacctaggggtgatctacaagattaagctccgtcatgataactctaaatggtgcgccgactggtacgtggagaaggtcgagatctggaacgatacgaacgaggacgagtttctctttctgtgtgggcgctggctgagcctcaagaaagaggatggacgactcgagcggctcttttatgaaaaagaatataccggggatcgctccagcaattgttcttccccagccgatttttgggagattgcgctgtcttctaaaatggccgatgtggatatttccaccgtgaccgggcccatggctgactacgtacaggagggccccattataccttactacgtaagtgtgacaacaggcaaacataaggatgcagcgactgacagccgcgcatttatatttctgattggggaagatgacgagaggtctaagagaatatggttggattatccgcgcggaaaacgggggtttagtcgaggctccgtagaagaattttacgtcgccggcctggacgttgggattatcaagaagatcgagctgggccacgatggcgcatcgccggagtcatgttggctggtggaagagctttgcctggctgtcccgacccaaggcacaaagtacatgctaaactgtaattgctggctcgcaaaagatcgtggggatggcatcacctctcgggtcttcgacctgttggatgctatggtggtgaacatcggggtgaaagtgttatacgagatgactgtgtggacgggggacgtggtgggaggtgggaccgacagcaacatctttatgactctatacggcataaacgggtcgaccgaggaaatgcaacttgataagaaaaaagcgcgcttcgagagagagcaaaatgacacattcattatggagatattggatatcgctccctttaccaagatgagaatacgcatcgacggactgggcagccggccggagtggttcctggagaggatactcctgaaaaatatgaatacaggagacctgaccatgttctactacggtgactggctgtctcagcgtaaaggaaagaagaccctcgtatgcgagatgtgcgctgtcatcgatgaggaagagatgatggaatggactagttacacagtggccgtcaagacgtctgacatcttgggtgcggggactgatgcaaatgtgttcattattatcttcggtgagaacggtgacagtggaacgcttgccttgaaacagtccgccaactggaacaaattcgaacgaaataatacagacacgtttaactttcctgacatgttatctctgggccacttgtgcaaactgagagtatggcacgataataaaggcattttcccgggatggcacctctcctatgtggatgtgaaagacaattcccgcgacgaaacattccatttccagtgtgattgctggttaagtaagagtgaaggggacggacaaactgtgagggactttgcgtgtgcgaataacaagatctgtgatgaactggaggaaacaacatatgaaattgttattgagactggtaacggaggcgagacacgagagaacgtgtggctgatactagaaggcaggaagaaccggagcaaagaatttttaatggaaaatagtagcagacagcgcgctttccggaaagggactaccgataccttcgagtttgactccatctacctcggcgatatagccagcctctgcgtggggcatctggccagagaagatcggttcattccaaaaagagagctggcctggcacgtcaaaaccattactatcaccgaaatggaatatgggaatgtgtattttttcaactgcgactgcctcatcccactgaagaggaaacgcaaatattttaaggtgtttgaggtgaccaagacgacggagagctttgcttccaaggtccaatctctggtgcctgtgaagtatgaggtgatcgttacaactggatacgagcccggtgctggaacagacgccaatgtttttgtaaccatcttcggagctaacggtgataccgggaagagagaactgaagcagaagatgcgcaacttgttcgaacggggttccacagaccggttctttttggaaaccctagagctagtagtgacgagactgggcctggccgcagagtgtggatag

SEQ ID NO: 58455 - DNA, 921 bp, Artificial Sequence
  derived and/or modified sequence
atgcgactcgggactaattgcgagcatcctcaactgccactagcagctccctccggctattacttcccctgccagcgttggctggctgtcgaggaggacgacggacagctgtcaagggaactgttgcctgtcgacgaaagctacgtgctaccccagagtgaggagggcaggggcggtggagacaataacccccttgacaatctggctctggagcaaaaggataagagcaccactttttccgttaccataaagacgggggttaagaagaacgcgggaaccgatgcaaacgtgtttattactttgttcggtacacaggatgacacaggaatgaccttgcttaaatcgtcgaagaccaactcagataaattcgagcgcgactccatcgaaatcttcaccgtcgaaactctggatctgggagacctttggaaggtccgcttgggtcacgacaacactgggaaggctcctggttggtttgtggactgggttgaagttgatgcccctagtcttggcaagtgcatgacattcccctgcggcaggtggctggctaagaatgaagacgacggctcaattattagggacttatttcatgccgaattacaaacccgactttataccccgtttgtcccgtacgaaattaccctttatacttcagatgtcttcgcagccggaaccgacgctaatatcttcattataatttacgggtgtgacgccgtctgcactcagcagaagtatctctgtaccaataaacgtgagcagaaacaattttttgaaaggaagtctgctagcaggttcattgtcgagttggaggatgtgggcgagattatcgagaaaatccgcattggccataataatacagggatgaatcccggttggcactgctcccacgtagacatcaggaggttactgccagacaaggattag

SEQ ID NO: 58456 - DNA, 3345 bp, Artificial Sequence
  derived and/or modified sequence
atgaacaacgagatcacatattatttcccatgccagcgctggctcgccgtggaagaggatgacggtcagctctccagggaactgctccccgtcgacgagagttacgtgctccctcaatccgaagagggtaggggagggggtgataacaacccactcgataatctggcattggagcagaaagataaaagcaccacatttagcgttacgattaagacaggagtcaagaagaatgcagggaccgatgccaatgtcttcatcaccctgttcggcacccaggacgatacgggcatgacattgcttaaaagctccaagactaatagcgataaatttgaaagggacagcatcgaaatctttacggttgagacactcgatctcggcgacctatggaaggtccgccttggacatgacaacactggaaaagccccaggttggttcgtagactgggtcgaggtcgatgctcctagcctgggtaaatgtatgacatttccctgcgggagatggttggctaaaaacgaagacgatggctcaataatcagagatctctttcacgccgagctgcagactaggctttatactcctttcgtaccttacgagattactctgtacacctctgatgtcttcgccgcaggtacagatgcaaacatttttatcattatctatgggtgcgacgccgtttgtacacaacagaagtacctgtgtaccaataagcgggaacagaagcagttcttcgagaggaagtctgccagcaggttcatcgtagaattggaagacgtgggcgagatcatagagaaaatacgcattggccataacaacactggcatgaatccaggttggcattgcagtcatgtcgacattcggaggctcctgcctgataaggatggggctgagaccctgactttcccctgcgaccggtggttagctacctctgaggacgataaaaaaactatcagagaactggtcccctacgatattttcactgagaaatatatgaaagatggctctctcaggcaagtatacaaggaggtggaggaaccattggatatagtgctgtacagtgttcagatatttacaggcaacattcctggagctggaacggatgccaaagtttatattaccatctatggagacctcggggacaccggcgaacggtacctgggcaagtccgagaatcggaccaataagttcgaaaggggtactgcggatactttcatcattgaagctgccgatctgggcgtcatttacaaaatcaagctcagacatgataacagtaagtggtgcgcagactggtatgtggagaaggtggagatctggaacgacaccaatgaggatgagtttttatttctctgtggtcggtggctctccctgaagaaggaggacggcagactcgagcgtctgttttacgagaaggagtacacaggagacagatcttcaaactgttccagtccagcagacttctgggagattgcactttcaagtaagatggccgacgtggacatctccactgtcactgggcctatggcagactacgtacaggagggcccaattatcccctattacgtgtctgtaacaaccggcaaacataaggatgccgctaccgatagccgcgctttcattttcctgattggggaggatgatgagagatcgaaacgcatttggttggactacccacgaggtaagcgagggttctctcggggatcagtggaggaattttacgttgctggcctcgacgtgggcattattaagaagattgaattgggccatgatggtgctagtcctgaatcctgctggttagttgaggagctgtgcctggctgtgcctactcagggtactaaatacatgttaaattgcaattgctggttggctaaggatagaggggacggcatcacaagcagggtatttgaccttctggacgcaatggtagtgaacatcggagttaaggtgttgtacgagatgaccgtgtggacgggggacgtggttggagggggaaccgatagtaacatttttatgactctctatggcatcaacgggagcactgaagaaatgcagctcgataagaagaaggcacgcttcgagcgcgagcagaacgatactttcattatggagattctggatatcgccccatttacaaaaatgcgcataaggattgacggcctcgggtctcggcctgagtggttcttggagcggatattgctgaagaatatgaacacaggcgatttgactatgttctactatggcgactggttgtcacagcgaaaaggtaaaaagacacttgtgtgcgagatgtgcgccgtcatagatgaagaagagatgatggagtggacgagttacacagtcgcggtcaagaccagcgacatcctgggtgccggaacggacgcaaacgtgtttatcatcatattcggcgaaaacggcgatagtggcacgctagccctcaaacagagcgccaattggaacaaattcgaaagaaacaacacagacacatttaatttcccagacatgttatccctaggacacctctgcaaacttcgtgtttggcatgacaacaaaggcatttttccgggttggcatctctcctatgttgacgtgaaggacaattcgcgagacgaaacatttcatttccagtgtgattgctggttgtcaaaatcagagggagacggacagactgtaagagactttgcatgtgccaacaacaagatttgtgacgagctagaggaaaccacttatgagatagtgatcgaaaccggtaatggtggtgagaccagggagaacgtatggctcatcctcgagggcaggaaaaacaggtccaaggaattcctcatggagaactctagtagacagagggcatttagaaaggggacgacagatacattcgagtttgacagcatctatctcggcgatatagcaagcctgtgcgtaggtcaccttgccagggaagatcgtttcatcccaaagagggaactcgcatggcatgtcaaaactataacaattactgaaatggagtatggaaacgtgtacttttttaattgtgactgccttattcctctgaagagaaagcgtaagtactttaaggtttttgaggttaccaaaaccacggaatcatttgcctccaaagtgcagtccctggttcccgtgaaatatgaggtaatcgtcaccactggttatgaacccggagccggaaccgatgccaatgtgtttgtgaccattttcggtgccaacggcgacaccggcaagagagagttgaaacaaaagatgcggaatctgtttgagagaggaagtacggaccgttttttcttggagactttagagctagtagtgacacggctcggtcttgctgcagaatgcggttag

SEQ ID NO: 58457 - DNA, 921 bp, Artificial Sequence
  derived and/or modified sequence
atgagactgggcaccaactgcgagcacccccagctgcccctggccgcccccagcggctactacttcccctgccagagatggctggccgtggaggaggacgacggccagctgagcagagagctgctgcccgtggacgagagctacgtgctgccccagagcgaggagggcagaggcggcggcgacaacaaccccctggacaacctggccctggagcagaaggacaagagcaccaccttcagcgtgaccatcaagaccggcgtgaagaagaacgccggcaccgacgccaacgtgttcatcaccctgttcggcacccaggacgacaccggcatgaccctgctgaagagcagcaagaccaacagcgacaagttcgagagagacagcatcgagatcttcaccgtggagaccctggacctgggcgacctgtggaaggtgagactgggccacgacaacaccggcaaggcccccggctggttcgtggactgggtggaggtggacgcccccagcctgggcaagtgcatgaccttcccctgcggcagatggctggccaagaacgaggacgacggcagcatcatcagagacctgttccacgccgagctgcagaccagactgtacacccccttcgtgccctacgagatcaccctgtacaccagcgacgtgttcgccgccggcaccgacgccaacatcttcatcatcatctacggctgcgacgccgtgtgcacccagcagaagtacctgtgcaccaacaagagagagcagaagcagttcttcgagagaaagagcgccagcagattcatcgtggagctggaggacgtgggcgagatcatcgagaagatcagaatcggccacaacaacaccggcatgaaccccggctggcactgcagccacgtggacatcagaagactgctgcccgacaaggactag

SEQ ID NO: 58458 - DNA, 3345 bp, Artificial Sequence
  derived and/or modified sequence
atgaacaacgagatcacctactacttcccctgccagagatggctggccgtggaggaggacgacggccagctgagcagagagctgctgcccgtggacgagagctacgtgctgccccagagcgaggagggcagaggcggcggcgacaacaaccccctggacaacctggccctggagcagaaggacaagagcaccaccttcagcgtgaccatcaagaccggcgtgaagaagaacgccggcaccgacgccaacgtgttcatcaccctgttcggcacccaggacgacaccggcatgaccctgctgaagagcagcaagaccaacagcgacaagttcgagagagacagcatcgagatcttcaccgtggagaccctggacctgggcgacctgtggaaggtgagactgggccacgacaacaccggcaaggcccccggctggttcgtggactgggtggaggtggacgcccccagcctgggcaagtgcatgaccttcccctgcggcagatggctggccaagaacgaggacgacggcagcatcatcagagacctgttccacgccgagctgcagaccagactgtacacccccttcgtgccctacgagatcaccctgtacaccagcgacgtgttcgccgccggcaccgacgccaacatcttcatcatcatctacggctgcgacgccgtgtgcacccagcagaagtacctgtgcaccaacaagagagagcagaagcagttcttcgagagaaagagcgccagcagattcatcgtggagctggaggacgtgggcgagatcatcgagaagatcagaatcggccacaacaacaccggcatgaaccccggctggcactgcagccacgtggacatcagaagactgctgcccgacaaggacggcgccgagaccctgaccttcccctgcgacagatggctggccaccagcgaggacgacaagaagaccatcagagagctggtgccctacgacatcttcaccgagaagtacatgaaggacggcagcctgagacaggtgtacaaggaggtggaggagcccctggacatcgtgctgtacagcgtgcagatcttcaccggcaacatccccggcgccggcaccgacgccaaggtgtacatcaccatctacggcgacctgggcgacaccggcgagagatacctgggcaagagcgagaacagaaccaacaagttcgagagaggcaccgccgacaccttcatcatcgaggccgccgacctgggcgtgatctacaagatcaagctgagacacgacaacagcaagtggtgcgccgactggtacgtggagaaggtggagatctggaacgacaccaacgaggacgagttcctgttcctgtgcggcagatggctgagcctgaagaaggaggacggcagactggagagactgttctacgagaaggagtacaccggcgacagaagcagcaactgcagcagccccgccgacttctgggagatcgccctgagcagcaagatggccgacgtggacatcagcaccgtgaccggccccatggccgactacgtgcaggagggccccatcatcccctactacgtgagcgtgaccaccggcaagcacaaggacgccgccaccgacagcagagccttcatcttcctgatcggcgaggacgacgagagaagcaagagaatctggctggactaccccagaggcaagagaggcttcagcagaggcagcgtggaggagttctacgtggccggcctggacgtgggcatcatcaagaagatcgagctgggccacgacggcgccagccccgagagctgctggctggtggaggagctgtgcctggccgtgcccacccagggcaccaagtacatgctgaactgcaactgctggctggccaaggacagaggcgacggcatcaccagcagagtgttcgacctgctggacgccatggtggtgaacatcggcgtgaaggtgctgtacgagatgaccgtgtggaccggcgacgtggtgggcggcggcaccgacagcaacatcttcatgaccctgtacggcatcaacggcagcaccgaggagatgcagctggacaagaagaaggccagattcgagagagagcagaacgacaccttcatcatggagatcctggacatcgcccccttcaccaagatgagaatcagaatcgacggcctgggcagcagacccgagtggttcctggagagaatcctgctgaagaacatgaacaccggcgacctgaccatgttctactacggcgactggctgagccagagaaagggcaagaagaccctggtgtgcgagatgtgcgccgtgatcgacgaggaggagatgatggagtggaccagctacaccgtggccgtgaagaccagcgacatcctgggcgccggcaccgacgccaacgtgttcatcatcatcttcggcgagaacggcgacagcggcaccctggccctgaagcagagcgccaactggaacaagttcgagagaaacaacaccgacaccttcaacttccccgacatgctgagcctgggccacctgtgcaagctgagagtgtggcacgacaacaagggcatcttccccggctggcacctgagctacgtggacgtgaaggacaacagcagagacgagaccttccacttccagtgcgactgctggctgagcaagagcgagggcgacggccagaccgtgagagacttcgcctgcgccaacaacaagatctgcgacgagctggaggagaccacctacgagatcgtgatcgagaccggcaacggcggcgagaccagagagaacgtgtggctgatcctggagggcagaaagaacagaagcaaggagttcctgatggagaacagcagcagacagagagccttcagaaagggcaccaccgacaccttcgagttcgacagcatctacctgggcgacatcgccagcctgtgcgtgggccacctggccagagaggacagattcatccccaagagagagctggcctggcacgtgaagaccatcaccatcaccgagatggagtacggcaacgtgtacttcttcaactgcgactgcctgatccccctgaagagaaagagaaagtacttcaaggtgttcgaggtgaccaagaccaccgagagcttcgccagcaaggtgcagagcctggtgcccgtgaagtacgaggtgatcgtgaccaccggctacgagcccggcgccggcaccgacgccaacgtgttcgtgaccatcttcggcgccaacggcgacaccggcaagagagagctgaagcagaagatgagaaacctgttcgagagaggcagcaccgacagattcttcctggagaccctggagctggtggtgaccagactgggcctggccgccgagtgcggctag

SEQ ID NO: 58459 - DNA, 1539 bp, Artificial Sequence
  derived and/or modified sequence
atgacggtgtggacaggtgacgtggtgggggggggtactgacagtaatatatttatgactttgtacggtattaacggctctactgaggaaatgcaactagataaaaagaaggcgagattcgagcgggaacagaatgacaccttcatcatggaaatcctggacattgcaccattcacaaaaatgcggatccgcatcgacggactgggctctcggccagaatggtttctggagcgtatactcctgaagaacatgaatactggtgatctgaccatgttctattatggtgactggctgtctcagcgaaaaggcaaaaaaacccttgtgtgcgagatgtgcgccgtaatcgatgaagaagagatgatggagtggacctcctataccgtcgccgttaaaacctcggatatactcggggctggcaccgatgcaaacgtcttcatcattatttttggtgaaaacggagatagtggaaccctagcacttaaacagtccgcaaattggaacaagttcgaacgaaataacactgatactttcaactttcctgacatgttatcattgggtcacctctgcaagcttagggtgtggcatgacaataaaggcatcttccccgggtggcacctatcttacgtcgacgtgaaggataacagccgcgacgagacctttcacttccagtgtgattgctggctttctaagagcgagggggatggccagactgtcagagacttcgcctgcgcaaacaataaaatctgcgacgagctggaagagactacctatgagatagtgatcgaaacgggaaacggaggcgagacgagggagaacgtttggcttatcctggaagggcgcaagaaccgatcaaaggagtttctaatggagaatagttcaagacaacgcgccttccgaaagggcaccaccgatacattcgaatttgattctatataccttggagacatcgctagcctgtgcgtgggccacttagcacgggaggaccgcttcattccaaaacgggaactcgcttggcacgtgaagacaataacaattaccgagatggagtacgggaacgtgtatttttttaattgcgattgcctcattcccctaaagcggaaacgcaagtattttaaggtgttcgaggtaacaaaaaccacagagtcttttgccagtaaggtgcagtctttagtgcctgtaaaatatgaagtcatcgtgacaactggatacgagcccggggcagggaccgacgcgaatgtgtttgtgaccatttttggggctaacggtgacacaggaaaacgcgaattgaagcagaagatgaggaacttgtttgaacggggctccactgataggttttttctcgagaccctggaactgggagagttgagaaaggtgaggctcgaacacgactcgtcaggctactgttctgggtggctcgtggagaaagtggaggtgaccaatacgagtaccggagtggccaccatcttcaattgcggacgctggctcgacaaaaagaggggcgacgggcttacatggcgcgatctgttccccagtgtgtag

SEQ ID NO: 58460 - DNA, 1539 bp, Artificial Sequence
  derived and/or modified sequence
atgacagtgtggacaggagatgtggtgggcggcggcacagacagcaacatcttcatgaccctgtatggcatcaatggcagcacagaggagatgcagctggacaagaagaaggccaggtttgagcgggagcagaatgacaccttcatcatggagatcctggacatcgcccccttcaccaagatgaggatcagaattgatggcctgggcagcaggcctgagtggttcctggagcgcatcctgctgaagaacatgaacacaggagacctgaccatgttctactacggggactggctgagccagaggaagggcaagaagaccctggtgtgtgagatgtgtgctgtgattgatgaggaggagatgatggagtggaccagctacacagtggccgtgaagaccagtgacatcctgggcgccggcacagatgccaacgtgttcatcatcatctttggagaaaatggagacagcggcaccctggccctgaagcagagcgccaactggaacaagtttgaaagaaacaacacagacaccttcaacttcccagacatgctgagcctgggccacctgtgcaagctgcgggtgtggcatgacaacaagggcatcttccctggctggcacctgtcctatgtggatgtgaaggacaacagcagagatgagaccttccacttccagtgtgactgctggctgagcaagtcagaaggagatggccagacagtgcgggactttgcctgtgccaacaacaagatctgtgatgagctggaggagaccacctatgaaattgtgattgaaacaggaaatggaggagagaccagagaaaatgtgtggctgatcctggagggcaggaagaacagaagcaaggagttcctgatggagaacagcagccggcagagggccttcaggaagggcaccacagacacctttgaatttgacagcatctacctgggggacatcgccagcctgtgtgtgggccacctggccagagaagatcgcttcatccccaagcgggagctggcctggcacgtgaagaccatcaccatcacagagatggagtatggaaatgtgtacttcttcaactgtgactgcctgatccccctgaagaggaagaggaagtacttcaaggtgtttgaggtgaccaagaccacagagagctttgccagcaaggtgcagagcctggtgcctgtgaagtatgaagtcatcgtgaccaccggctatgagcctggagctggaacagatgccaacgtgtttgtgaccatctttggagccaatggagacaccgggaagcgggagctgaagcagaagatgaggaacctgtttgagcggggcagcacagaccgcttcttcctggagaccctggagctgggggagctgaggaaggtgcggctggagcatgacagcagcggctactgcagcggctggctggtggagaaggtggaggtgaccaacaccagcactggagtggccaccatcttcaactgtggccgctggctggacaagaagagaggagatggcctgacctggagggacctcttccccagcgtgtag

SEQ ID NO: 58461 - DNA, 1539 bp, Artificial Sequence
  derived and/or modified sequence
atgaccgtgtggaccggcgacgtggtgggcggcggcaccgacagcaatatcttcatgaccctttatggaattaacggctcaacagaagagatgcagttagataagaagaaagcaaggttcgagagagaacagaatgatactttcattatggaaatactggatattgcgcccttcacaaaaatgaggatacgtatagacggattggggtctaggcccgagtggtttctggagaggatattgctcaagaacatgaatacaggcgaccttacgatgttctactacggtgattggctttcacagaggaaaggaaaaaagacactggtgtgcgagatgtgtgcggtgatcgacgaggaggagatgatggaatggacgagttataccgtggctgtcaagacatccgatatccttggggctgggaccgatgctaacgtattcattatcatttttggagagaacggcgattcgggcacgcttgccctcaaacagtccgccaactggaataaatttgaaaggaataacaccgacactttcaactttcccgacatgctctctcttggacatctttgcaagctacgggtgtggcacgacaataaagggatctttcccgggtggcacctgagctatgtagatgtcaaggacaattctagagacgagacatttcacttccagtgcgattgctggctgtctaagagcgagggggacggacagacagtacgcgacttcgcgtgcgccaataacaagatctgcgatgagctggaagagacaacctatgaaatagtgatagagaccgggaatggcggtgaaacgcgggaaaatgtctggctgatactggaaggacgcaaaaatcgcagcaaggaattcttgatggagaacagctctcgccaaagagcctttcggaaaggcacaactgacacatttgagttcgacagtatctacctgggagatatagcatcactttgtgtcggccacctggctcgagaagacaggttcatcccaaagagggaactggcgtggcatgttaagacaatcaccatcactgaaatggagtacggcaatgtttacttctttaactgcgattgtctgatcccattgaagcgcaagaggaagtactttaaggtgtttgaggtcaccaaaaccacggagagtttcgcgtctaaggttcagagtctggtgcccgtaaagtatgaggtcatcgtgactaccggctacgagcctggagcagggaccgatgccaacgttttcgtaacgatttttggagcaaacggtgataccggtaaacgcgagctgaaacaaaagatgagaaatttgttcgaaaggggttctactgaccggttttttctggagaccctcgaactgggcgaactccgaaaggtgagattagaacacgatagctctgggtattgctccggctggcttgtcgagaaagtggaagtgaccaacacttcaacaggcgtggccacaatcttcaactgcggccggtggctcgacaagaaaaggggcgatggacttacttggcgtgatctctttccatctgtatag

SEQ ID NO: 58462 - DNA, 1539 bp, Artificial Sequence
  derived and/or modified sequence
atgactgtctggacgggagacgttgtcggcggaggcacagactccaacattttcatgactctctacggaattaatgggtcgacggaggaaatgcagcttgacaagaagaaagcgcgattcgaaagggagcagaacgatactttcattatggaaatcctggacatcgcacccttcaccaagatgcgcattagaatagacggactggggtctcgcccagagtggttcctcgaacgaatcctcctgaaaaatatgaataccggagacctcacaatgttctactacggtgactggctgtcacaacgtaaaggaaaaaagacactcgtctgtgagatgtgcgcagtgatagacgaggaagaaatgatggaatggacttcctacacggtcgctgtgaaaacatccgatatcctgggtgccggtacagacgcgaacgtgttcatcattatatttggagagaacggcgattcgggcaccctagccctgaagcagagtgcaaattggaacaaatttgaacgaaataacactgatactttcaacttcccagatatgctgtcactggggcacctgtgcaagctaagagtttggcacgataataaggggatctttcccggttggcatttaagctacgtggacgtgaaggataattccagggacgaaacctttcactttcaatgcgattgctggctctcgaagtcagagggcgacggtcagaccgttcgggactttgcttgtgccaacaataaaatctgcgatgagctagaagagacgacatatgagatagtgatagagacagggaacggcggtgagacaagagaaaatgtgtggctgattctggaaggtaggaagaacagaagcaaagagttcctgatggaaaactctagcaggcagagagcttttagaaagggtaccacagacacgttcgaattcgactccatatacctgggagacatcgctagtctatgcgtggggcatctcgccagagaggatcgctttatccccaaaagggagctggcttggcacgtgaagaccatcaccatcaccgaaatggagtacggaaacgtctatttttttaattgcgactgtctgatacctcttaaaaggaaacgaaagtattttaaagtgtttgaggtcacaaagaccaccgagtcttttgcttctaaggtccagtctctggtgcctgtgaaatacgaagtgatcgtgacaaccggatatgaaccaggcgcaggtacagacgccaacgtgttcgttaccatctttggggctaatggcgacacagggaagcgcgagttaaagcagaagatgcggaatctgtttgaaagggggtctactgatcggttcttccttgaaactctggagcttggggaactgaggaaggttcgccttgaacatgactcttcaggatattgctcgggttggctcgtggaaaaggtggaagtgactaacactagtacaggcgtagcgacgatttttaactgcggcagatggctagataaaaaaaggggggacggtctgacttggcgcgatttgttcccctctgtgtag

SEQ ID NO: 58463 - DNA, 1539 bp, Artificial Sequence
  derived and/or modified sequence
atgaccgtgtggaccggcgacgtggtgggcggcggcaccgacagcaacatcttcatgaccctgtacggcatcaacggcagcaccgaggagatgcagctggacaagaagaaggccagattcgagagagagcagaacgacaccttcatcatggagatcctggacatcgcccccttcaccaagatgagaatcagaatcgacggcctgggcagcagacccgagtggttcctggagagaatcctgctgaagaacatgaacaccggcgacctgaccatgttctactacggcgactggctgagccagagaaagggcaagaagaccctggtgtgcgagatgtgcgccgtgatcgacgaggaggagatgatggagtggaccagctacaccgtggccgtgaagaccagcgacatcctgggcgccggcaccgacgccaacgtgttcatcatcatcttcggcgagaacggcgacagcggcaccctggccctgaagcagagcgccaactggaacaagttcgagagaaacaacaccgacaccttcaacttccccgacatgctgagcctgggccacctgtgcaagctgagagtgtggcacgacaacaagggcatcttccccggctggcacctgagctacgtggacgtgaaggacaacagcagagacgagaccttccacttccagtgcgactgctggctgagcaagagcgagggcgacggccagaccgtgagagacttcgcctgcgccaacaacaagatctgcgacgagctggaggagaccacctacgagatcgtgatcgagaccggcaacggcggcgagaccagagagaacgtgtggctgatcctggagggcagaaagaacagaagcaaggagttcctgatggagaacagcagcagacagagagccttcagaaagggcaccaccgacaccttcgagttcgacagcatctacctgggcgacatcgccagcctgtgcgtgggccacctggccagagaggacagattcatccccaagagagagctggcctggcacgtgaagaccatcaccatcaccgagatggagtacggcaacgtgtacttcttcaactgcgactgcctgatccccctgaagagaaagagaaagtacttcaaggtgttcgaggtgaccaagaccaccgagagcttcgccagcaaggtgcagagcctggtgcccgtgaagtacgaggtgatcgtgaccaccggctacgagcccggcgccggcaccgacgccaacgtgttcgtgaccatcttcggcgccaacggcgacaccggcaagagagagctgaagcagaagatgagaaacctgttcgagagaggcagcaccgacagattcttcctggagaccctggagctgggcgagctgagaaaggtgagactggagcacgacagcagcggctactgcagcggctggctggtggagaaggtggaggtgaccaacaccagcaccggcgtggccaccatcttcaactgcggcagatggctggacaagaagagaggcgacggcctgacctggagagacctgttccccagcgtgtag

SEQ ID NO: 58464 - protein, 245 aa, Artificial Sequence
  derived and/or modified sequence
MAAAPPSYCFVAFPPRAKDGLVVFGKNSARPRDEVQEVVYFSAADHEPESKVECTYISIDQVPRTYAIMISRPAWLWGAEMGANEHGVCIANEAINTREPAAEIEALLGMDLVRLGLERGETAKEALDVIVSLLEEHGQGGNYFEDANSCHSFQSAYLIVDRDEAWVLETIGKYWAAEKVTEGVRCICSQLSLTTKMDAEHPELRSYAQSQGWWTGEGEFNFSEVFSPVEDHLDCGAGKDSLEKQ

SEQ ID NO: 58465 - protein, 434 aa, Artificial Sequence
  derived and/or modified sequence
MVQDGTFKTRDSTWTCESTRMAAAPPSYCFVAFPPRAKDGLVVFGKNSARPRDEVQEVVYFSAADHEPESKVECTYISIDQVPRTYAIMISRPAWLWGAEMGANEHGVCIANEAINTREPAAEIEALLGMDLVRLGLERGETAKEALDVIVSLLEEHGQGGNYFEDANSCHSFQSAYLIVDRDEAWVLETIGKYWAAEKVTEGVRCICSQLSLTTKMDAEHPELRSYAQSQGWWTGEGEFNFSEVFSPVEDHLDCGAGKDSLEKQEESITVQTMMNTLRDKASGVCIDSEFFLTTASGVSVLPQNRSSPCIHYFTGTPDPSRSIFKPFIFVDDVKLVPKTQSPCFGDDDPAKKEPRFQEKPDRRHELYKAHEWARAIIESDQEQGRKLRSTMLELEKQGLEAMEEILTSSEPLDPAEVGDLFYDCVDTEIKFFK

SEQ ID NO: 58466 - protein, 141 aa, Artificial Sequence
  derived and/or modified sequence
MAAAPPSYCFVAFPPRAKDGLVVFGKNSARPRDEVQEVVYFSAADHEPESKVECTYISIDQVPRTYAIMISRPAWLWGAEMGANEHGVCIANEAINTREPAAEIEALLGMDLVRLGLERGETAKEALDVIVSLLEEHGQGG

SEQ ID NO: 58467 - DNA, 1305 bp, Artificial Sequence
  derived and/or modified sequence
atggtgcaggacggcaccttcaagaccagagacagcacctggacctgcgagagcaccagaatggccgccgccccccccagctactgcttcgtggccttcccccccagagccaaggacggcctggtggtgttcggcaagaacagcgccagacccagagacgaggtgcaggaggtggtgtacttcagcgccgccgaccacgagcccgagagcaaggtggagtgcacctacatcagcatcgaccaggtgcccagaacctacgccatcatgatcagcagacccgcctggctgtggggcgccgagatgggcgccaacgagcacggcgtgtgcatcgccaacgaggccatcaacaccagagagcccgccgccgagatcgaggccctgctgggcatggacctggtgagactgggcctggagagaggcgagaccgccaaggaggccctggacgtgatcgtgagcctgctggaggagcacggccagggcggcaactacttcgaggacgccaacagctgccacagcttccagagcgcctacctgatcgtggacagagacgaggcctgggtgctggagaccatcggcaagtactgggccgccgagaaggtgaccgagggcgtgagatgcatctgcagccagctgagcctgaccaccaagatggacgccgagcaccccgagctgagaagctacgcccagagccagggctggtggaccggcgagggcgagttcaacttcagcgaggtgttcagccccgtggaggaccacctggactgcggcgccggcaaggacagcctggagaagcaggaggagagcatcaccgtgcagaccatgatgaacaccctgagagacaaggccagcggcgtgtgcatcgacagcgagttcttcctgaccaccgccagcggcgtgagcgtgctgccccagaacagaagcagcccctgcatccactacttcaccggcacccccgaccccagcagaagcatcttcaagcccttcatcttcgtggacgacgtgaagctggtgcccaagacccagagcccctgcttcggcgacgacgaccccgccaagaaggagcccagattccaggagaagcccgacagaagacacgagctgtacaaggcccacgagtgggccagagccatcatcgagagcgaccaggagcagggcagaaagctgagaagcaccatgctggagctggagaagcagggcctggaggccatggaggagatcctgaccagcagcgagcccctggaccccgccgaggtgggcgacctgttctacgactgcgtggacaccgagatcaagttcttcaagtag

SEQ ID NO: 58468 - DNA, 1305 bp, Artificial Sequence
  derived and/or modified sequence
atggtgcaagatggcacatttaagaccagggactccacatggacttgtgagagcactagaatggccgcagctcccccaagctactgcttcgtggcttttccacccagggctaaagacggactggtcgtgttcggaaagaactccgcccgtccgcgcgatgaggtccaagaggtggtgtatttcagtgcagccgaccacgaacccgaaagtaaagtagaatgtacttatatctcgatcgatcaggtcccgcggacctacgccattatgatcagtcggccagcgtggttatggggcgctgaaatgggggctaacgagcatggcgtctgcattgctaacgaagccatcaacacacgggagccagcagctgaaattgaagccctgttgggtatggaccttgttcgcttggggttggagcgaggcgagactgcaaaggaggcccttgacgtgatcgtgagccttctggaagaacacgggcagggtggaaattacttcgaggatgcgaactcgtgtcactcctttcaaagcgcctatcttatagtcgaccgcgatgaagcctgggtactggaaacaataggcaagtactgggccgccgagaaagttaccgaaggagtgcgctgcatttgttctcagctgtccctcaccaccaagatggacgctgaacatcctgagcttaggtcttacgcccagtcccagggttggtggactggggagggggaattcaacttcagcgaggtcttctcgcctgtggaggaccatcttgactgcggagccggaaaagactcccttgagaaacaggaagagtcaattacggtgcagacgatgatgaacaccctcagagataaagccagcggagtgtgtatcgactccgagtttttcctgacgaccgcatccggcgtcagcgtgctcccccagaatcggagctccccttgtattcattactttacgggaactcccgatccaagcaggtctatttttaagccattcatcttcgttgacgacgtgaaacttgttccgaagacccagtctccatgtttcggggatgacgacccagcaaaaaaggaacccagattccaggaaaagcctgaccggcggcacgagctgtacaaggcacatgaatgggctagggccatcatcgagtctgaccaggaacaggggcggaagcttcgaagcactatgctcgagctggaaaagcaaggactggaggctatggaagagatactgacgtcctccgagccccttgacccggcagaggtaggcgacctattctacgactgtgtcgatactgaaattaaattttttaaatag

SEQ ID NO: 58469 - DNA, 1305 bp, Artificial Sequence
  derived and/or modified sequence
atggtgcaggacggcaccttcaagacccgggacagcacctggacctgtgagagcaccaggatggctgctgcccctccttcctactgctttgtggccttccccccccgggccaaggatggcctggtggtgtttgggaagaacagcgcccggcccagagatgaggtgcaggaggtggtgtacttctctgctgctgaccacgagcctgagagcaaggtggagtgcacctacatcagcattgaccaggtgcccaggacctacgccatcatgatcagcaggcctgcctggctgtggggcgctgagatgggcgccaatgagcacggcgtgtgcatcgccaatgaggccatcaacacccgggagcctgctgctgagattgaggccctgctgggcatggacctggtgcggctgggcctggagcggggggagacagccaaggaggccctggatgtgattgtgtccctgctggaggagcacggccagggcggcaactactttgaagatgccaacagctgccacagcttccagagcgcctacctgattgtggacagagatgaggcctgggtgctggagaccatcggcaagtactgggccgctgagaaggtgacagaaggagtgcgctgcatctgcagccagctgagcctgaccaccaagatggatgctgagcaccctgagctgcggagctatgcccagagccagggctggtggacaggagagggggagttcaacttcagcgaggtgttcagccctgtggaggaccacctggactgtggggccggcaaggacagcctggagaagcaggaggagagcatcaccgtgcagaccatgatgaacaccctgcgggacaaggccagcggcgtgtgcattgattctgagttcttcctgaccacagccagcggcgtgtctgtgctgccccagaacagaagcagcccctgcatccactacttcaccggcaccccagaccccagccgcagcatcttcaagcccttcatctttgtggatgatgtgaagctggtgcccaagacccagagcccctgctttggagatgatgatcctgccaagaaggagccccgcttccaggagaagccagacagaagacatgagctgtacaaggcccacgagtgggcccgggccatcatcgagagtgaccaggagcagggcaggaagctgcggagcaccatgctggagctggagaagcagggcctggaggccatggaggagatcctgaccagcagcgagcccctggaccctgctgaggtgggggacctcttctatgactgtgtggacacagagatcaagttcttcaagtag

SEQ ID NO: 58470 - DNA, 1305 bp, Artificial Sequence
  derived and/or modified sequence
atggtgcaggacggcaccttcaagacccgggacagcacctggacctgcgagtccacacgcatggcagccgccccaccatcctactgtttcgtggcattccctccacgcgccaaagacggattagtcgttttcggaaaaaacagcgctaggccacgggacgaggttcaagaggtggtgtactttagcgcagcagatcacgagcctgaatccaaggtggagtgtacctacatttcaatcgaccaggtgcctcgtacatacgcaattatgatctctcggccagcctggctgtggggagcggaaatgggggccaacgagcatggcgtatgcattgcaaacgaggccataaacacacgagagcctgctgctgagattgaggccctcctggggatggatctggtacgtctgggcttggaacgaggggaaacagctaaggaggctctggatgtgattgtcagtctgctggaagagcatggtcagggaggtaactatttcgaggacgctaattcctgccactcttttcagagcgcctacctgatagtggacagggacgaggcctgggtgctcgagaccattggcaaatactgggcagccgaaaaagtcacagagggcgtgcgctgtatctgtagccagctttcactgaccaccaagatggacgctgagcaccccgagctgagatcctatgcacaaagccagggatggtggacaggggagggggaatttaatttttcagaggtgttcagtccggtcgaagaccatttagattgtggggccggcaaagactcactggaaaagcaagaggagtcaatcaccgtgcaaactatgatgaatactctacgagataaggcttcaggagtttgcatagacagcgagtttttcctaacgacggctagtggcgtctccgtcctcccccaaaatcgatcctctccatgtatccactattttaccgggacacctgatccaagcaggagcatctttaagcctttcatcttcgtggatgacgtgaaactagtgccaaagacacaaagcccttgcttcggtgatgatgatcctgcgaaaaaggagcctcgcttccaagagaaacctgatcgccgccatgagctgtacaaggctcacgaatgggctagagccattattgagagcgaccaggagcagggacgcaagttgaggagtaccatgctggagttggagaagcaagggctcgaagccatggaagaaatcctgacgagttcagaaccgctcgaccctgcggaagttggagatttgttttatgattgtgtggacacagagattaaatttttcaagtag

SEQ ID NO: 58471 - DNA, 1732 bp, Artificial Sequence
  derived and/or modified sequence
attaaacaatatctggtctcggtggctctgtcattccactgcaggcgtcccaccttcatttgccagctgggatctcttaatgagctagctgtgcacagttcaatagtaaaacccttttagctggtgaaatatgtttgaagaactcactgttggagtgttccatgtgaggcctgcttccactcttgctggcattctcttttcaggatggctgcagctcctccaagttactgttttgttgccttccctccacgtgctaaggatggtctggtggtatttgggaaaaattcagcccggcccagagatgaagtgcaagaggttgtgtatttctcggctgctgatcacgaaccggagagcaaggttgagtgcacttacatttcaatcgaccaagttccaaggacctatgccataatgataagcagacccgcctggctctggggagcagaaatgggagccaatgaacatggagtgtgcatagccaatgaagccatcaacaccagagagccagctgccgagatagaagccttgctggggatggatctggtcaggcttggtttagaaagaggggaaacagctaaagaagccttagatgtcattgtctccttgttggaagaacatggacaaggtgggaattactttgaagatgcaaactcctgccacagcttccaaagtgcatatctgattgtggatcgtgatgaagcctgggtgctcgagaccatagggaagtactgggctgccgagaaagtcacagagggagtgaggtgcatttgcagtcagctttcgctcaccactaagatggatgcagagcatccggaactcaggagttacgctcagagccaaggttggtggacgggagagggcgagttcaatttttccgaagtcttttctccagttgaggatcatctagactgcggtgctggcaaagacagcttagaaaaacaagaagaaagcatcacagtgcagactatgatgaacaccttacgggacaaagccagcggagtgtgcatagactctgagtttttcctcaccacagccagtggagtgtctgtcctgccgcagaatagaagctctccgtgcattcactacttcactggaacccctgatccttccaggtccatattcaagcctttcatctttgttgatgacgtaaaacttgtccccaaaacacagtctccctgttttggggatgacgaccctgccaaaaaggagcctcggttccaggagaaaccagaccgccggcatgagctgtacaaagcccacgagtgggcacgtgccatcatcgaaagtgaccaggagcaaggtcgcaagctgaggagcaccatgctggagctggagaagcaaggcctggaagccatggaagaaatcctgaccagctccgagccactggaccctgcggaagtgggggaccttttctatgactgtgttgacacggagattaagttctttaagtgaagtaagcgttccctttccccttcttatttaagacttcccaccttactaaattaccagcaaaacaaaccactctcctgtttgagtaaaatgagaaagttaatatgtggcctccttttctgaagccagatcaaactgttaccttgtgttccaccttgaatctcacagcgtccccttctgcaatgtaggtctccttcctgtgcagtgtaacatgtatcccgttgcctgttgttcggttgtgtgactaattgtggattttaagctgctattattgtatttcagtggc

SEQ ID NO: 58472 - DNA, 1001 bp, Artificial Sequence
  derived and/or modified sequence
gacttggacgtgcgagtcaacaaggtacaggacacatttctctccggggaaatcttgtgtgggcgccgaggcccggacgtagcaaccaaacgtcgggaagaggcgccaaaaggatgctgggcctggctccttgaagcccgggttttcccttttgagagccacaaccaagaaataaaaatctagcaaagagggggccactttctgcggcgagatacgccctctcggccgctcctccagctcccaggccccctccctactcgacggatggctgcagctcctccaagttactgttttgttgccttccctccacgtgctaaggatggtctggtggtatttgggaaaaattcagcccggcccagagatgaagtgcaagaggttgtgtatttctcggctgctgatcacgaaccggagagcaaggttgagtgcacttacatttcaatcgaccaagttccaaggacctatgccataatgataagcagacccgcctggctctggggagcagaaatgggagccaatgaacatggagtgtgcatagccaatgaagccatcaacaccagagagccagctgccgagatagaagccttgctggggatggatctggtcaggcttggtttagaaagaggggaaacagctaaagaagccttagatgtcattgtctccttgttggaagaacatggacaaggtgggaattactttgaagatgcaaactcctgccacagcttccaaagtgcatatctgattgtggatcgtgatgaagcctgggtgctcgagaccatagggaagtactgggctgccgagaaagtcacagagggagtgaggtgcatttgcagtcagctttcgctcaccactaagatggatgcagagcatccggaactcaggagttacgctcagagccaaggttggtggacgggagagggcgagttcaatttttccgaagtcttttctccagttgaggatcatctagactgcggtgctggcaaagacagcttagaaaaacaaga

SEQ ID NO: 58473 - DNA, 5275 bp, Artificial Sequence
  derived and/or modified sequence
aaacgtcgggaagaggcgccaaaaggatgctgggcctggctccttgaagcccgggttttcccttttgagagccacaaccaagaaataaaaatctagcaaagagggggccactttctgcggcgagatacgccctctcggccgctcctccagctcccaggccccctccctactcgacggatggctgcagctcctccaagttactgttttgttgccttccctccacgtgctaaggatggtctggtggtatttgggaaaaattcagcccggcccagagatgaagtgcaagaggttgtgtatttctcggctgctgatcacgaaccggagagcaaggttgagtgcacttacatttcaatcgaccaagttccaaggacctatgccataatgataagcagacccgcctggctctggggagcagaaatgggagccaatgaacatggagtgtgcatagccaatgaagccatcaacaccagagagccagctgccgagatagaagccttgctggggatggatctggtcaggcttggtttagaaagaggggaaacagctaaagaagccttagatgtcattgtctccttgttggaagaacatggacaaggtgggaattactttgaagatgcaaactcctgccacagcttccaaagtgcatatctgattgtggatcgtgatgaagcctgggtgctcgagaccatagggaagtactgggctgccgagaaagtcacagagggagtgaggtgcatttgcagtcagctttcgctcaccactaagatggatgcagagcatccggaactcaggagttacgctcagagccaaggttggtggacgggagagggcgagttcaatttttccgaagtcttttctccagttgaggatcatctagactgcggtgctggcaaagacagcttagaaaaacaagaagaaagcatcacagtgcagactatgatgaacaccttacgggacaaagccagcggagtgtgcatagactctgagtttttcctcaccacagccagtggagtgtctgtcctgccgcagaatagaagctctccgtgcattcactacttcactggaacccctgatccttccaggtccatattcaagcctttcatctttgttgatgacgtaaaacttgtccccaaaacacagtctccctgttttggggatgacgaccctgccaaaaaggagcctcggttccaggagaaaccagaccgccggcatgagctgtacaaagcccacgagtgggcacgtgccatcatcgaaagtgaccaggagcaaggtcgcaagctgaggagcaccatgctggagctggagaagcaaggcctggaagccatggaagaaatcctgaccagctccgagccactggaccctgcggaagtgggggaccttttctatgactgtgttgacacggagattaagttctttaagtgaagtaagcgttccctttccccttcttatttaagacttcccaccttactaaattaccagcaaaacaaaccactctcctgtttgagtaaaatgagaaagttaatatgtggcctccttttctgaagccagatcaaactgttaccttgtgttccaccttgaatctcacagcgtccccttctgcaatgtaggtctccttcctgtgcagtgtaacatgtatcccgttgcctgttgttcggttgtgtgactaattgtggattttaagctgctattattgtatttcagtggcaatggacacattagccttttacaagaggactagagttcatcaagccttgaaaggcaggcttcacagtgccgagttggcgggaaaagcaaattcttttgaagtcttagtctttccctcagtagcggtttctttcaggttaacaagaggcatttgtgcacacacacagggctcttgtgtgtgttgtcaaggggaccctccgtggcctcccgtgagtgcatgcctgtagtgcacagtgtctctacaggtgtcttctggggggcagaaccaattggaaggaagaaagggacccctctccagtcctggctccttcctacatcctgggctcctgaagaagctgtcttcccattttccatgcgctgtgcttatgtgtggtggactgcagagctgcttccacttacaggagagctgataatttgttagctggaacctattcacttccgagattcagacatagccatgctggtggccttctgaatcactgcatggatgtcccaggaggcagctctccccacacagcagcacagccatcacaggattccttgtgtagaaatgattcccagtctagttaccaacagctagtctaggagtaattgaatggccctatggcacagttccacccacagagtagtgaatctctcagccaaggagggaaagaaaaggaagaactcttgactatttagattctagttaaatatctggaatcctagcagtcactacattatctcagcagagagactttaattaaactgatttgtttccaatgtcgggttcacttaaaggatttgacttaccaccagagcatagaaaagcatgcaaggaagaccagatgggcttagcattgggaagacagagggcaaggaggtgatagatggatatagaagcatttctctgcaggataccagttcaggccccaccattcctgccaaggccattacatcccacaaacccaaatacaaagcagctgacttccctggatcttccccccactcctcacacctcacatgtcccaggagctgccttcattcaggcgggtagctgcactgggcatggggtggtggtgggagcttaccgccacctattcaagctctcagctactcctgaaacgggcagagatgatgaacagaagtgtatgtaaatacagcagctagtgggagagcaccagttgggcctaatcctgcctcatcattcttggcaggaatctgcaaatggaaacattgtgagtatcagcaatctgggaagtgacagggttaataactccttcccagaagctgtatcatgagattttgaggggaccgagccctgttacatggatgtgaacagtgaggatcagaggttttatcagaacacattctttttttctaccaactctccagagcgtgagtataggagtgccatgagctttttagtcagcagttttgtaaactctgtatataaaatcattaaccacacattgtgggtgatgggaagacgatttcagctgacagagttaatggcaaccaataatggtggcctgtagctgctaagagcttcacgcaggtttggcctgggctttcactgttggtgaatttagagtgtccttttaggtggggcggctattctaaaagtgtctttctatcactgttaagggggggggaaagtgaggttcgaggatgacgtaggtaactctcccctcccaagtccatgttccaagtggctatgtaaagcaagatgatacagaaagctgctctaaaatctcactgagtgatttcaccttcgcctactatgaaatgtctcatcagacctgacatgtctgagataaccaaggtgattcaggatttgatcaaaagaagtctagtaagaattaattacacagaagcctcctttcatttctatgggccaaacaaaggccatggataaccctacccgctttatgtcattacccattgggaaacacaatggctacttctgttagggtacattgaccttggtcaagcatcttaaagaaggcaaccctaattgagagctgtcttggctaatactctgcaccacaattgtgatgtcctagtcctaccactagagggcatggtacagcctggcaaaagttaaaaggggtgtggcagctcccatcaggtctggaggtggtctataagcacagttgacagttgtgcattgggatgggtggagaaagacgacaagagagcagagaatctgctgatgtggctgcgcttacttttagtgactttatgtacttatattaacagctggaaataggttgttgggttttgagcaggctgttatagtgaggaatgttcatttttaaatgttcctaacagattttgcttttgaaaaatgcttgttacatgaataatttgtggaccagggattgcttttctgaaggcagtatagggaacatgaatattcaagatgaaatacaaaaattatgtttaagggtcatagtgtataagtagcttcctaggaaaccctttgtgtatcttttcagactggggtgggggctgagcatgcttgtgcagaaagaagccatagccagaaaggacagaatctctcccccactcccttgccccataaccaaacataagctagctagtcttgtctaatagatgggatttactataggtgaagatagccctcatattcaaggacagaagctctggcaggagtaaattagcaaagcagaaatagtaccctttcattcttggaggtgctttgaaattttaggtagaatataatcgaaattatggaggttccttagtgctcaataatataagacctggtgttattagaacgagtctttcttataaactaacagagcaggtatatgcctgttagaccttagctgtggggttcctttactattgggtgaatcattaggtataaaaaataatcatcaaccaggcaaattactttgcttcctagctgatgtcatcccacattggtacaggtgttattcagtactgggtggttcagcagggaagccgggtgggaccagtgtgtctgtcatgaaaccactaactgcattcctgactgaagagccatctgtcatttattggggaaggtcttcagttgagctctcagccttaggaaggaagcacgtggaggagggacggaggaggttcccttgctgggcatgcttcgtagagggccaggagcagcaggtcatgtgcacatgccgttgcagcacaagcttatgcttcccgtagccgtggcttttcattctgcacagtcccaggtcccagctcccctcttatggtttctgtcataatgtgctttatctgattgactccaaacatcccgaaatgtcacctgcagatttctcgtgggaaccaatatgtacatgtttgcaattatgctgtgagaatttaaatgtgttagatggaaaatgctattggcagggaataataataaaaaaaaaagaaaatcattctgtttcctgcagtgggaactggccatgtagtcttaacagtcttttgtacaaatatctacaaagcagataatatccctatccagtgcttgcccttggaattgtctctaaatgcatcaagcatacaataaaaaaaactgaaattaacatcc

SEQ ID NO: 58474 - DNA, 1305 bp, Artificial Sequence
  derived and/or modified sequence
atggtgcaggacggaacattcaaaactcgcgattcaacttggacttgtgaatctacccgcatggctgcagctccccctagttactgcttcgtagcctttcccccacgggctaaggatgggttggttgtgttcgggaaaaattccgcacgaccgcgagatgaggtgcaggaggtcgtgtacttcagtgctgccgatcacgagcccgagtccaaggtggaatgcacatacatttccatcgaccaggtgcccaggacatatgctatcatgatctcaagacctgcatggctgtggggagctgaaatgggagcaaatgagcatggagtttgcattgcaaacgaggccatcaatacccgagaaccagccgcagagatagaagccctgctgggtatggatcttgtacgcctgggtttggagagaggcgagactgctaaggaagccctggacgttatcgtatcactgttggaggagcacggacaaggcggaaactacttcgaggacgcaaattcctgtcattctttccagtccgcctacctgattgtcgatcgggacgaggcatgggtgttggagactattgggaagtactgggccgcagagaaggttaccgagggtgtccgatgcatttgctcccaacttagcctgaccaccaagatggacgccgagcacccagaactcagatcttacgcgcaatctcaggggtggtggacaggtgaaggcgaattcaactttagcgaagtattttcccccgtcgaggaccacctggactgcggagccggaaaagattctttagagaagcaagaagagagcatcaccgtccaaaccatgatgaacaccctgagggacaaagcctctggcgtgtgcatcgatagtgagttcttcctcacgactgcctcaggggttagtgtgctgccgcagaatcgctcctctccctgtattcactatttcactggtacgcccgacccttcaagatcaatcttcaaacctttcatctttgtcgacgacgttaaactggtgccaaagacacaaagcccttgctttggcgatgacgaccccgctaaaaaggaacctaggttccaggagaagcctgatagaaggcacgaactttataaagctcacgaatgggcacgggctatcatcgagtccgaccaagaacagggcaggaagctaaggagcaccatgctggaattggaaaagcagggcttggaggccatggaagaaattctgacatcttccgaaccactcgacccagccgaggttggggacctgttctacgattgtgtggataccgagatcaaattcttcaaatag

SEQ ID NO: 58475 - DNA, 1399 bp, Artificial Sequence
  derived and/or modified sequence
ctctaggccacaatgtccaagtacctgggacagggtctggcttaccaacatggtacaggacggcacttttaaaaccagggactcgacttggacgtgcgagtcaacaaggatggctgcagctcctccaagttactgttttgttgccttccctccacgtgctaaggatggtctggtggtatttgggaaaaattcagcccggcccagagatgaagtgcaagaggttgtgtatttctcggctgctgatcacgaaccggagagcaaggttgagtgcacttacatttcaatcgaccaagttccaaggacctatgccataatgataagcagacccgcctggctctggggagcagaaatgggagccaatgaacatggagtgtgcatagccaatgaagccatcaacaccagagagccagctgccgagatagaagccttgctggggatggatctggtcaggcttggtttagaaagaggggaaacagctaaagaagccttagatgtcattgtctccttgttggaagaacatggacaaggtgggaattactttgaagatgcaaactcctgccacagcttccaaagtgcatatctgattgtggatcgtgatgaagcctgggtgctcgagaccatagggaagtactgggctgccgagaaagtcacagagggagtgaggtgcatttgcagtcagctttcgctcaccactaagatggatgcagagcatccggaactcaggagttacgctcagagccaaggttggtggacgggagagggcgagttcaatttttccgaagtcttttctccagttgaggatcatctagactgcggtgctggcaaagacagcttagaaaaacaagaagaaagcatcacagtgcagactatgatgaacaccttacgggacaaagccagcggagtgtgcatagactctgagtttttcctcaccacagccagtggagtgtctgtcctgccgcagaatagaagctctccgtgcattcactacttcactggaacccctgatccttccaggtccatattcaagcctttcatctttgttgatgacgtaaaacttgtccccaaaacacagtctccctgttttggggatgacgaccctgccaaaaaggagcctcggttccaggagaaaccagaccgccggcatgagctgtacaaagcccacgagtgggcacgtgccatcatcgaaagtgaccaggagcaaggtcgcaagctgaggagcaccatgctggagctggagaagcaaggcctggaagccatggaagaaatcctgaccagctccgagccactggaccctgcggaagtgggggaccttttctatgactgtgttgacacggagattaagttctttaagtgaagtaagcgttccctttccccttcttatttaagacttcccacctta

SEQ ID NO: 58476 - DNA, 560 bp, Artificial Sequence
  derived and/or modified sequence
atattagataatggagaagcaaatggcaaggatggttaccttggctaccaagataaagaaccttgaaaagggaagaagatgaaatcagcttcggatatcaggcaggcagctgggtctgtgggtcagaggcttaaggatggctgcagctcctccaagttactgttttgttgccttccctccacgtgctaaggatggtctggtggtatttgggaaaaattcagcccggcccagagatgaagtgcaagaggttgtgtatttctcggctgctgatcacgaaccggagagcaaggttgagtgcacttacatttcaatcgaccaagttccaaggacctatgccataatgataagcagacccgcctggctctggggagcagaaatgggagccaatgaacatggagtgtgcatagccaatgaagccatcaacaccagagagccagctgccgagatagaagccttgctggggatggatctggtcaggcttggtttagaaagaggggaaacagctaaagaagccttagatgtcattgtctccttgttggaagaacatggacaaggtggga

SEQ ID NO: 58477 - protein, 240 aa, Artificial Sequence
  derived and/or modified sequence
MDLVRLGLERGETAKEALDVIVSLLEEHGQGGNYFEDANSCHSFQSAYLIVDRDEAWVLETIGKYWAAEKVTESITVQTMMNTLRDKASGVCIDSEFFLTTASGVSVLPQNRSSPCIHYFTGTPDPSRSIFKPFIFVDDVKLVPKTQSPCFGDDDPAKKEPRFQEKPDRRHELYKAHEWARAIIESDQEQGRKLRSTMLELEKQGLEAMEEILTSSEPLDPAEVGDLFYDCVDTEIKFFK

SEQ ID NO: 58478 - protein, 218 aa, Artificial Sequence
  derived and/or modified sequence
MDAEHPELRSYAQSQGWWTGEGEFNFSEVFSPVEDHLDCGAGKDSLEKQEESITVQTMMNTLRDKASGVCIDSEFFLTTASGVSVLPQNRSSPCIHYFTGTPDPSRSIFKPFIFVDDVKLVPKTQSPCFGDDDPAKKEPRFQEKPDRRHELYKAHEWARAIIESDQEQGRKLRSTMLELEKQGLEAMEEILTSSEPLDPAEVGDLFYDCVDTEIKFFK

SEQ ID NO: 58479 - DNA, 723 bp, Artificial Sequence
  derived and/or modified sequence
atggacctggtgagactgggcctggagagaggcgagaccgccaaggaggccctggacgtgatcgtgagcctgctggaggagcacggccagggcggcaactacttcgaggacgccaacagctgccacagcttccagagcgcctacctgatcgtggacagagacgaggcctgggtgctggagaccatcggcaagtactgggccgccgagaaggtgaccgagagcatcaccgtgcagaccatgatgaacaccctgagagacaaggccagcggcgtgtgcatcgacagcgagttcttcctgaccaccgccagcggcgtgagcgtgctgccccagaacagaagcagcccctgcatccactacttcaccggcacccccgaccccagcagaagcatcttcaagcccttcatcttcgtggacgacgtgaagctggtgcccaagacccagagcccctgcttcggcgacgacgaccccgccaagaaggagcccagattccaggagaagcccgacagaagacacgagctgtacaaggcccacgagtgggccagagccatcatcgagagcgaccaggagcagggcagaaagctgagaagcaccatgctggagctggagaagcagggcctggaggccatggaggagatcctgaccagcagcgagcccctggaccccgccgaggtgggcgacctgttctacgactgcgtggacaccgagatcaagttcttcaagtag

SEQ ID NO: 58480 - DNA, 1041 bp, Artificial Sequence
  derived and/or modified sequence
atgatcagcagacccgcctggctgtggggcgccgagatgggcgccaacgagcacggcgtgtgcatcgccaacgaggccatcaacaccagagagcccgccgccgagatcgaggccctgctgggcatggacctggtgagactgggcctggagagaggcgagaccgccaaggaggccctggacgtgatcgtgagcctgctggaggagcacggccagggcggcaactacttcgaggacgccaacagctgccacagcttccagagcgcctacctgatcgtggacagagacgaggcctgggtgctggagaccatcggcaagtactgggccgccgagaaggtgaccgagggcgtgagatgcatctgcagccagctgagcctgaccaccaagatggacgccgagcaccccgagctgagaagctacgcccagagccagggctggtggaccggcgagggcgagttcaacttcagcgaggtgttcagccccgtggaggaccacctggactgcggcgccggcaaggacagcctggagaagcaggaggagagcatcaccgtgcagaccatgatgaacaccctgagagacaaggccagcggcgtgtgcatcgacagcgagttcttcctgaccaccgccagcggcgtgagcgtgctgccccagaacagaagcagcccctgcatccactacttcaccggcacccccgaccccagcagaagcatcttcaagcccttcatcttcgtggacgacgtgaagctggtgcccaagacccagagcccctgcttcggcgacgacgaccccgccaagaaggagcccagattccaggagaagcccgacagaagacacgagctgtacaaggcccacgagtgggccagagccatcatcgagagcgaccaggagcagggcagaaagctgagaagcaccatgctggagctggagaagcagggcctggaggccatggaggagatcctgaccagcagcgagcccctggaccccgccgaggtgggcgacctgttctacgactgcgtggacaccgagatcaagttcttcaagtag

SEQ ID NO: 58481 - DNA, 657 bp, Artificial Sequence
  derived and/or modified sequence
atggacgccgagcaccccgagctgagaagctacgcccagagccagggctggtggaccggcgagggcgagttcaacttcagcgaggtgttcagccccgtggaggaccacctggactgcggcgccggcaaggacagcctggagaagcaggaggagagcatcaccgtgcagaccatgatgaacaccctgagagacaaggccagcggcgtgtgcatcgacagcgagttcttcctgaccaccgccagcggcgtgagcgtgctgccccagaacagaagcagcccctgcatccactacttcaccggcacccccgaccccagcagaagcatcttcaagcccttcatcttcgtggacgacgtgaagctggtgcccaagacccagagcccctgcttcggcgacgacgaccccgccaagaaggagcccagattccaggagaagcccgacagaagacacgagctgtacaaggcccacgagtgggccagagccatcatcgagagcgaccaggagcagggcagaaagctgagaagcaccatgctggagctggagaagcagggcctggaggccatggaggagatcctgaccagcagcgagcccctggaccccgccgaggtgggcgacctgttctacgactgcgtggacaccgagatcaagttcttcaagtag

SEQ ID NO: 58482 - DNA, 723 bp, Artificial Sequence
  derived and/or modified sequence
atggatttagtgaggctggggctggagcgtggtgaaactgctaaggaagccctcgatgtgatcgtgtccctcctggaagagcatggccagggaggtaattatttcgaagatgctaactcttgccactcttttcagtctgcctacctgattgtggaccgcgacgaggcttgggtgcttgagactatcggaaagtattgggccgccgagaaagtgaccgagtcaatcactgtgcagactatgatgaatacactgcgggacaaggcttctggggtttgtatcgacagcgagttttttttaactacggcttccggtgtttctgtgctaccacagaaccgatcttccccttgcatacactattttactggcacacccgacccgtcccgttctatctttaagccctttattttcgtggatgatgttaaacttgtgcccaaaacgcagagcccttgctttggggatgatgatcccgccaagaaggagccaagatttcaggaaaagcccgatagacggcacgaattgtataaagctcacgagtgggcccgtgctattatagaatccgatcaggagcagggcaggaagcttcgatctacaatgcttgaactagaaaagcaggggttagaggcaatggaagaaattctgacttcgtctgaacccctagatccagccgaggtgggggatttattttatgactgcgtagataccgagatcaaattcttcaagtag

SEQ ID NO: 58483 - DNA, 1041 bp, Artificial Sequence
  derived and/or modified sequence
atgatctctaggcctgcctggttgtggggcgcagagatgggagccaacgagcacggtgtgtgcattgcaaatgaggcaatcaacacaagagaacccgccgcagagattgaagccctgttggggatggatctagtcaggctgggactggaaagaggagagacagcgaaggaagctctggacgttatcgtctcactgctggaggagcatggccaaggcggtaactatttcgaagacgccaactcatgtcatagttttcagtcggcctatcttatagtcgatagagacgaggcctgggtactggagactatcggaaagtattgggccgccgagaaggtgactgagggcgttcggtgtatatgtagtcagctgagcctgactacaaagatggatgcggaacaccccgagctaagaagctacgctcaatcccagggatggtggaccggggaaggagaattcaatttctctgaggtgttcagccctgtggaagatcatctggattgcggcgctggcaaggatagtctggaaaagcaagaggagtcgataactgtgcagacaatgatgaatactctcagagacaaagcgtcaggcgtatgtattgactctgaattctttctgaccacagccagcggagtgtccgtgctccctcaaaatagaagttcaccatgtattcattactttactggaacacccgacccctcaagatccatctttaaacccttcatcttcgtcgatgacgtcaaactagtgcccaagacacagagcccttgttttggcgatgatgatccagctaaaaaggagcctaggtttcaggagaagccggaccggcgacatgagctgtacaaagcacatgagtgggcccgagccataatcgaatccgaccaggagcagggcagaaaactgagaagtaccatgttggagttggaaaaacaaggcctcgaagctatggaggagatcttgacgtccagcgaacctctagaccccgcagaggtcggcgatctgttttatgactgcgttgacacggaaattaaattctttaaatag

SEQ ID NO: 58484 - DNA, 657 bp, Artificial Sequence
  derived and/or modified sequence
atggatgccgaacatccagaacttcgctcctatgcacagagtcagggatggtggaccggcgagggcgaatttaactttagcgaagtgttcagtcccgtggaagatcacttggattgtggtgccggcaaagactctttggagaagcaggaggagtccatcaccgtgcaaacgatgatgaatactttaagggacaaagctagtggggtatgtatcgactccgaattcttccttactactgcctctggagtctctgtgcttccacagaacagatcgagcccatgcatccattacttcaccgggactccggacccctcccgatctatcttcaagccttttatctttgtcgacgacgtcaagctggtccccaagacacagtccccatgcttcggggatgacgaccctgccaaaaaggagccaaggtttcaggaaaaacctgatcggaggcatgagctctataaagcccacgagtgggctagggcgattattgagtctgaccaggagcaaggacgcaaacttagatctacaatgctagaattggaaaagcagggcctggaggccatggaggaaatcctgacgtcctcagagcctctcgatcctgctgaggtaggagacttattctacgactgtgtggacaccgagattaagttctttaagtag

SEQ ID NO: 58485 - DNA, 723 bp, Artificial Sequence
  derived and/or modified sequence
atggacctggtgcggctgggcctggagcggggggagacagccaaggaggccctggatgtgattgtgtccctgctggaggagcacggccagggcggcaactactttgaagatgccaacagctgccacagcttccagagcgcctacctgattgtggacagagatgaggcctgggtgctggagaccatcggcaagtactgggccgctgagaaggtgacagagagcatcaccgtgcagaccatgatgaacaccctgcgggacaaggccagcggcgtgtgcattgattctgagttcttcctgaccacagccagcggcgtgtctgtgctgccccagaacagaagcagcccctgcatccactacttcaccggcaccccagaccccagccgcagcatcttcaagcccttcatctttgtggatgatgtgaagctggtgcccaagacccagagcccctgctttggagatgatgatcctgccaagaaggagccccgcttccaggagaagccagacagaagacatgagctgtacaaggcccacgagtgggcccgggccatcatcgagagtgaccaggagcagggcaggaagctgcggagcaccatgctggagctggagaagcagggcctggaggccatggaggagatcctgaccagcagcgagcccctggaccctgctgaggtgggggacctcttctatgactgtgtggacacagagatcaagttcttcaagtag

SEQ ID NO: 58486 - DNA, 1041 bp, Artificial Sequence
  derived and/or modified sequence
atgatcagcaggcctgcctggctgtggggcgctgagatgggcgccaatgagcacggcgtgtgcatcgccaatgaggccatcaacacccgggagcctgctgctgagattgaggccctgctgggcatggacctggtgcggctgggcctggagcggggggagacagccaaggaggccctggatgtgattgtgtccctgctggaggagcacggccagggcggcaactactttgaagatgccaacagctgccacagcttccagagcgcctacctgattgtggacagagatgaggcctgggtgctggagaccatcggcaagtactgggccgctgagaaggtgacagaaggagtgcgctgcatctgcagccagctgagcctgaccaccaagatggatgctgagcaccctgagctgcggagctatgcccagagccagggctggtggacaggagagggggagttcaacttcagcgaggtgttcagccctgtggaggaccacctggactgtggggccggcaaggacagcctggagaagcaggaggagagcatcaccgtgcagaccatgatgaacaccctgcgggacaaggccagcggcgtgtgcattgattctgagttcttcctgaccacagccagcggcgtgtctgtgctgccccagaacagaagcagcccctgcatccactacttcaccggcaccccagaccccagccgcagcatcttcaagcccttcatctttgtggatgatgtgaagctggtgcccaagacccagagcccctgctttggagatgatgatcctgccaagaaggagccccgcttccaggagaagccagacagaagacatgagctgtacaaggcccacgagtgggcccgggccatcatcgagagtgaccaggagcagggcaggaagctgcggagcaccatgctggagctggagaagcagggcctggaggccatggaggagatcctgaccagcagcgagcccctggaccctgctgaggtgggggacctcttctatgactgtgtggacacagagatcaagttcttcaagtag

SEQ ID NO: 58487 - DNA, 657 bp, Artificial Sequence
  derived and/or modified sequence
atggatgctgagcaccctgagctgcggagctatgcccagagccagggctggtggacaggagagggggagttcaacttcagcgaggtgttcagccctgtggaggaccacctggactgtggggccggcaaggacagcctggagaagcaggaggagagcatcaccgtgcagaccatgatgaacaccctgcgggacaaggccagcggcgtgtgcattgattctgagttcttcctgaccacagccagcggcgtgtctgtgctgccccagaacagaagcagcccctgcatccactacttcaccggcaccccagaccccagccgcagcatcttcaagcccttcatctttgtggatgatgtgaagctggtgcccaagacccagagcccctgctttggagatgatgatcctgccaagaaggagccccgcttccaggagaagccagacagaagacatgagctgtacaaggcccacgagtgggcccgggccatcatcgagagtgaccaggagcagggcaggaagctgcggagcaccatgctggagctggagaagcagggcctggaggccatggaggagatcctgaccagcagcgagcccctggaccctgctgaggtgggggacctcttctatgactgtgtggacacagagatcaagttcttcaagtag

SEQ ID NO: 58488 - DNA, 723 bp, Artificial Sequence
  derived and/or modified sequence
atggacctggtgcggctgggcctggagcggggcgagaccgccaaggaggccttagatgttattgtcagcctgttggaagaacacggccagggcggtaattactttgaggatgccaatagttgccatagcttccagtccgcctacctaattgtggaccgagacgaggcctgggtgctcgagaccattggcaagtattgggcggcagaaaaagtcactgaaagtataactgtccagaccatgatgaataccctccgagataaggctagcggggtttgtattgattccgagttctttctgactaccgccagtggtgttagcgtactgcctcagaaccgctcatccccttgcatccactactttacaggaacacccgatccatcaaggtctatattcaagccctttatcttcgtagacgatgtgaagctggtcccaaaaacccagagcccctgcttcggggatgatgaccctgctaagaaagagcctaggttccaggagaagccagaccggcgacacgagttatacaaagctcatgagtgggcccgggctatcatagagtctgaccaggaacaggggagaaaactgcggagcactatgttggagctcgagaagcagggcttggaagccatggaggaaatcctcacttcttcagagcccctggacccggccgaggtaggtgatttgttctatgactgtgtggataccgaaatcaaattcttcaagtag

SEQ ID NO: 58489 - DNA, 1041 bp, Artificial Sequence
  derived and/or modified sequence
atgatcagccggcccgcctggctgtggggcgccgagatgggcgccaacgaacatggcgtgtgcatagccaacgaagcaatcaataccagggagcctgccgccgaaatcgaagcccttctgggcatggatctagtccgcttgggactagaacgtggagagacagcaaaagaagcccttgacgtcatcgtctccttactggaagagcacgggcagggtggcaattatttcgaagatgccaactcttgtcacagtttccagtctgcatatttaatcgtggatcgtgatgaagcgtgggttctggaaacaatcggcaagtactgggccgcagagaaagtaacagagggtgtgcgatgtatctgctcccagctgtctctcacaactaaaatggatgccgagcaccctgagctgcggtcttacgcccagtcgcaggggtggtggaccggcgaaggagaatttaacttctccgaagtatttagccctgtcgaggaccatctggattgtggtgccggcaaagattccctggaaaagcaggaagaaagcatcactgtgcagactatgatgaacacgcttcgggacaaagcttctggggtgtgcattgactcagagttttttcttactaccgctagtggcgtgagtgtgctgcctcagaacaggtcttcgccctgcatccattacttcacgggcacccctgacccttcaagatcgatctttaagccctttatctttgttgacgatgtgaaactggtacctaaaactcagtctccatgcttcggagatgacgatccggccaagaaggagccacggtttcaagaaaagcccgaccgaaggcatgaattatacaaagcccatgaatgggcacgggctatcattgaatccgaccaggaacagggacgtaaactgcggtcaaccatgcttgagctcgagaagcaagggctggaggccatggaagagatcctaactagttccgaaccactcgatcctgcagaggttggggacctcttttacgattgcgtagatactgagattaaattctttaagtag

SEQ ID NO: 58490 - DNA, 657 bp, Artificial Sequence
  derived and/or modified sequence
atggacgccgagcaccccgagctgcggagctacgcccagagccaggggtggtggacaggagagggagagttcaatttctctgaggtgttttcccccgttgaggatcacttagactgcggagcaggaaaagacagcttggagaagcaagaagagtcaattactgtgcagacaatgatgaacaccctgagggacaaagcttccggagtttgcatagatagcgagtttttcctcactactgcaagtggcgtgagcgtgctgccccagaataggtccagtccatgcatacactattttaccggcacacctgaccctagcaggtccatttttaagccttttatcttcgtcgacgatgtgaagctcgtacctaagactcaatccccgtgtttcggtgacgatgaccctgccaagaaagaaccacgctttcaggaaaagcctgatcgtcggcacgagctgtacaaggcccacgagtgggctagagcaattatagagtcggaccaggagcaaggtcggaaactcagaagcacgatgttagaactcgagaagcaaggtcttgaggccatggaagagatactcacaagtagcgagccacttgaccctgctgaggtaggggatttattttacgactgcgtggacaccgagattaagttctttaagtag

SEQ ID NO: 58491 - DNA, 941 bp, Artificial Sequence
  derived and/or modified sequence
aagccatcaacaccagagagccagctgccgagatagaagccttgctggggatggatctggtcaggcttggtttagaaagaggggaaacagctaaagaagccttagatgtcattgtctccttgttggaagaacatggacaaggtgggaattactttgaagatgcaaactcctgccacagcttccaaagtgcatatctgattgtggatcgtgatgaagcctgggtgctcgagaccatagggaagtactgggctgccgagaaagtcacagaaagcatcacagtgcagactatgatgaacaccttacgggacaaagccagcggagtgtgcatagactctgagtttttcctcaccacagccagtggagtgtctgtcctgccgcagaatagaagctctccgtgcattcactacttcactggaacccctgatccttccaggtccatattcaagcctttcatctttgttgatgacgtaaaacttgtccccaaaacacagtctccctgttttggggatgacgaccctgccaaaaaggagcctcggttccaggagaaaccagaccgccggcatgagctgtacaaagcccacgagtgggcacgtgccatcatcgaaagtgaccaggagcaaggtcgcaagctgaggagcaccatgctggagctggagaagcaaggcctggaagccatggaagaaatcctgaccagctccgagccactggaccctgcggaagtgggggaccttttctatgactgtgttgacacggagattaagttctttaagtgaagtaagcgttccctttccccttcttatttaagacttcccaccttactaaattaccagcaaaacaaaccactctcctgtttgagtaaaatgagaaagttaatatgtggcctccttttctgaagccagatcaaactgttaccttgtgttccaccttgaatctcacagcgt

SEQ ID NO: 58492 - DNA, 723 bp, Artificial Sequence
  derived and/or modified sequence
atggacttggtacgtctgggcttggagagaggagagaccgctaaggaggcactcgatgtgatcgtgtcactcttggaggaacacggccaagggggaaattatttcgaggacgcaaattcctgccattctttccagagtgcataccttatagtggaccgtgacgaagcatgggtcctagagactatcgggaaatactgggctgctgagaaggtgaccgagtccatcactgtccagacaatgatgaacactctaagagacaaggcctccggtgtgtgcatcgactcggaattctttctgaccaccgccagcggagtgtcagtgcttccccagaaccgcagtagcccctgtatccactactttactggcacccccgatccatctcggtccatcttcaaaccttttatcttcgtggacgatgtgaaattagtacccaagactcagagcccctgtttcggggacgatgacccggctaagaaggagccacggtttcaggaaaaacctgatcgacggcatgaactgtataaggcacacgagtgggctcgggctatcatcgaaagcgaccaggaacaggggagaaaactgaggagtactatgctggaacttgagaagcagggcctggaagctatggaggagattctaactagtagtgagcccctggacccagctgaagtcggagacctgttttatgactgcgttgacaccgaaattaagttctttaagtag

SEQ ID NO: 58493 - DNA, 1041 bp, Artificial Sequence
  derived and/or modified sequence
atgatctctcgaccggcatggctgtggggggctgagatgggggcaaacgagcacggagtgtgcattgcaaatgaggccatcaacacaagggaaccagcagcagaaattgaggccctcctggggatggaccttgtgaggctgggattagaacgtggtgagacagctaaagaggccttggacgtgatcgtctccctcctagaggaacatggccagggagggaattacttcgaggatgcgaatagctgtcattcgttccaatctgcgtacctgattgtggacagggacgaggcctgggtactggaaaccatcggtaagtactgggccgctgaaaaggtgacggaaggtgtcagatgcatctgcagccaactgtctctgacgaccaaaatggacgccgaacacccagagctccggtcctacgctcagagccagggctggtggaccggagagggcgagtttaactttagcgaggtgttttccccagtcgaagaccacttagattgcggagccggaaaggactctcttgagaagcaggaagagtcgatcactgtgcagactatgatgaatactttgcgggacaaggcatcgggggtgtgtattgatagtgagttttttctaacgactgccagtggtgtgagtgtgctgccccagaacagaagttccccgtgcattcactatttcactggaacccctgatccctcgcgcagcatctttaagccatttattttcgtggacgatgtcaagctcgtgcccaaaacgcagagtccatgtttcggcgatgatgatcccgcaaaaaaggagcctcgctttcaggagaaaccagacagacggcatgagctgtataaggctcacgagtgggctcgcgctatcatcgaatctgatcaagaacagggcaggaaactgcgctccactatgttggagctggaaaaacagggcctcgaggctatggaggaaattttgacgtccagtgaaccactcgaccctgcggaagttggcgatctcttttatgattgcgtagacacggagattaaattttttaaatag

SEQ ID NO: 58494 - DNA, 657 bp, Artificial Sequence
  derived and/or modified sequence
atggacgcagagcaccccgaactgaggtcatacgcccagtcacagggatggtggactggcgagggggagttcaattttagcgaggtgttctcccccgtcgaagaccatctggactgtggcgctggcaaagacagcctggaaaagcaggaggagagtatcactgtgcagactatgatgaacacactgagagataaagcatccggcgtgtgcattgatagtgaattcttccttacaaccgcatccggtgttagtgtgctgcctcagaaccgaagctccccttgtattcattacttcacaggaacgccagatccttcaagatccatttttaaaccctttatctttgtggacgacgttaagttggtcccgaaaactcaaagcccctgctttggagacgatgatccagcgaaaaaagagcctcggtttcaagagaaaccagaccgtcgccacgagctgtacaaggcccatgagtgggccagggccataatagaaagcgatcaggagcaaggaagaaaattacgaagcaccatgcttgaactggagaagcagggtcttgaagcaatggaagagatcctgacttcgagcgaaccgctcgaccctgccgaggtgggcgacctattctacgactgtgtggacactgagattaagttcttcaagtag

SEQ ID NO: 58495 - DNA, 1093 bp, Artificial Sequence
  derived and/or modified sequence
aatggagaagcaaatggcaaggatggttaccttggctaccaagataaagaaccttgaaaagggaagaagatgaaatcagcttcggatatcaggcaggcagctgggtctgtgggtcagaggcttaaggatggatgcagagcatccggaactcaggagttacgctcagagccaaggttggtggacgggagagggcgagttcaatttttccgaagtcttttctccagttgaggatcatctagactgcggtgctggcaaagacagcttagaaaaacaagaagaaagcatcacagtgcagactatgatgaacaccttacgggacaaagccagcggagtgtgcatagactctgagtttttcctcaccacagccagtggagtgtctgtcctgccgcagaatagaagctctccgtgcattcactacttcactggaacccctgatccttccaggtccatattcaagcctttcatctttgttgatgacgtaaaacttgtccccaaaacacagtctccctgttttggggatgacgaccctgccaaaaaggagcctcggttccaggagaaaccagaccgccggcatgagctgtacaaagcccacgagtgggcacgtgccatcatcgaaagtgaccaggagcaaggtcgcaagctgaggagcaccatgctggagctggagaagcaaggcctggaagccatggaagaaatcctgaccagctccgagccactggaccctgcggaagtgggggaccttttctatgactgtgttgacacggagattaagttctttaagtgaagtaagcgttccctttccccttcttatttaagacttcccaccttactaaattaccagcaaaacaaaccactctcctgtttgagtaaaatgagaaagttaatatgtggcctccttttctgaagccagatcaaactgttaccttgtgttccaccttgaatctcacagcgtccccttctgcaatgtaggtctccttcctgtgcagtgtaacatgtatcccgttgcctgttgttcggttgtgtgactaattgtggattttaagctgctattattgtatttcagtggcaatggacacattagccttttacaaga

SEQ ID NO: 58496 - protein, 980 aa, Artificial Sequence
  derived and/or modified sequence
MKSLKAKFRKSDTNEWNKNDDRLLQAVENGDAEKVASLLGKKGASATKHDSEGKTAFHLAAAKGHVECLRVMITHGVDVTAQDTTGHSALHLAAKNSHHECIRKLLQSKCPAESVDSSGKTALHYAAAQGCLQAVQILCEHKSPINLKDLDGNIPLLLAVQNGHSEICHFLLDHGADVNSRNKSGRTALMLACEIGSSNAVEALIKKGADLNLVDSLGYNALHYSKLSENAGIQSLLLSKISQDADLKTPTKPKQHDQVSKISSERSGTPKKRKAPPPPISPTQLSDVSSPRSITSTPLSGKESVFFAEPPFKAEISSIRENKDRLSDSTTGADSLLDISSEADQQDLLSLLQAKVASLTLHNKELQDKLQAKSPKEAEADLSFDSYHSTQTDLGPSLGKPGETSPPDSKSSPSVLIHSLGKSTTDNDVRIQQLQEILQDLQKRLESSEAERKQLQVELQSRRAELVCLNNTEISENSSDLSQKLKETQSKYEEAMKEVLSVQKQMKLGLVSPESMDNYSHFHELRVTEEEINVLKQDLQNALEESERNKEKVRELEEKLVEREKGTVIKPPVEEYEEMKSSYCSVIENMNKEKAFLFEKYQEAQEEIMKLKDTLKSQMTQEASDEAEDMKEAMNRMIDELNKQVSELSQLYKEAQAELEDYRKRKSLEDVTAEYIHKAEHEKLMQLTNVSRAKAEDALSEMKSQYSKVLNELTQLKQLVDAQKENSVSITEHLQVITTLRTAAKEMEEKISNLKEHLASKEVEVAKLEKQLLEEKAAMTDAMVPRSSYEKLQSSLESEVSVLASKLKESVKEKEKVHSEVVQIRSEVSQVKREKENIQTLLKSKEQEVNELLQKFQQAQEELAEMKRYAESSSKLEEDKDKKINEMSKEVTKLKEALNSLSQLSYSTSSSKRQSQQLEALQQQVKQLQNQLAECKKQHQEVISVYRMHLLYAVQGQMDEDVQKVLKQILTMCKNQSQKK

SEQ ID NO: 58497 - protein, 125 aa, Artificial Sequence
  derived and/or modified sequence
MKSLKAKFRKSDTNEWNKNDDRLLQAVENGDAEKVASLLGKKGASATKHDSEGKTAFHLAAAKGHVECLRVMITHGVDVTAQDTTGHSALHLAAKNSHHECIRKLLQSKCPAESVDSSGKTALHY

SEQ ID NO: 58498 - protein, 104 aa, Artificial Sequence
  derived and/or modified sequence
MKSLKAKFRKSDTNEWNKNDDRLLQAVENGDAEKVASLLGKKGASATKHDSEGKTAFHLAAAKGHVECLRVMITHGVDVTAQDTTGHSALHLAAKNSHHECIRK

SEQ ID NO: 58499 - DNA, 2943 bp, Artificial Sequence
  derived and/or modified sequence
atgaaaagtctcaaagctaagtttaggaagagtgataccaatgaatggaataagaacgacgaccgtctgctccaggctgtggaaaacggagacgccgagaaggtggcctccctgcttggtaagaagggggcttccgccacaaagcacgatagcgagggcaagacggcgttccatttagccgccgccaagggccatgtggagtgcctgcgcgtaatgattacgcatggcgtcgatgtgactgctcaggacacaaccgggcacagcgcgctacatttggccgccaaaaacagccatcacgaatgtatcagaaagctgctgcagtccaaatgccccgctgagtccgttgacagctctgggaaaactgctctccattatgcagcggcccagggatgcctacaggccgtgcagatcctgtgtgagcataagtcccccattaaccttaaagacctcgacgggaacatccctctgctgctggccgtgcagaacggccacagcgagatatgccactttctcctggaccacggagcagacgtaaactctcgcaacaagtccggaaggacagcacttatgctggcctgtgaaatcgggagctccaatgccgtggaggcccttatcaaaaaaggggctgatctgaacctagtggactcgctggggtacaatgctctccactatagtaagctgagtgaaaatgctggtatccagagcctgttgctgtctaaaatatcgcaggatgctgacctgaagactcctacaaagcctaaacaacacgatcaggtgtcgaagatctcttccgaacgtagtggcacacctaaaaagaggaaggcccctcctccccccatcagcccaactcagctcagcgatgtaagttctccaagatctataacatccactcccctgagcggaaaagaaagcgtgtttttcgccgagccacctttcaaggccgagatcagctctatcagagagaataaggacagactgtccgatagcactacaggtgccgactcgctgcttgatatcagttcagaggccgaccagcaagacctgttgtcactgctccaggccaaggtcgctagcttgactttgcataacaaagagctgcaggacaagttgcaagccaaatctcccaaggaagcagaagccgacctttccttcgactcttatcattccactcaaacagacctcggaccatcgcttggcaagccgggagagacaagcccgcccgatagcaagtctagcccatctgtgctgattcacagtctcggcaagtccaccacagacaacgatgtcaggatccagcagcttcaggagatcctgcaggatcttcagaaaaggttagagagttcagaggctgagcgtaagcaactgcaggtggaactgcagagcaggagagccgaattagtgtgtctaaataatacagagataagcgagaactcatccgatctgagccaaaaactgaaagagactcagagcaaatacgaggaggctatgaaggaagttctgtctgttcaaaaacagatgaagctcggtctggtgagtcctgagtcgatggataattacagccattttcatgaactacgagtgactgaagaagaaataaatgtgcttaagcaggatcttcagaacgcactggaagagtccgagcgtaataaagagaaagttagggagctggaggagaaactcgtggaacgcgaaaagggaacagtcataaaacctccagtcgaggagtatgaagagatgaagtcttcttactgttccgtgattgaaaatatgaacaaggaaaaggcattcctctttgagaaatatcaggaagcgcaggaggaaattatgaaactgaaagataccctcaaatcccagatgacacaagaagccagcgatgaagcggaggatatgaaggaagccatgaaccggatgatagacgagctgaacaaacaggtatccgagttgagccagctttacaaggaggcacaggccgagctggaggattacagaaagcggaaaagccttgaagatgtgaccgccgagtacatacataaggctgagcacgaaaaactgatgcaactcaccaatgtgtctagagctaaagcagaagatgctctctcagaaatgaagtctcagtatagcaaagtgcttaacgagctgacgcaactcaaacagctcgtggatgcacaaaaggaaaattccgtgagcatcaccgagcatctccaggtgatcacgaccctccgcacagctgccaaagaaatggaagagaaaatatccaacctgaaggagcatctggcatccaaggaggtggaggtggctaaactcgagaagcagctgctggaggaaaaagcagccatgactgacgcgatggtcccacgctcttcctatgagaaactgcagagcagtctggagtcagaggttagtgtgcttgcctccaagctcaaggagtctgtcaaggaaaaggaaaaagttcatagcgaggtggtccagatccggtcagaagtctcccaggtgaaacgagagaaggaaaatattcagactctgctcaaatcaaaggaacaagaagtgaacgaactgcttcagaagttccagcaggcgcaggaagaactagccgagatgaagcgatatgccgaaagcagcagcaaactggaggaggacaaagataaaaaaatcaacgagatgtccaaagaagtgaccaagctgaaggaagcactcaattcactgtctcaactatcttacagcacttcctccagcaagcgccagagccagcagttggaagccctgcagcagcaggtcaaacagctccagaaccagctcgccgagtgtaaaaagcagcatcaagaagtgatatccgtttaccgaatgcacctgctctacgctgtccaaggacagatggacgaagatgtgcagaaagttctcaaacagatcctgacaatgtgtaagaatcagagccaaaagaaatag

SEQ ID NO: 58500 - DNA, 2943 bp, Artificial Sequence
  derived and/or modified sequence
atgaaaagtttgaaggccaaatttaggaaaagtgatacgaacgagtggaataaaaacgatgaccgccttctgcaggctgttgagaacggcgacgccgaaaaggtggcctcccttttgggcaaaaaaggtgcgtctgccaccaaacatgacagcgaggggaaaaccgcattccacttggccgccgctaaaggccacgtcgagtgccttagagttatgataactcacggtgtggacgtgacagcacaggatacgaccgggcattctgcactgcacctggccgccaagaactcgcatcacgaatgtatccggaagcttcttcagtccaagtgtcccgcagagagtgttgactccagcggtaagacggccttgcactatgcagccgcacagggctgtctccaggctgtgcagatcctctgtgaacataagtcccccataaatttgaaggacctcgacggaaatatacctttgttgttagctgtccagaatgggcactctgaaatctgccattttctactggatcacggcgcagatgtgaactcccgtaacaaatccggaagaacagccctgatgctagcctgcgagataggctcaagtaatgccgtcgaagcccttatcaaaaaaggagccgaccttaacctagtagactctctcgggtacaatgcccttcattactctaagttaagcgagaatgctggtatccagtcacttctgctgtcaaaaatctcccaagacgcagatctgaaaacaccaaccaagcctaagcagcacgaccaggtttccaagataagctctgagcgatccggcactcccaagaaaaggaaggccccgccacccccaattagtcccacacagctgagtgacgtcagctcaccgcggtcgataacgagcacacctctcagcggaaaagagtctgtgttcttcgccgagcccccgttcaaggccgaaatatccagtatccgggagaataaggaccggctgagcgactcaactacaggggcggattctctcctcgacataagctccgaggctgatcaacaggacctgttgtcacttctccaggccaaagtcgctagtttgactcttcacaataaagagctgcaggacaagttgcaggccaagagccctaaggaagcggaggctgatttatcgtttgacagctatcacagtactcagacggaccttggcccatccttagggaagcctggagagaccagcccccccgactctaagtcgtccccctccgtcctgatacactccctgggtaaatctacgactgacaatgatgtccgtattcagcagctgcaggagattctgcaagacctccaaaaacgtctggaaagcagcgaagctgagaggaagcaattgcaggttgaactgcagtcaaggcgtgccgagcttgtgtgcttaaataataccgagatatccgaaaatagcagtgacctgtcccagaagctgaaagagacccagagcaaatatgaggaagcaatgaaggaggtcttgagtgtccagaagcagatgaagctcggacttgtctcaccggaatccatggacaactactcacacttccatgaactacgcgtgaccgaggaggagatcaatgtcctcaagcaggacctgcagaatgccctagaagaatccgaacgcaacaaagagaaggtaagagaactggaagaaaagctcgtggagcgggagaagggaactgtcattaaaccccccgtggaggagtacgaggagatgaaatcttcgtactgcagtgtgatcgaaaatatgaataaggaaaaggctttcttatttgagaagtaccaagaggcccaggaagagataatgaaactgaaggatacgctgaaatcacagatgacccaggaagcctctgatgaagctgaggatatgaaggaagctatgaatcgcatgattgatgagctgaataaacaagtgtctgagctcagccaactgtacaaagaagctcaggccgaactcgaggattatcggaaacgcaaaagtctcgaggacgtgacagcagaatatatccacaaagccgagcacgagaagctcatgcagttgacgaacgtttcccgcgcaaaggcggaagatgccttgagtgagatgaagtcacagtactccaaagttctgaacgaactaacccagttaaaacaactggtggacgctcagaaggagaattccgtttctataaccgaacacctgcaggtgatcactaccctgagaactgccgctaaggaaatggaagagaaaataagtaacttgaaagagcatttagcgtctaaggaggtggaagttgccaaactcgagaagcagcttttggaggaaaaggccgcaatgacggacgctatggtgccacggtcatcctacgaaaagcttcaatccagtctcgaatccgaggtgagtgtgcttgcctccaagctcaaggagtctgtgaaggaaaaagagaaggtgcattctgaggtcgtgcagatcaggagtgaggtgagccaggtgaagagagaaaaagaaaatattcagaccctattgaagagcaaagagcaggaggtgaacgaacttctgcaaaagttccagcaggctcaggaagagctcgcagagatgaaacgatacgccgagtcctctagtaaactggaagaggacaaggacaagaaaatcaatgagatgtcgaaagaggttaccaagttgaaagaggcacttaactccctgtctcagctttcatactcgacctccagttccaaacggcagtcccaacaactggaagcgcttcaacaacaagtaaagcagctccagaaccagctcgccgaatgcaaaaagcagcatcaggaggtgattagcgtatacagaatgcatctgctctacgctgtgcaggggcagatggacgaggatgttcagaaggtgctgaagcagatccttaccatgtgtaaaaaccaaagtcagaagaaatag

SEQ ID NO: 58501 - DNA, 2943 bp, Artificial Sequence
  derived and/or modified sequence
atgaagtccctgaaggcgaagttcagaaaaagcgataccaacgagtggaacaaaaatgacgatagactgctccaagccgtcgaaaacggggacgcagagaaagtcgcctcactgctagggaagaagggtgctagcgccactaagcatgattctgagggcaaaactgcattccacctggcagccgcaaagggccacgttgagtgtctccgagtcatgattacccatggcgtagacgtgacagctcaggataccacgggacatagtgccctccacctggccgctaagaatagccatcacgaatgtatacggaagttattacagagcaagtgccccgccgagtctgttgactcctctgggaaaacggccttgcactacgccgctgctcaaggctgcctgcaggccgtgcaaatcctctgtgaacacaaatcccccatcaacctgaaggacctggatgggaatattcctttgctgctcgccgttcaaaatggacacagcgagatttgtcattttctcctggatcacggcgctgacgttaacagcaggaacaaatcagggcgaaccgctctgatgctggcgtgcgaaatcggcagcagtaacgcggtggaagccctgatcaagaagggagcggacctgaacctagtcgatagcctggggtataacgcactccactactctaaactaagtgagaatgctggcatccagtccctcttgctttccaagatctcccaggacgccgatctcaagacccctactaagccaaaacaacacgatcaagtttccaaaatcagctctgagaggtccggcactcccaagaagagaaaggctcctcctccacctatctccccgacgcagctcagcgacgtgagctcaccacggagtattacttccacccctctctctggtaaagagagcgtcttcttcgccgagcccccattcaaggccgagatctcttccattagagagaacaaggataggctgagcgacagcactacaggggcggacagtctgcttgacattagttccgaggctgaccagcaagacctgttgagccttctgcaagctaaggtggcaagcctgactttacacaataaagagttacaagacaagcttcaagcgaaatccccaaaagaagcagaggccgacctctctttcgactcttaccactcaacccagaccgacctgggtccttcgttaggaaaaccaggcgaaacctcccctcctgacagcaagagctcaccgtctgtccttatccattcccttggaaagtccacgaccgacaacgatgttcgcattcaacagctgcaggaaattttgcaggaccttcagaaacgccttgagagcagtgaagcagaacgaaagcaactgcaggtggagctgcaaagccgcagagctgaactggtttgcctgaacaatactgagatcagcgagaattcatccgatctgagccagaagctgaaagaaactcagtccaagtacgaggaagctatgaaggaggtgctgtccgtgcagaagcagatgaagttaggattggtatcacccgagagcatggataattattcacacttccacgaactgcgagtgacagaggaagaaataaacgttcttaagcaagatctgcagaatgcgcttgaagagagtgagcgtaacaaagaaaaagtccgcgaactggaagagaaacttgtggagagagaaaaggggaccgttatcaagccaccggttgaggagtatgaagagatgaagtcatcttactgcagtgtcattgaaaacatgaataaagagaaagccttcctcttcgagaaatatcaggaagcacaagaagaaatcatgaagctcaaagacaccctcaagtcccaaatgacgcaggaggcctcagacgaagctgaggacatgaaggaggcaatgaatagaatgatagatgaactgaacaaacaggtctcagaattgagccagctgtacaaagaagcccaggccgagctggaggactatcgtaaacggaaaagcctggaagatgtgacagcagaatacatccataaagccgagcacgagaaacttatgcagctaactaacgtgagccgggcaaaggccgaagatgccctcagtgagatgaaaagtcagtacagcaaagttctcaacgagttgacccagttgaaacagcttgtggacgctcagaaggagaacagcgtttctattacggagcatttgcaggtgataacaaccctccgtacagcagccaaggagatggaggaaaagatcagcaacctcaaagaacacctagcttctaaagaagtggaggtggccaagttggaaaagcagctgctggaggaaaaagcagccatgactgatgcaatggtgcccaggtcttcatacgaaaagttacaaagtagtctcgagagcgaggtgtctgtccttgcatccaaactcaaggagtcggtgaaagagaaagagaaagtacattccgaggtggttcagatccggtctgaagtgagccaggttaagcgagaaaaggagaacatccaaacacttctcaaatcaaaggagcaggaggttaacgagttgctgcaaaaattccagcaagctcaggaagagcttgcagaaatgaagcgttatgcggagtctagttcaaaactcgaagaggataaagacaagaaaataaatgaaatgtcaaaggaggtcactaaacttaaagaagcactcaacagcctctcccagctctcatactccacctcaagctcgaaacggcagagtcaacaactggaagctctgcaacagcaggtaaaacaactacagaatcagttagcagaatgcaagaaacagcaccaagaagtgataagcgtctaccgaatgcatcttctgtacgctgtacaggggcagatggacgaagatgtgcagaaggtcctcaagcaaatcctaactatgtgcaagaaccagtctcagaaaaagtag

SEQ ID NO: 58502 - DNA, 2943 bp, Artificial Sequence
  derived and/or modified sequence
atgaagagcctgaaggccaagttcaggaagagtgacaccaatgagtggaacaagaatgatgaccggctgctgcaggccgtggagaatggagatgctgagaaggtggccagcctgctgggcaagaagggggccagcgccaccaagcatgattctgagggcaagacagccttccacctggccgccgccaagggccacgtggagtgcctgcgggtgatgatcacccatggagtggatgtgacagcccaggacaccaccggccacagcgccctgcacctggccgccaagaacagccaccacgagtgcatcaggaagctgctgcagagcaaatgtcctgctgagagcgtggacagcagcggcaagacagccctgcactacgccgccgcccagggctgcctgcaggccgtgcagatcctgtgtgagcacaagagccccatcaacctgaaggacctggatggcaacatccccctgctgctggccgtgcagaatggccacagcgagatctgccacttcctgctggaccacggggctgatgtgaacagcaggaacaagagcggccgcacagccctgatgctggcctgtgaaattggcagcagcaatgctgtggaggccctgatcaagaagggagctgacctgaacctggtggacagcctgggctacaatgccctgcactacagcaagctgtctgaaaatgccggcatccagagcctgctgctgagcaagatcagccaggatgctgacctgaagacccccaccaagcccaagcagcacgaccaggtgtccaagatcagcagcgagaggagcggcacccccaagaagaggaaggcccctcctccacccatcagccccacccagctgagtgatgtgagcagccccaggagcatcaccagcacccccctgagcggcaaggagagcgtcttctttgctgagccccccttcaaggccgagatcagcagcatccgggagaacaaggaccggctgagtgacagcaccactggagctgacagcctgctggacatcagcagcgaggccgaccagcaggacctgctgagcctgctgcaggccaaggtggccagcctgaccctgcacaacaaggagctgcaggacaagctgcaggccaagagccccaaggaggccgaggccgacctgagctttgacagctaccacagcacccagacagacctgggccccagcctgggcaagccaggagagaccagccccccagacagcaagagcagccccagcgtgctgatccacagcctgggcaagagcaccacagacaatgatgtgcgcatccagcagctgcaggagatcctgcaggacctgcagaagaggctggagagcagcgaggccgagaggaagcagctgcaggtggagctgcagagccggcgggcagagctggtgtgcctgaacaacacagagatcagcgagaacagcagtgacctgagccagaagctgaaggagacccagagcaaatatgaggaggccatgaaggaggtgctgtctgtgcagaagcagatgaagctgggcctggtgtccccagagagcatggacaactacagccacttccacgagctgcgggtgacagaggaggagatcaacgtgctgaagcaggacctgcagaatgccctggaggagagcgagaggaacaaggagaaggtgcgggagctggaggagaagctggtggagcgggagaagggcaccgtcatcaagccccctgtggaggagtatgaggagatgaagagcagctactgcagcgtgattgagaacatgaacaaggagaaggccttcctgtttgagaagtaccaggaggcccaggaggagatcatgaagctgaaggacaccctgaagagccagatgacccaggaggccagtgatgaagctgaggacatgaaggaggccatgaacaggatgattgatgagctgaacaagcaggtgtctgagctgagccagctgtacaaggaggcccaggccgagctggaggactacaggaagaggaagagcctggaggatgtgacagctgagtacatccacaaggccgagcacgagaagctgatgcagctgaccaacgtgtcccgggccaaggccgaggatgccctgtctgagatgaagagccagtacagcaaggtgctgaatgagctgacccagctgaagcagctggtggatgcccagaaggaaaattctgtgtccatcacagagcacctgcaggtgatcaccaccctgaggacagctgccaaggagatggaggagaagatcagcaacctgaaggagcacctggccagcaaggaggtggaggtggccaagctggagaagcagctgctggaggagaaggccgccatgacagatgccatggtgcccaggagcagctatgagaagctgcagagcagcctggagagcgaggtgtctgtgctggccagcaagctgaaggagagcgtgaaggagaaggagaaggtgcacagcgaggtggtgcagatccgctctgaggtgtcccaggtgaagcgggagaaggagaacatccagaccctgctgaagagcaaggagcaggaggtgaatgagctgctgcagaagttccagcaggcccaggaggagctggccgagatgaagagatatgcagagagcagcagcaagctggaggaggacaaggacaagaagatcaatgagatgagcaaggaggtgaccaagctgaaggaggccctgaacagcctgagccagctgagctacagcaccagcagcagcaagaggcagagccagcagctggaggccctgcagcagcaggtgaagcagctgcagaaccagctggccgagtgcaagaagcagcaccaggaggtgatctctgtgtacaggatgcacctgctgtatgctgtgcagggccagatggatgaagatgtgcagaaggtgctgaagcagatcctgaccatgtgcaagaaccagagccagaagaagtag

SEQ ID NO: 58503 - DNA, 2943 bp, Artificial Sequence
  derived and/or modified sequence
atgaagagcctgaaggccaagttccggaagagcgacaccaacgagtggaataagaacgacgacaggcttctgcaggccgtcgaaaatggtgatgcggaaaaagtcgcctccttgctgggcaaaaagggagcgagtgccacaaaacatgattcagagggcaaaacagccttccatttagctgctgctaagggtcatgttgaatgcttgagagtgatgattacacatggtgtcgatgtgacagcgcaggacactacgggacactctgccttgcatttggcagctaagaatagtcaccacgagtgcatcaggaaactcctgcagtccaagtgccccgcagaaagcgtggactctagcggcaaaacggcactccactacgcggccgctcaagggtgcctccaagccgtgcaaatcttatgcgaacacaaaagtccaattaacctaaaggacctagatggcaatataccactgcttctggctgtgcagaatggccactctgagatatgtcactttttattggatcacggcgccgacgtcaactccagaaacaagagcggtaggactgccctcatgctggcctgtgagatcggctcatctaacgccgttgaagccttgatcaaaaagggagccgacttgaacctagttgactccctgggatacaacgctttgcattactcgaagcttagtgagaatgccggaattcagagcctgctacttagcaaaatcagtcaggacgcagatctgaaaacccctactaaaccaaaacagcacgatcaggtgtctaagatcagctccgagcgcagcggcacaccaaagaaacggaaagcacccccccctcccatctcacctactcagctgtccgacgtgtccagtcccagatctattaccagtacaccactaagtggcaaggagagtgttttcttcgccgagcctcccttcaaagctgaaatttcttctatcagggaaaataaggaccgcctaagcgacagtactacaggcgccgattctctcctcgacatatcatcagaggcagatcagcaggacctgctgagcctgctccaggccaaggtggcctcactgacgctccacaataaggaacttcaggacaagctgcaggcaaaatcccccaaggaggccgaagctgatttatcttttgacagttatcattccacacaaactgatctggggccatcactcggcaaacctggcgagacatcacccccagactcgaagtcatctcccagtgtactcatccattctctgggcaaatctacgaccgataatgatgtgcgtattcagcagctccaagagattctgcaggatctgcagaaacggttagagagtagtgaggccgaaaggaagcagctgcaagtggagctgcagtcccggagagcggaactggtctgcctaaacaatacagagatttctgaaaactcatcagacctctcccagaagctaaaagagacccagtccaagtatgaagaggccatgaaggaggtactgagcgtacagaagcagatgaaactcgggctggtgtcgcccgaatcaatggacaattatagccactttcatgagctaagggtgaccgaggaagagatcaatgtactcaagcaagatctacagaacgctctcgaggaatctgaaaggaacaaagaaaaggtgcgagagctggaggaaaagcttgtcgagcgtgaaaagggcacggtgatcaaaccccccgtggaggaatatgaagaaatgaaatctagctactgcagcgtcatcgagaatatgaataaggagaaggcattcctcttcgaaaaataccaggaagctcaagaggagattatgaagctcaaggacacactcaagagccagatgacccaggaggcgtctgatgaggcagaagatatgaaagaggcgatgaacagaatgatcgatgaattgaataagcaggtgtccgaattatctcagctgtataaggaggcccaggcggagctagaggattaccgaaagaggaaaagtctggaagatgttaccgccgagtatattcacaaggctgagcacgagaagctcatgcaactcaccaacgtgagcagggccaaagccgaagacgccctcagcgagatgaagtcccaatatagcaaggttctcaatgaactaacgcaattgaaacaacttgtggatgctcagaaagaaaattccgtctcgatcacagagcatttgcaagtcatcacaaccctgcgcaccgcggctaaagaaatggaagagaaaatttcaaatctcaaggaacatctggcctcaaaggaagtggaggtagcaaagctggaaaagcagctgctggaggagaaagctgctatgacagacgcaatggtgccccgaagcagctatgaaaaactccagagctctctggagtccgaggttagcgtgctggcaagtaagcttaaggagtccgtcaaggagaaggagaaagtacattcagaggtcgtgcagattagatcagaagtcagccaagtgaagagagagaaagaaaacatccagacactcctaaaatctaaagaacaggaggtgaacgagctgctgcagaagtttcagcaggctcaggaggagctagctgagatgaagcgctacgcggagtcctcttctaagctcgaggaagacaaggacaaaaagataaatgaaatgagcaaggaggtgaccaaattgaaagaagcactcaattctctctctcagctgtcatacagcaccagttcttcgaaacgtcagtcccagcagctggaggctcttcaacagcaggtcaagcagcttcagaaccagttggccgaatgcaaaaaacagcaccaagaagttatcagcgtgtacaggatgcatttgctgtacgcagtccagggacagatggatgaggatgtccagaaagtgctgaaacagatcctcacgatgtgcaaaaatcagagtcagaaaaagtag

SEQ ID NO: 58504 - DNA, 2943 bp, Artificial Sequence
  derived and/or modified sequence
atgaagagcctgaaggccaagttccggaagagcgacaccaacgagtggaacaagaatgacgatagactgctgcaggctgtagagaacggcgacgcagagaaagtggcctccctgctaggaaagaagggcgcatcagccaccaagcacgattctgaaggcaagactgcctttcatctggcggcagcgaaaggacatgtggagtgcctgagagtcatgatcacgcacggagtggacgtgaccgcacaggataccacaggtcattcagctctccacttggcagctaaaaattcccaccacgagtgtattcgaaaattactgcagtctaagtgcccagctgaatctgtggactcctccggtaagacggccctacactacgccgctgcccaggggtgcctgcaggcagtacagattctgtgtgaacacaagagccctattaacctcaaagacttggatggcaacatcccactgctgttggcggtgcagaacgggcatagtgaaatttgccattttcttcttgaccacggagctgatgtcaattcaagaaataagtccggaagaactgcactcatgctagcttgtgaaataggcagttctaacgcagtggaagccctgataaagaaaggggcagatctgaatttagtcgattcactaggatataatgctcttcactactccaagttgagtgagaacgcaggtattcagagccttctcctaagcaaaatctcacaggatgccgacctgaaaactccaacaaagcccaaacagcacgatcaagtgtctaaaattagttctgagagaagcggaacccccaagaaaaggaaagcccccccaccccccatcagtcccacacagctttcagatgtttcctctccccggtctataaccagtactcccctatcaggcaaagagtccgtgttctttgcagagcctccattcaaagcagagatctcgagtattcgcgaaaataaagaccgtctgtcagatagcacaactggcgccgatagccttctggacatatcctccgaagcagatcagcaggatctcctttccctgctgcaagctaaagttgcctctctcactctccataacaaggagctgcaggataaattacaggcaaagtctccaaaggaagccgaggccgacctgagtttcgactcttaccatagtacccaaaccgatcttgggccgtctctagggaagcccggtgagacgagtccaccagattctaagagcagcccctcagtacttattcactcgcttggtaagagcacgactgataacgatgtccgaattcagcaactgcaggagattttgcaagatcttcagaaacggctggaaagtagcgaagccgagcgtaaacagctacaagttgagctgcagtcccgcagagccgaattggtgtgtttgaacaacacagaaattagcgagaatagttctgatttatcccagaaactaaaggaaacacaaagtaaatatgaggaggctatgaaggaggtactatcggtgcagaaacagatgaaacttggcctggtgtcccctgagtctatggataattacagtcattttcacgagctgcgtgtcactgaagaggagatcaacgtgctaaagcaggatcttcagaatgccctcgaggaatccgaaaggaacaaagaaaaagtgagggagctcgaggaaaaactggtggagagggaaaagggtactgtgatcaaaccgccagtggaggagtacgaagagatgaaaagctcgtattgctcagtgattgaaaatatgaataaagaaaaagcatttctgttcgagaaatatcaagaggcccaagaagagatcatgaagctgaaagacactttgaagtctcagatgactcaagaagctagcgatgaagcggaggacatgaaagaggccatgaaccgtatgattgacgaacttaataagcaagtgtcagaactgagtcagctgtataaagaggctcaggcggaattggaagactatcggaagcggaagtcattggaggatgtgaccgccgagtacattcacaaggcagagcacgaaaaactgatgcagctaacaaacgttagccgagccaaggctgaggatgccttatcagagatgaagtcccagtattccaaagtgctcaacgagttaacccagctgaaacaattagttgatgctcagaaagagaactccgtgagcatcacggaacatctacaggtaattacaacccttcggaccgcggctaaggaaatggaagagaaaatttccaatttgaaggaacatctcgcaagtaaagaagtggaggtggcgaaattagagaagcagcttttagaggagaaagctgccatgactgatgccatggtacctcgaagcagttacgagaagctccagagctccttagagagcgaggtttccgtgctggcctccaaactgaaggagtctgtcaaggagaaggagaaggtacacagtgaggtggtgcagatcaggagcgaggtcagtcaagtgaagcgagagaaggaaaacatccagaccctgctgaagtccaaagagcaggaagtaaacgaactgctgcagaaattccagcaggcacaggaggagttagccgagatgaaaagatatgcggagtccagctctaagcttgaggaggacaaagacaaaaaaataaacgagatgtctaaggaagtaacaaagctgaaagaggcattaaatagtcttagccagttgtcctactccacaagcagctctaaacgtcaatcccagcaactggaggcactgcaacagcaggtgaaacagctgcaaaaccagctcgccgagtgcaagaagcagcaccaagaggtaatctcagtgtatagaatgcatttactctacgcggtccaaggacagatggacgaggatgtgcagaaagtccttaagcagattttgaccatgtgtaaaaatcagagccagaagaaatag

SEQ ID NO: 58505 - DNA, 2943 bp, Artificial Sequence
  derived and/or modified sequence
atgaagagcctgaaggccaagttccggaagagcgacaccaacgagtggaataaaaatgacgaccgtctgttgcaggccgtggaaaacggcgacgccgaaaaagtggctagcctcctggggaaaaagggcgccagcgctaccaagcacgatagcgagggaaaaaccgccttccacctcgctgcagctaagggacacgtggaatgtctacgagtgatgatcacccacggagtggacgtgactgctcaagacacgacaggacacagtgcacttcatctggctgccaaaaactcgcatcacgagtgcatacggaagctcttgcagtctaagtgccctgccgagagcgtcgattcaagtggaaaaactgcattgcactatgcggctgcacaaggttgcctacaggcagtgcaaatcctttgtgagcataagtcccctatcaacctgaaggatttggatggaaacatacctctccttctggctgttcaaaacgggcatagcgaaatctgccattttttgctggaccatggagcggacgtgaactctcgaaacaaaagtggacgcaccgccctgatgctggcttgtgaaatcggcagctccaatgcagtggaagccctgattaagaagggtgcggatctaaatctcgtggattcactaggatacaatgcactccactattctaagctgagcgagaacgcaggtattcagagcctgctgctctcaaaaatcagtcaggatgctgacttaaagaccccaaccaaaccaaagcagcatgaccaagtatcgaagatctcatcggaacgctccggaacacccaagaaacgcaaagctcctccaccccctatttcccctacacagcttagcgatgtgtcatctccacggagtattacaagcaccccactgtccggtaaagagtcagtcttctttgccgagccacccttcaaggccgagatcagtagtattagagagaacaaagaccgtctttcagactctactacaggcgcagattcactgctggacatctccagcgaggcggaccaacaggatcttctgagtctgctccaagcaaaggtcgctagccttaccttacataataaggagctgcaggacaaactgcaagcaaaaagtcctaaagaagcggaggctgatcttagcttcgactcatatcactcgactcagaccgacctcgggccctccctcggcaaaccgggagaaacctcgcctcccgatagcaaatctagcccttcagtactcatccactccctgggcaaatccacaacggacaacgacgtgaggatccagcagctgcaggagatactgcaggacctgcagaagcgcctagagtcatcagaagcagagcggaaacagcttcaggtggagctgcagtcacgccgtgccgaattggtgtgcctcaacaataccgagataagtgaaaactcttctgacctgagccagaagctgaaagagacgcagtcaaagtatgaggaggcaatgaaagaggtgctgtccgttcagaaacagatgaagctcgggttagtcagtcccgagtctatggataattacagccacttccacgaactccgtgtaaccgaggaggagatcaatgttctcaaacaggatctgcagaatgctctggaagagtctgaacggaataaggagaaagtgagggagttggaggagaagctggtggaacgagaaaaggggacggtcatcaagcctcccgtggaggaatatgaggaaatgaaatcatcctactgttccgtgatagaaaacatgaataaagaaaaagcattcctgttcgagaagtaccaggaggctcaggaggagataatgaagttgaaagatacattgaagtcacagatgacacaggaggcctcagatgaagcagaggatatgaaggaggccatgaatagaatgatcgacgagctgaacaagcaggttagcgaactgtcccagctttataaagaagcccaggcagaattggaggattaccgcaaaaggaagagcctggaagacgtcaccgccgagtatattcacaaagctgagcacgagaaactgatgcagctcacaaatgtgagcagagccaaagcagaggatgcactttctgaaatgaagagccaatactctaaagttctgaacgaattgactcagttaaaacagctagtggatgctcaaaaggagaatagcgtctcaattaccgagcatcttcaggtaattaccacactgagaacagcagccaaagagatggaagagaagataagtaacctcaaggaacatcttgcatctaaggaagtcgaggtcgctaaactggagaaacagttgctagaagagaaggccgccatgacagatgccatggttcctaggagttcatacgaaaagctgcaatctagcttggagagcgaggtcagtgtcctggcctcgaaactgaaggaatcagtcaaggaaaaagagaaagttcacagcgaagtggtgcagattagaagtgaagtctcccaggtaaagcgggagaaggaaaacattcagacattgctgaagtcaaaagagcaggaagttaacgaactcttgcagaaatttcagcaagctcaggaagaattagctgaaatgaaacggtatgctgaaagcagctctaagctcgaggaggacaaagataaaaaaatcaatgaaatgtccaaagaggtgaccaagttaaaagaagcactgaatagcctgtcacagctttcctacagcaccagcagttccaaacgacaatcccagcagttggaagcgctgcagcagcaggtgaaacagctccaaaatcagttagcagaatgtaagaagcagcatcaggaggtcatttccgtttatcgcatgcatcttctgtatgccgttcagggacagatggacgaagacgtacagaaggtgctaaagcagatcttaaccatgtgtaagaatcagagtcagaaaaagtag

SEQ ID NO: 58506 - DNA, 2943 bp, Artificial Sequence
  derived and/or modified sequence
atgaagtcgttaaaggcaaaattcagaaagagcgataccaatgaatggaacaagaatgacgataggctgcttcaagccgtagagaacggcgacgcagaaaaagtagcctctttattgggcaagaagggagcaagcgccacaaaacatgacagtgagggaaagacggctttccatctggcggcagcgaagggccatgtagagtgtctcagagtgatgattacacatggggtggacgtgactgcccaggacactactggacattctgctctgcatctcgctgcaaaaaactctcaccatgagtgcatacggaaactgctgcagtcgaaatgtcccgctgagagcgtagacagttctggcaagaccgctctgcattatgccgcagcgcaggggtgcctgcaggcggttcagatcttatgtgagcataaaagccctatcaatctgaaggatctggatggcaacattccacttttgctggccgtacagaacgggcatagcgagatttgccatttcctattggaccatggtgccgatgtcaattccaggaataaatccgggaggaccgctctgatgctggcttgtgagataggctcttctaacgcggtcgaggccctgattaagaaaggggctgacctcaatctggtggactccctcggatataacgctctgcactatagcaagctaagcgaaaacgctgggatccagagtctgcttttaagtaagatctcccaggatgcggatctcaagaccccaactaagcccaagcagcacgatcaggtcagcaaaatcagcagtgaacgcagcggcacacctaaaaaacgcaaggcacctcctccacccatttctccgactcagctgtccgacgtaagttcaccccgatctattacgtccacaccattgtccggaaaggaatccgtgtttttcgcagagccccctttcaaggccgagatcagctccattagagagaacaaagatcggctgtcagatagtactacgggcgcagactctttgctcgacatctcttccgaagcagatcaacaggacctgttaagcttgcttcaagccaaagtcgcgtccctcacgctgcacaataaagaactgcaggacaaactgcaggcgaaatcacctaaggaagcggaggcagacctgagttttgacagctatcactccactcagaccgacctgggcccatcattgggaaagccaggcgaaacctcacctccagactctaaatcgtcaccatctgtgctaatccacagcctgggaaagtcaacaacagataatgatgtccgaattcagcagctgcaggaaattctccaggatctgcaaaaaaggctcgaaagctcagaggccgagaggaaacagctgcaggttgaattgcagtcccgcagggcagaactcgtgtgtctcaataacaccgaaattagtgagaactccagcgacttatcccagaaactgaaagagacacagtcgaagtacgaagaggcaatgaaagaggtgttgtcagttcagaagcagatgaagctgggattagtgtcccctgaatcaatggacaattactcacactttcacgagttacgcgtcacagaggaggagatcaacgtcctgaaacaagatcttcagaatgcactggaagaaagcgaacgcaacaaagagaaggtccgtgagctggaagagaagttggtcgagagagagaaaggtaccgtgattaagcccccagtggaagaatatgaggagatgaagtcttcctattgcagcgtcattgaaaacatgaacaaggagaaggcatttctgttcgagaaataccaggaggcccaggaggagatcatgaagttgaaggatacactcaagtcgcagatgactcaggaggctagtgacgaggctgaggatatgaaagaagccatgaacagaatgatcgacgaactgaataaacaagtgtcagagctgagccagctatataaagaggctcaggctgagttggaggactaccgtaagagaaagagtttggaggatgtgacagctgagtacattcacaaggccgagcatgagaagttgatgcaactcacaaatgtctctcgcgctaaagccgaggacgctctgtctgagatgaaatcccagtatagcaaagtgttgaacgagctgacccagctcaagcaattggttgacgctcagaaggagaattctgtgagcatcactgagcaccttcaagtgataactactttgcgtactgccgcaaaggagatggaagaaaaaatatcgaacctgaaggaacatctggccagtaaggaggtggaggtggctaagttagagaaacagctgctggaggaaaaggcagcgatgaccgatgctatggtgccccgatcgagttacgaaaaactgcagtcctcactcgaatcagaagtctctgtgttggcaagtaagctcaaggagagtgtgaaagaaaaggagaaggttcacagcgaggttgtgcagatccggtctgaagtgagtcaggttaagcgggaaaaagaaaacatacagacgctcctgaaatccaaagagcaggaagtaaacgagctgctgcagaaattccagcaggcgcaggaggagctggccgagatgaaaaggtacgcggagtcctcttctaaactggaagaagataaggacaagaagatcaacgaaatgagcaaggaggtaaccaagctcaaagaggctcttaatagtttgtctcagttatcttatagtacatcctcttctaagcggcagagtcaacaactggaagcgctccaacagcaggtaaagcagctccagaatcagctggctgagtgtaaaaaacagcaccaggaagtcatttcagtttaccggatgcacctcctctatgctgtgcaggggcagatggacgaagacgtgcagaaggtcctgaaacagatattgacaatgtgtaagaatcagagccagaagaagtag

SEQ ID NO: 58507 - DNA, 2943 bp, Artificial Sequence
  derived and/or modified sequence
atgaagagcttaaaggccaagtttcggaagtcagatacgaacgagtggaacaagaacgatgaccggctgctgcaagccgtcgagaatggagacgcagagaaagtggcctcgctgttggggaaaaagggcgcttctgctacgaaacacgactccgaaggcaaaaccgccttccacctggccgctgcgaagggccacgtcgaatgtttgcgcgtcatgattacacatggggtggatgtgacagcacaggacactacgggccactccgccctgcacctggctgcaaagaatagccaccacgagtgtatccggaaactgctccagagcaagtgcccggcagaaagcgtggacagctcaggtaagaccgcgttgcactacgctgccgctcagggatgtctacaggcagtgcagatcttgtgcgagcacaaatcaccgatcaacctgaaggacttggatggcaatatcccacttctgctggccgtacagaatggacacagcgagatctgccactttctcctggatcacggtgccgacgtgaacagtagaaataagtcagggaggacagcgttgatgctggcctgcgagatcggatctagcaacgctgtcgaagcgctgattaagaaaggtgcagatcttaacttggtagatagccttggctacaatgccctacactactcaaagctgtcagaaaatgccggaattcagtccctgctcttgtccaagatctcacaggatgcagatctgaagacgcccacaaagccaaaacagcacgatcaggtgtctaagattagtagcgagaggagtgggactcccaaaaagcgcaaggctcctccaccgccaatctctccaacccagttgtcagatgtgtcctcaccccgtagtataacaagcactcctctgagcgggaaagaatctgtgttttttgccgaaccaccctttaaagctgagatcagttctattcgcgagaacaaggataggttgagcgactccaccaccggtgcggatagtttactggatatctcaagcgaggccgaccagcaagatctgctctccttgctccaggctaaagtcgcttccctcactcttcataataaagaactgcaagataagctccaggccaaatccccaaaggaagctgaggccgacttgtccttcgactcctaccactcaacccagacagacctcgggcctagtctgggaaagccaggggaaacgtcaccccctgattccaaatctagcccctccgttttgatccactccctgggcaaatccaccaccgataacgatgttcgcattcaacagcttcaagaaatcctccaagatttacagaagcggctggaatcctcagaggccgagaggaagcagctccaagtcgagttgcagagccgcagagccgaattagtgtgcctgaataacactgagatatctgaaaatagtagtgatcttagccagaagctgaaagaaacacagagtaaatacgaggaggctatgaaagaagtgctgagcgtgcagaaacagatgaagctcgggcttgtttccccagaaagcatggacaactactctcatttccacgaactcagagtaactgaggaagagatcaacgtcctcaagcaagatttacaaaacgccctggaagagagtgagcgtaacaaggagaaagtgcgcgagttagaagaaaaattggtggagcgtgaaaagggcacagttatcaaaccgccagtggaggagtatgaagagatgaaatcaagctattgctctgtgattgaaaatatgaataaggagaaggccttcctgtttgagaagtatcaggaggcccaagaggagatcatgaagttgaaagacacgctgaaatcgcagatgacccaagaggcctcagacgaggcagaggatatgaaagaagcaatgaaccggatgatcgacgaactcaataagcaggtgagcgagctgtcccagctgtacaaagaagctcaggctgagttggaggattatcgcaaaaggaaaagcttagaagatgtgacagccgaatatatacataaggccgaacatgagaagctcatgcaactcactaacgtgtcacgcgcaaaggctgaagatgcgctgtccgagatgaagtcgcagtattctaaggttcttaatgagttgacacagctgaagcagctcgttgacgcacagaaagagaattcggtgtcgatcactgagcatttgcaggtgatcacgacgctccgcaccgccgcaaaggaaatggaggaaaaaatttcaaacttaaaagaacatctagcctccaaggaggtggaggtggctaagcttgagaaacaactgttagaggagaaagcggcaatgaccgatgccatggtaccaagatcgtcctatgagaagctccaatcctctctggaaagcgaagtatccgtgttggcgagcaaactcaaagagagtgtaaaggagaaggagaaagtgcattctgaagtggtgcaaatccgtagcgaggtatcacaggtgaaacgggagaaagagaacatacagactctcttaaaaagtaaggaacaggaggtcaacgaactcttacaaaagttccaacaggcgcaagaggaacttgccgaaatgaagcgatacgctgagagtagcagtaagctggaagaagacaaggataagaagattaacgagatgtccaaagaggtcacgaagttgaaagaggcactgaactcgctgagccagctgtcatattctacctctagtagcaagcggcaatcccagcagctggaagctctgcagcaacaggtaaagcaattacagaaccagctggctgaatgtaagaagcagcatcaagaggttattagcgtttataggatgcacctcctgtacgccgtgcagggccagatggatgaggatgttcagaaagttctaaagcagatactgactatgtgtaagaaccagagtcaaaagaagtag

SEQ ID NO: 58508 - DNA, 2943 bp, Artificial Sequence
  derived and/or modified sequence
atgaaaagcttgaaggctaaattccgtaagagtgatacaaacgagtggaataagaatgacgaccggttgctgcaggcggttgagaacggcgatgcagagaaagttgccagtttactcgggaagaaaggtgcaagcgcaacaaaacatgatagtgagggtaagacagcctttcacttggccgctgccaaggggcatgttgaatgtctcagggtgatgatcacgcacggtgtggatgtcaccgctcaggacactaccggacactctgcgctccatctcgcagcaaaaaattcgcatcacgagtgcatcaggaagttgttgcagtctaaatgtcctgcggagtctgttgactcatcggggaaaacggctctccattacgccgctgcccagggatgtcttcaggccgtgcaaatactctgtgagcacaagtctcctattaatcttaaagatctggatgggaacatacccctgctcctcgccgtgcagaacggccattcagaaatctgccatttcctgctcgaccacggagctgatgtgaattctcggaacaagagtgggagaactgccctgatgctggcctgtgaaataggtagtagcaacgcggtggaagctctgattaaaaaaggcgctgacctcaatcttgtggactccctgggatataatgcgctccattactcgaagttatccgagaacgcagggatccaatcgctgcttctatcaaagatcagccaagatgctgacctgaaaactccaacaaagccaaagcagcatgaccaggtttccaaaatttctagcgaaaggagcgggactcccaaaaagaggaaggctccacctccccctattagccccactcagttgagcgacgtcagcagcccgcgatctattacgtcaacccctctgagtggcaaggagagtgtcttcttcgctgagccgccattcaaagctgagatatctagcattcgcgagaacaaagaccgactaagcgacagcaccaccggcgctgattcactgctcgacatcagtagtgaagctgatcagcaggacctactgagtctgctccaagctaaggttgcttctctgaccctccataataaagagcttcaagacaaactgcaagccaaatctcctaaggaggccgaggcggatttgagctttgactcttaccacagtacacagactgacctaggcccttcgctgggcaagcccggagagacttcacccccagactccaagtcttccccctccgtgttaattcacagcttaggaaagtccacgaccgataatgacgtccgtatccagcaactccaggagatcctgcaggatctccaaaaaagactcgaaagttctgaagcagagcgcaagcagctccaagtggagctgcagtcccgaagagccgagctggtgtgcctgaacaataccgaaattagcgagaattcctctgatctttctcaaaaactgaaggagactcaatctaagtacgaagaggcgatgaaggaggtgctttcagtccagaagcagatgaagctcgggttggtgtcgcctgaatcaatggacaattattctcatttccatgagctgcgagtcaccgaagaagagatcaacgtactgaagcaagatttgcaaaacgctctggaagaatcagaaaggaataaagagaaggtgagagagctggaagaaaaactggttgagagagagaaagggactgtgattaagccacctgtggaggagtacgaagaaatgaagagtagctattgttcagtcatcgagaacatgaataaggagaaggcctttctttttgagaaatatcaggaagcgcaagaggaaatcatgaagctaaaggacaccctcaaaagccaaatgacacaggaggcaagtgacgaggcggaagacatgaaagaagccatgaatagaatgattgatgaacttaataaacaggtctcggagttgagtcagctttataaagaggcacaagctgagctggaggattacagaaagagaaagtccctagaggatgtgaccgcggaatacatacataaagctgagcatgagaagctgatgcaactgaccaatgtcagtcgggctaaagcagaggacgctttgtcggagatgaagtcacagtacagtaaagtattaaatgagctgacacaactgaagcagctggtggatgctcagaaagaaaactccgtgagcataacagagcacttgcaagtgattaccacgcttaggactgcggcaaaagagatggaagaaaaaatcagcaatctcaaggaacatttggcctctaaggaggtggaggtagcgaaactggagaagcagcttctcgaagagaaggccgctatgaccgatgccatggtgcccaggtcttcctacgagaaattgcaatctagcctggaatctgaagtgagcgttctggcatctaaattgaaggaaagtgtcaaagaaaaggaaaaagtccatagcgaagtggtgcagatccgatccgaggtatcccaggttaagcgagagaaagagaatattcagacattgctcaagtccaaagagcaagaggtcaatgagctgctgcagaaattccagcaagcacaggaggagcttgccgagatgaaaaggtacgctgaaagcagcagcaagttggaagaggacaaagataagaaaattaacgagatgagtaaggaggtgacaaagctgaaagaggctttaaacagcctatctcaactcagttactctactagctcatctaagcgacagagtcagcagctcgaggccttacagcagcaggtgaaacaactccaaaatcagctggctgagtgtaaaaaacagcaccaggaagttatctccgtctatcgtatgcatttactttacgctgtccaaggtcagatggatgaggatgtgcagaaggtgttgaagcagatcctgacgatgtgtaaaaaccagtcccagaaaaaatag

SEQ ID NO: 58509 - DNA, 5092 bp, Artificial Sequence
  derived and/or modified sequence
atccaggtcggcgggggccggcgcccggcggccacgtggtggtgctgccgctgcccccgccccgccggcctagcccgggagctcggcgcccactgacccccgcagcgggggaggaggagggactgcggcgcaggaagccgagcaggaagcgagcccggcggccgcgttttcctggggaagcggcgggcggggtggagcagccagctgggtccggggagcgccgccgccgcctcgatggggtgttgaaaagtctcctctagagctttggaaggctgaatgcactaaacatgaagagcttgaaagcgaagttcaggaagagtgacaccaatgagtggaacaagaatgatgaccggctactgcaggccgtggagaatggagatgcggagaaggtggcctcactgctcggcaagaagggggccagtgccaccaaacacgacagtgagggcaagaccgctttccatcttgctgctgcaaaaggacacgtggaatgcctcagggtcatgattacacatggtgtggatgtgacagcccaagatactaccggacacagcgccttacatctcgcagccaagaacagccaccatgaatgcatcaggaagctgcttcagtctaaatgcccagccgaaagtgtcgacagctctgggaaaacagctttacattatgcagcggctcagggctgccttcaagctgtgcagattctctgcgaacacaagagccccataaacctcaaagatttggatgggaatataccgctgcttcttgctgtacaaaatggtcacagtgagatctgtcactttctcctggatcatggagcagatgtcaattccaggaacaaaagtggaagaactgctctcatgctggcctgtgagattggcagctctaacgctgtggaagccttaattaaaaagggtgcagacctaaaccttgtagattctcttggatacaatgccttacattattccaaactctcagaaaatgcaggaattcaaagccttctattatcaaaaatctctcaggatgctgatttaaagaccccaacaaaaccaaagcagcatgaccaagtctctaaaataagctcagaaagaagtggaactccaaaaaaacgcaaagctccaccacctcctatcagtcctacccagttgagtgatgtctcttccccaagatcaataacttcgactccactatcgggaaaggaatcggtattttttgctgaaccacccttcaaggctgagatcagttctatacgagaaaacaaagacagactaagtgacagtactacaggtgctgatagcttattggatataagttctgaagctgaccaacaagatcttctctctctattgcaagcaaaagttgcttcccttaccttacacaataaggagttacaagataaattacaggccaaatcacccaaggaggcggaagcagacctaagctttgactcataccattccacccaaactgacttgggcccatccctgggaaaacctggtgaaacctctcccccagactccaaatcatctccatctgtcttaatacattctttaggtaaatccactactgacaatgatgtcagaattcagcaactgcaagagattttgcaagatctacagaagagattagagagctctgaagcagagagaaaacagctacaggtcgaactccaatcccgaagggcagaactggtatgcttaaacaacactgagatttcagagaacagctctgacctcagccagaaacttaaagaaactcagagcaaatacgaggaggctatgaaagaagtccttagtgtgcagaagcagatgaaactcggtcttgtctcacctgaaagcatggataattattcacatttccacgagctgagggtcacggaagaggaaataaatgtgctaaagcaggatctgcagaatgcattagaagaaagtgaaagaaataaagagaaagtgagagagttagaggaaaaactggtagagagggagaaaggtacagtgattaagccacctgtggaagagtacgaggaaatgaaaagttcatattgctctgttattgagaatatgaataaggagaaagcatttttgtttgagaaataccaagaagcccaagaagaaatcatgaaattaaaagacacactaaaaagtcagatgacacaggaagccagtgatgaagctgaggacatgaaagaagccatgaataggatgatagatgaactcaataaacaggtgagcgagctgtcacagctgtacaaagaagcccaggctgagctggaggattacaggaagaggaaatctctagaggatgtcacagctgaatatatccataaagcagagcatgagaaactgatgcaattgacaaacgtgtccagggctaaagcagaagatgcactgtctgaaatgaagtctcagtattcaaaagtgttgaatgagttgacccagctcaaacaactggtggatgcacaaaaagagaactctgtctctatcacagaacatttgcaagtgataaccacgctgcggactgcagcaaaagagatggaagaaaaaataagcaatcttaaggaacaccttgcaagcaaggaagtggaagtagcaaagctggagaaacaactcttagaagagaaagctgctatgactgatgcaatggtacctcggtcttcctatgaaaaactccagtcatccttagagagtgaagtgagtgtgttggcatcgaaattaaaggaatctgtgaaagagaaagagaaggtccattcagaggttgtccagattagaagtgaggtctcacaggtgaaaagagaaaaggaaaatattcagactctcttgaaatccaaagagcaagaagtaaatgaacttctgcaaaaattccagcaagctcaggaagaacttgcagaaatgaaaagatacgctgagagctcttcaaaactggaggaagataaagataaaaagataaatgagatgtcgaaggaagtcaccaaattgaaggaggccttgaacagcctctcccagctctcctactcaacaagctcatccaaaaggcagagtcagcagctggaggcgctgcagcagcaagtcaaacagctccagaaccagctggcggaatgcaagaaacaacaccaggaggtcatatcagtttacagaatgcatcttctgtatgctgtgcagggccagatggatgaagatgtccagaaagtactgaagcaaatccttaccatgtgtaaaaaccagtctcaaaagaagtaaagtggattccttggcaggacactgccccttgtcatctgtctttgtgttagatccagagttgtcggcagccgctgccattgttctcattcgtggtatgcactgtggcctagcgtagcttcttccctttccaaaggtttctgaggacttctcccaggagaagactgcccgcctcagaactgcttagagacttcaaaccagcagaggtgaaagtccctgtcatcccttcagattccagagctgggatcagccatgcccagaggtctggtcctgatgctggcaggggggccccctcctccatccctgactggctgagtggctttatcaccaccgagtgatgtgctgaggcctcctgcagtgaatgctccttccattcctgtactcgggcagtgccattcagcacaggagagctctttttgcctttggctttcaattccaaaacatgatttaatttctaactaaattagtatggcactagttatgaagtatctgcttaaaacccttcatcatgatatcctgtggatttaaaaactctaattccatgttttcttcccatctgccttatatatctcatcaccctgcttatcaatattcagtttgatgagcactattaactaaaatatgaaacttaaaaacaaaagcaagttgtccttaaaagttctttttttaagtaaattgttgacatactgcaaattttctatgcaaacttgcctcctgctgttatctgtgaagctcaggaaatccaaacatttgtgtttcaacaagggacagtaaactgtgtgtttacagccaaaagaaatgcctcatagttcttaacctcaacttttgtagaagtatttttttctctgtaatatttttattggctcataaagatgttttcatatctgaactcctaaataagtgaaattacagtagattatattaacaaaatactttttaggtagccatgcttgagactttttaaaaatataactttttccttaaagttttcagctatagcaaaaggtagttatgtatgccagacctaatatgagctgccaccaacacccctagaactttcagccatggtgtcttcagaattgtagcgcatttctgaatctagcaaatcctccttttacccgttgaatgttttgaatgccctgactctaccagcgcccataaatgatctctagaaggactgttagtaccaatctgtttttcaactttgaagctaaaaaccctgatatggtaatattatggtgcatagcagaggtctcggaaaaaaaatatttctgttcactttactttcaggttaaaaatgtttctaacacgcttgcaacttcccttatggcattaatcttgttgagggagagagacagaatcctggactctccaaagtatttaactgaaagtagggcctgctctgacagggcccatgtcccacaaggctgcttggcctcagtgggtgcttggctgtgctggatgatatgttgatctgtattggataaggaccaatgacagcaaagcaaaaatggctttaaagcttggtgttacttttcttaagttgtttaattatagttaagcaatttcaaaaatgctccaaagaaatgtgaaaggaccttttgtcacagcacttcagaaaatacacaacagccccttctgcccccgcacagaaatgctgcagagtatataaaacttgagacatttttgtaggatgcctgacgaggtgtagccttttatcttgtttccggatgcatatttattacgagtactctggttaaatattgaaaagttatatgctgtagtttttagtattttgtctttgtaatttacagaagttattggagaaaataaacttgtttcattttgcatttctggtgttgatt

SEQ ID NO: 58510 - DNA, 5064 bp, Artificial Sequence
  derived and/or modified sequence
gatggggtgagtgcgcggcacggagttgggaggctcccggcgcggggtcccgggctcgtgtccccgcctttgtgtctggagctcgggcgcgggaggcgctggggacggcgcccgggcggagcggctgagcgggctgcagccggggtcccgccacctctccctggtccaccgccggcagcccactgtctgcggagagcagatctggggacaagaggaaggagaggaaggtgttgaaaagtctcctctagagctttggaaggctgaatgcactaaacatgaagagcttgaaagcgaagttcaggaagagtgacaccaatgagtggaacaagaatgatgaccggctactgcaggccgtggagaatggagatgcggagaaggtggcctcactgctcggcaagaagggggccagtgccaccaaacacgacagtgagggcaagaccgctttccatcttgctgctgcaaaaggacacgtggaatgcctcagggtcatgattacacatggtgtggatgtgacagcccaagatactaccggacacagcgccttacatctcgcagccaagaacagccaccatgaatgcatcaggaagctgcttcagtctaaatgcccagccgaaagtgtcgacagctctgggaaaacagctttacattatgcagcggctcagggctgccttcaagctgtgcagattctctgcgaacacaagagccccataaacctcaaagatttggatgggaatataccgctgcttcttgctgtacaaaatggtcacagtgagatctgtcactttctcctggatcatggagcagatgtcaattccaggaacaaaagtggaagaactgctctcatgctggcctgtgagattggcagctctaacgctgtggaagccttaattaaaaagggtgcagacctaaaccttgtagattctcttggatacaatgccttacattattccaaactctcagaaaatgcaggaattcaaagccttctattatcaaaaatctctcaggatgctgatttaaagaccccaacaaaaccaaagcagcatgaccaagtctctaaaataagctcagaaagaagtggaactccaaaaaaacgcaaagctccaccacctcctatcagtcctacccagttgagtgatgtctcttccccaagatcaataacttcgactccactatcgggaaaggaatcggtattttttgctgaaccacccttcaaggctgagatcagttctatacgagaaaacaaagacagactaagtgacagtactacaggtgctgatagcttattggatataagttctgaagctgaccaacaagatcttctctctctattgcaagcaaaagttgcttcccttaccttacacaataaggagttacaagataaattacaggccaaatcacccaaggaggcggaagcagacctaagctttgactcataccattccacccaaactgacttgggcccatccctgggaaaacctggtgaaacctctcccccagactccaaatcatctccatctgtcttaatacattctttaggtaaatccactactgacaatgatgtcagaattcagcaactgcaagagattttgcaagatctacagaagagattagagagctctgaagcagagagaaaacagctacaggtcgaactccaatcccgaagggcagaactggtatgcttaaacaacactgagatttcagagaacagctctgacctcagccagaaacttaaagaaactcagagcaaatacgaggaggctatgaaagaagtccttagtgtgcagaagcagatgaaactcggtcttgtctcacctgaaagcatggataattattcacatttccacgagctgagggtcacggaagaggaaataaatgtgctaaagcaggatctgcagaatgcattagaagaaagtgaaagaaataaagagaaagtgagagagttagaggaaaaactggtagagagggagaaaggtacagtgattaagccacctgtggaagagtacgaggaaatgaaaagttcatattgctctgttattgagaatatgaataaggagaaagcatttttgtttgagaaataccaagaagcccaagaagaaatcatgaaattaaaagacacactaaaaagtcagatgacacaggaagccagtgatgaagctgaggacatgaaagaagccatgaataggatgatagatgaactcaataaacaggtgagcgagctgtcacagctgtacaaagaagcccaggctgagctggaggattacaggaagaggaaatctctagaggatgtcacagctgaatatatccataaagcagagcatgagaaactgatgcaattgacaaacgtgtccagggctaaagcagaagatgcactgtctgaaatgaagtctcagtattcaaaagtgttgaatgagttgacccagctcaaacaactggtggatgcacaaaaagagaactctgtctctatcacagaacatttgcaagtgataaccacgctgcggactgcagcaaaagagatggaagaaaaaataagcaatcttaaggaacaccttgcaagcaaggaagtggaagtagcaaagctggagaaacaactcttagaagagaaagctgctatgactgatgcaatggtacctcggtcttcctatgaaaaactccagtcatccttagagagtgaagtgagtgtgttggcatcgaaattaaaggaatctgtgaaagagaaagagaaggtccattcagaggttgtccagattagaagtgaggtctcacaggtgaaaagagaaaaggaaaatattcagactctcttgaaatccaaagagcaagaagtaaatgaacttctgcaaaaattccagcaagctcaggaagaacttgcagaaatgaaaagatacgctgagagctcttcaaaactggaggaagataaagataaaaagataaatgagatgtcgaaggaagtcaccaaattgaaggaggccttgaacagcctctcccagctctcctactcaacaagctcatccaaaaggcagagtcagcagctggaggcgctgcagcagcaagtcaaacagctccagaaccagctggcggaatgcaagaaacaacaccaggaggtcatatcagtttacagaatgcatcttctgtatgctgtgcagggccagatggatgaagatgtccagaaagtactgaagcaaatccttaccatgtgtaaaaaccagtctcaaaagaagtaaagtggattccttggcaggacactgccccttgtcatctgtctttgtgttagatccagagttgtcggcagccgctgccattgttctcattcgtggtatgcactgtggcctagcgtagcttcttccctttccaaaggtttctgaggacttctcccaggagaagactgcccgcctcagaactgcttagagacttcaaaccagcagaggtgaaagtccctgtcatcccttcagattccagagctgggatcagccatgcccagaggtctggtcctgatgctggcaggggggccccctcctccatccctgactggctgagtggctttatcaccaccgagtgatgtgctgaggcctcctgcagtgaatgctccttccattcctgtactcgggcagtgccattcagcacaggagagctctttttgcctttggctttcaattccaaaacatgatttaatttctaactaaattagtatggcactagttatgaagtatctgcttaaaacccttcatcatgatatcctgtggatttaaaaactctaattccatgttttcttcccatctgccttatatatctcatcaccctgcttatcaatattcagtttgatgagcactattaactaaaatatgaaacttaaaaacaaaagcaagttgtccttaaaagttctttttttaagtaaattgttgacatactgcaaattttctatgcaaacttgcctcctgctgttatctgtgaagctcaggaaatccaaacatttgtgtttcaacaagggacagtaaactgtgtgtttacagccaaaagaaatgcctcatagttcttaacctcaacttttgtagaagtatttttttctctgtaatatttttattggctcataaagatgttttcatatctgaactcctaaataagtgaaattacagtagattatattaacaaaatactttttaggtagccatgcttgagactttttaaaaatataactttttccttaaagttttcagctatagcaaaaggtagttatgtatgccagacctaatatgagctgccaccaacacccctagaactttcagccatggtgtcttcagaattgtagcgcatttctgaatctagcaaatcctccttttacccgttgaatgttttgaatgccctgactctaccagcgcccataaatgatctctagaaggactgttagtaccaatctgtttttcaactttgaagctaaaaaccctgatatggtaatattatggtgcatagcagaggtctcggaaaaaaaatatttctgttcactttactttcaggttaaaaatgtttctaacacgcttgcaacttcccttatggcattaatcttgttgagggagagagacagaatcctggactctccaaagtatttaactgaaagtagggcctgctctgacagggcccatgtcccacaaggctgcttggcctcagtgggtgcttggctgtgctggatgatatgttgatctgtattggataaggaccaatgacagcaaagcaaaaatggctttaaagcttggtgttacttttcttaagttgtttaattatagttaagcaatttcaaaaatgctccaaagaaatgtgaaaggaccttttgtcacagcacttcagaaaatacacaacagccccttctgcccccgcacagaaatgctgcagagtatataaaacttgagacatttttgtaggatgcctgacgaggtgtagccttttatcttgtttccggatgcatatttattacgagtactctggttaaatattgaaaagttatatgctgtagtttttagtattttgtctttgtaatttacagaagttattggagaaaataaacttgtttcattttgc

SEQ ID NO: 58511 - DNA, 3339 bp, Artificial Sequence
  derived and/or modified sequence
actcccgctgaggctgggaagattgaaaggggccatggagaggctgcagtcacaatgaggcctccagattcatgtcatcaaagtgcttcatgatgactggattttcacaccatttatccaagggccctagtcaatggcagcagcaagaatgaaagtagacacattggaagctagagagtcactgggtgacttttggaggtagcaacaagctcatgaagaaggcattcagtggcttgcactccccacccatcctctcaactacatgcgaagttttcacatcttgtacatttccaaatttaatgaaaaaggtgttgaaaagtctcctctagagctttggaaggctgaatgcactaaacatgaagagcttgaaagcgaagttcaggaagagtgacaccaatgagtggaacaagaatgatgaccggctactgcaggccgtggagaatggagatgcggagaaggtggcctcactgctcggcaagaagggggccagtgccaccaaacacgacagtgagggcaagaccgctttccatcttgctgctgcaaaaggacacgtggaatgcctcagggtcatgattacacatggtgtggatgtgacagcccaagatactaccggacacagcgccttacatctcgcagccaagaacagccaccatgaatgcatcaggaagctgcttcagtctaaatgcccagccgaaagtgtcgacagctctgggaaaacagctttacattatgcagcggctcagggctgccttcaagctgtgcagattctctgcgaacacaagagccccataaacctcaaagatttggatgggaatataccgctgcttcttgctgtacaaaatggtcacagtgagatctgtcactttctcctggatcatggagcagatgtcaattccaggaacaaaagtggaagaactgctctcatgctggcctgtgagattggcagctctaacgctgtggaagccttaattaaaaagggtgcagacctaaaccttgtagattctcttggatacaatgccttacattattccaaactctcagaaaatgcaggaattcaaagccttctattatcaaaaatctctcaggatgctgatttaaagaccccaacaaaaccaaagcagcatgaccaagtctctaaaataagctcagaaagaagtggaactccaaaaaaacgcaaagctccaccacctcctatcagtcctacccagttgagtgatgtctcttccccaagatcaataacttcgactccactatcgggaaaggaatcggtattttttgctgaaccacccttcaaggctgagatcagttctatacgagaaaacaaagacagactaagtgacagtactacaggtgctgatagcttattggatataagttctgaagctgaccaacaagatcttctctctctattgcaagcaaaagttgcttcccttaccttacacaataaggagttacaagataaattacaggccaaatcacccaaggaggcggaagcagacctaagctttgactcataccattccacccaaactgacttgggcccatccctgggaaaacctggtgaaacctctcccccagactccaaatcatctccatctgtcttaatacattctttaggtaaatccactactgacaatgatgtcagaattcagcaactgcaagagattttgcaagatctacagaagagattagagagctctgaagcagagagaaaacagctacaggtcgaactccaatcccgaagggcagaactggtatgcttaaacaacactgagatttcagagaacagctctgacctcagccagaaacttaaagaaactcagagcaaatacgaggaggctatgaaagaagtccttagtgtgcagaagcagatgaaactcggtcttgtctcacctgaaagcatggataattattcacatttccacgagctgagggtcacggaagaggaaataaatgtgctaaagcaggatctgcagaatgcattagaagaaagtgaaagaaataaagagaaagtgagagagttagaggaaaaactggtagagagggagaaaggtacagtgattaagccacctgtggaagagtacgaggaaatgaaaagttcatattgctctgttattgagaatatgaataaggagaaagcatttttgtttgagaaataccaagaagcccaagaagaaatcatgaaattaaaagacacactaaaaagtcagatgacacaggaagccagtgatgaagctgaggacatgaaagaagccatgaataggatgatagatgaactcaataaacaggtgagcgagctgtcacagctgtacaaagaagcccaggctgagctggaggattacaggaagaggaaatctctagaggatgtcacagctgaatatatccataaagcagagcatgagaaactgatgcaattgacaaacgtgtccagggctaaagcagaagatgcactgtctgaaatgaagtctcagtattcaaaagtgttgaatgagttgacccagctcaaacaactggtggatgcacaaaaagagaactctgtctctatcacagaacatttgcaagtgataaccacgctgcggactgcagcaaaagagatggaagaaaaaataagcaatcttaaggaacaccttgcaagcaaggaagtggaagtagcaaagctggagaaacaactcttagaagagaaagctgctatgactgatgcaatggtacctcggtcttcctatgaaaaactccagtcatccttagagagtgaagtgagtgtgttggcatcgaaattaaaggaatctgtgaaagagaaagagaaggtccattcagaggttgtccagattagaagtgaggtctcacaggtgaaaagagaaaaggaaaatattcagactctcttgaaatccaaagagcaagaagtaaatgaacttctgcaaaaattccagcaagctcaggaagaacttgcagaaatgaaaagatacgctgagagctcttcaaaactggaggaagataaagataaaaagataaatgagatgtcgaaggaagtcaccaaattgaaggaggccttgaacagcctctcccagctctcctactcaacaagctcatccaaaaggcagagtcagcagctggaggcgctgcagcagcaagtcaaacagctccagaaccagctggcggaatgcaagaaacaacaccaggaggtcatatcagtttacagaatgcatcttctgtatgctgtgcagggccagatggatgaagatgtccagaaagtactgaagcaaatccttaccatgtgtaaaaaccagtctcaaaagaagtaaagtggattccttggcaggacactgccccttgtcatctgtc
